United States Patent Application Publication US 2019/0348154 A1 - sequence listing, part 9

SEQ ID NO: 31134 - DNA, 2616 bp, Escherichia coli
  misc_feature (2460)..(2469): n is a, c, g, or t
atgttaagggtctaccattccaatcgtctggacgtgctggaagcgttgatggagtttatcgtcgaacgcgaacggctggacgatcctttcgaaccagaaatgattctggtgcaaagtaccggtatggcgcagtggctgcaaatgaccctgtcgcaaaagtttggtattgcggcaaacattgattttccgctgccagcgagctttatctgggatatgttcgtccgggtgttaccggagatccccaaagagagcgcctttaacaaacagagcatgagctggaaactgatgactctgctgccgcaactgttggagcgcgaagactttaccctgttgcggcattatctgactgacgatagcgacaagcgaaaactgttccagctttcttcaaaagcggcggacctgtttgaccagtatctggtctatcgtccggactggctggcacagtgggaaacaggacatctggtagaagggttgggagaagcacaggcctggcaagcgccgttgtggaaggcgttggtggaatatacccatcaactcgggcaaccgcgctggcaccgcgccaatctctatcagcgctttatcgaaacgctggagtccgcgacgacctgcccgccggggctaccttcgcgcgtctttatatgcggtatttccgcgttaccgcctgtttatctccaggcgctacaggcgctgggtaaacatattgaaatccatctcctgtttaccaacccctgccgttattactggggcgacattaaagatcctgcttatctggcgaaactgctgactcgccagcgccgacacagttttgaagatcgcgaattatcgttatttcgcgacagcgaaaatgccgggcagctctttaacagcgatggtgaacaggatgtcggcaacccgctgctggcctcatggggcaagcttggacgcgactacatttatctcctttctgatctggagagcagccaggagctggacgcttttgtcgatgtgacgccagataacctgctgcataacattcagtctgacattctggaactggaaaaccgcgccgttgctggtgtgaacatcgaagagttttcccgtagcgataacaaacgcccgcttgatccactggatagcagtatcaccttccacgtttgccatagcccacagcgtgaagttgaagttttacacgatcgcctgctggcgatgctggaggaagatccgacacttactccgcgcgacatcattgtgatggtggccgacatcgacagctacagtccgtttattcaggctgtgtttggtagcgcacctgcggatcgttacctaccttacgccatttccgaccgtcgggcgcggcagtcgcatcctgtacttgaagcgtttatcagcctgttatcgttgccagacagccgctttgtgtcggaggacgttctggcattactggatgtgccggtgctggcggcgcggtttgacatcaccgaagaagggctgcgttatttacgccagtgggtcaacgagtccggaattcgttgggggatagatgacgacaacgttcgcgagctggaactccccgctaccggtcaacacacttggcggtttggcctgacgcgcatgttgctgggctacgcgatggagagcgcgcagggcgagtggcaatcggttctaccttatgatgaatcgagcggcttaattgcagaactggtggggcatctggcttcactgctaatgcagctaaacatctggcgtcgcgggctggcgcaggagcgtccgctggaagagtggttgccggtttgtcgcgatatgctcaacgccttcttcctgccggatgcggaaaccgaagcggcgatgacgctgatcgaacaacaatggcaggcgattatcgccgaaggtttaggtgcacagtatggcgacgcggtgccgctgtcactattgcgtgatgaactggcacagcgcctggatcaggaacgtatcagccagcgttttctcgccggaccggttaacatttgtactctgatgccaatgcgttccatcccattcaaagtggtttgcctgctgggaatgaacgacggcgtttatccacgccagcttgcgccattgggctttgacctgatgagccagaaaccgaagcgtggcgaccgtagccgtcgcgatgatgaccgctatctgttcctggaagcgttaatttccgcgcagcaaaaactctatatcagctatatcgggcgttccattcaggataacagtgaacgtttcccgtcggtactggtgcaggaactgatcgactacatcgggcaaagccattatctaccgggagatgaagcgctcaactgtgatgaaagcgaggcaagggtaaaagcgcatcttacttgcctccatacccgaatgccgtttgatccacaaaactaccagccaggcgaacgacaaagctatgcgcgcgagtggctacctgcggccagccaggctggtaaagcacattctgaattnnnnnnnnnngccgtttaccttgccggaaaccgtgccgctggagacgctacaacgattctgggcgcatccggtgcgggcgtttttccagatgcgtttgcaggtgaacttccgtaccgaagacagcgaaattcccgacaccgaaccttttattcttga

SEQ ID NO: 31135 - DNA, 807 bp, Escherichia coli
gtgaacttccgtaccgaagacagcgaaattcccgacaccgaaccttttattcttgaagggcttagtcgttatcaaatcaaccagcagttattaaatgcactggttgagcaggatgatgccgaacgcttgttccgccgattccgggcggcaggtgatttgccgtatggtgcctttggtgaaattttctgggaaacgcagtgtcaggagatgcagcaacttgccgacagagtcattgcctgtcgccagccagggcagagtatggagattgatctcgcctgcaacggtgtgcagataactggctggttgccgcaggtgcagccggatggcctgttgcgctggcgtccctctttattaagtgtggcgcagggaatgcaactttggctggaacaccttgtctactgtgccagcggtggtaatggtgaaagtcgcctttttctacgcaaagacggcgagtggcgttttccgccgcttgcagccgaacaggctttgcattacctctcacaactgattgaggggtatcgtgaaggaatgtccgcgccattgctggtgttacctgaaagtggcggcgcgtggctaaaaacctgttatgacgcgcaaaacgatgccatgctggatgacgattccacgttgcaaaaagcccgtacgaaattccttcaggcttacgaaggcaacatgatggtgcgtggcgaaggtgatgatatctggtatcaacggctctggcggcaattaacaccagagacaatggaggctatcgttgaacagtcgcaacgtttcctgttaccgctgtttcgctttaatcagtcatga

SEQ ID NO: 31136 - DNA, 450 bp, Escherichia coli
atgatttcaactgacgataattttaatcataagttcagaacgatatcgaggtatcgcgattttgtaaactccccatcagtactgaatataattgcaactattattgcctataacgaatgtgagggatggttaaagtcattaaaggtacatattgcctctaacattcaattcacccagcagtatctgaatgaaaatattccagaattgatcgtaaggccagctgatggttgctatttttcctggatagattgttctgctattggttatccttttgatgaattttacagtcgattaattcatgaaggcaaagtgggcattatggcggggcatgtctatggaacggagggggagggctaccttcgtctgaacctggcctgcggtcgagaaaaattatatatggggcttacgcgtcttgcgagtgtaattaaaaatattaatcaaggaaaataa

SEQ ID NO: 31137 - DNA, 282 bp, Escherichia coli
atgacagaagccgaaatactgggattaatccgccgcgttgccggaatcagccagcaggttgacgaacaggccacgcagccggacagcgtgaccgctgaaaattatgcgcgtgttgttgcggaggtgatgcgccgtgatggtatagaacttaatggcgtggatatgcgcaacatacgaaccagagttcttgagttgctggcctaccgtcgccgcgtggagatgtatcgggagaaggagaaaataacgtaccactggaagaagccggagcggttgcggcggtaa

SEQ ID NO: 31138 - DNA, 279 bp, Escherichia coli
atgcacacatcaggaagatttaacaaatcactcaaaaaacgcaaagacagaacagcaccaagatataaagcgctggagatgacagagcacgccttaaaggtggctataaaggtgatagacatcacagcgggagaaggatactcgaaagcacatcccgaactaataagcgcattcatgaccacggcggcggcaaactttgccacgctgacagagcgggagattgcagaagcggaacaggtaacaaccatcaacgttaaaaccggagaggtggaatcatga

SEQ ID NO: 31139 - DNA, 777 bp, Escherichia coli
atgcgtaatagtttagcagttcgctttagcttgcagcaaggcgaagaattgtcacaagaatatcaggttatcaaatacgaagaagcgccggaacaggtgcaaattgctttcgacgatcagcactacggcaacgctattcgttacgacggtaaaaaatggtttctcaatccggtaacaaatgccattcacgtatatcaaatcatcacgccagcaatcagcgatgcaggtaatactccgactattgacgccgaaccagtgacggaaccactaccaccaccgccacaagtacaagaaagcgacgtaaaaccggacgccatcgatctgacagcagaagccagagagcgcaagcaaccgaagccggaacaaccgcaagcccaggataacaaacagtggcacggtaacacggcttacttaaacactttcgcctgtcatcttcatgaagtgctaccgcaggctatctataacacatggtgcaacaaacaaacggcggcacacttccatctgctttacgcgctttgctacctggcaagctacgaaaacaaagatgaaggtatcgagcttggcgaagtgttgtatggtgctgaaaagatcgcaactggcggcgtagtaccaggattcaaactttcaagaaaaacatttgatgcgaaaattaacgaccttgaagcctggggattgatcaaggtaacgcgcggcaagaaacgtaaggacgggcaaggcaacttaccgaaccgcatcaaactgaactttaagccgtggaagaaaggaggtgagcaatga

SEQ ID NO: 31140 - DNA, 228 bp, Escherichia coli
atgataccggagcttttcacgaagtcatcaggcgagcacctggagaaattgccgttcgatggtgtaggcaaggaaggaggcttgattctgctacgcaatgcaccggaagctatccagcaagcaatcagcggcggcatggatcgagtggaaatcagatataatgggtattgttggtatggatgcacaaggactggctgggtaagcaagaagaagatagtcagcaattaa

SEQ ID NO: 31141 - DNA, 870 bp, Escherichia coli
  misc_feature (842)..(851): n is a, c, g, or t
atgcaaccagtatctcttgatgtattagtctctgcatcccttccatgggcaaaggaggttattaagaataaaatattacctatcatagaaagtagtgttcgtaattatttaatagatgtacatgcagcacgcttcttgaataaaaatcttgaacgtttcctatcaaatgtgaaagggcaatgctcccttgtgaataccttagcttttcaaaatactccagtagagcttctagatatttatgagccaatgagcatttattacgataatgaaaaaaaaccatacacatgcctaataaaagacaatgcagatttattagataatttcaatcatatattaatcactgactcagcaggaatgggtaagtccaccctaatgaaaagaattgctttagattgcatcgctaataaggaatacattccaatatacattgaattacgacgtgctaaagattatgattttgcgctacaggtgaaacatcaacttggtttaggagaagacatttcagacaactgcctcaaaaaaatcccttttatttatcttttcgatggcatagatgaaatgccacaacaactcaaatccaagatcgtaaatttactaagtacctttgctaataatttctcagaaagcaaaataattataacttctcgtcatgataatttcttatcagaactacatggtttctcaagatttaaaatcaacccattagaaacgaatcaagcgtatgatctattacgtcgatatgatggacgtggccctatttcatctcaattaattaaaggattacgactggagaatggtcataatctaaatgaatttttatccacacctctttatgtttcatnnnnnnnnnntataaattcaaaccgataa

SEQ ID NO: 31142 - DNA, 1041 bp, Escherichia coli
ttgtatgagtctcatgatttaactaaagaacttggttatgttagagaaaaattttctaagctagactccactgacttccatcaggtcttaaggagattaggtttttggtgtttgaaagacggaggtaaaattgagtttacgaaagacgatctgcaaataacattgcaaaatatcatttcaaaaattcccggaatatcaacttcaccatctctttttattcaggacttaattgaaaccgttccattatttgtcaaagaaggcgctattattcgttggtcacacaaatcattaatggaatattttgcagctatgtttatctgtcgtgacacaaaagaacgccaaaaagaaatattaacaaagctatattacagccctgaatccattcgtcacagaaatttattttcactttgtgctgatattgattactcatctttcagatcaagtataataaaatgcttgcttttagacttaaaatcatcttacgaagaattaaaaaatgagaccgcgcaatttaattgcgatactataaaaaccaaggctgaaatatcattagccggcaattcaataatttacctttttgataaagataaagaaaatgagttgctaaatgattttttcaagggtgacttaagagcctttaatgaactaagtgaaaatggctcccacatcattaccaccatcacaggggttgccaaccattggcttgtgatagcacgggaaagcactatcaagtcggatatactaagtattttaaaatcaagaaaacctagttatttccataagacacatcgattcttcaatactgatccagagttggagtcaaatatcatgatggaagtaggaaaacaacccgaagttaaattcaatttaactttagactcacttaaagacataaataaagataaagaaataagactaatcgaatctttattgtcatttgaaaacactccccaaataaagtacgacagtgctttatttgagttagagcaaataaattgtgatgagagcaatggtatcaatcagctacttgatggattttaa

SEQ ID NO: 31143 - DNA, 1032 bp, Escherichia coli
  misc_feature (897)..(906): n is a, c, g, or t
atgagcaccttaggtcatcaatacgataactcactggtttccaacgcctttggttttttacgcctgccgatgaacttccagccatatgacagcgatgctgactgggtgattactggcgtgccgttcgatatggccacttctggtcgtgcgggtggtcgccacggtccggcagcgatccgtcaggtttcgacgaatctggcctgggaacacaatcgcttcccgtggaatttcgacatgcgtgagcgcctgaacgtcgtggactgcggcgatctggtatatgccttcggcgatgcccgtgagatgagcgagaagctgcaggcgcacgccgagaagctgctggctgccggtaagcgtatgctctccttcggtggtgaccactttgttacgctgccgctgctgcgtgctcatgcgaagcatttcggcaaaatggcgctggtacactttgacgcccacaccgacacctatgcgaacggttgtgaatttgaccacggcaccatgttctataccgcgccgaaagaaggtctgatcgacccgaatcattccgtgcagattggtattcgtaccgagtttgataaagacaacggttttaccgtgctggacgcctgccaggtgaacgatcgcagcgtggatgacgttatcgctcaggtgaaacagattgtaggtgatatgccggtttacctgacctttgatatcgactgcctggatcctgctttcgcgccgggaaccggtacgccagtaattggcggcctgacctccgatcgcgctattaaactggtacgcggcctgaaagatctcaacattgttgggatggacgtagtggaagtggctccggcatacgatcagtcggaaatcaccgctctggctgcggcgacgctggcgctggaaatgctgtatatnnnnnnnnnnactaaatatttcccggtgtgtatgtcatgccgggaaacattcatcagtgcgatatatgtttttatatttctacgcgactttttcttagctctgttcacctgcctggttgtttcagaccataagtaa

SEQ ID NO: 31144 - DNA, 243 bp, Escherichia coli
atgcagcggagattcacgatcgtcgagttggccttccagcactttcacttccacgctttttttactggcgctggtaatttcggcgtcaaagacctggttgctgccgtcaaacaattgcaacgcctgccccggccccatgcgcagtacgcgcccgatatggttggcggcatcttcgcaaagcgcgatgtgagaatggctggtcagtggttcaggatgataaatgcgggggatacgcatagttaa

SEQ ID NO: 31145 - DNA, 726 bp, Escherichia coli
atgtcaggtataatttcaagtgcaacagaattcttcaataatacactccattcaaatcaatacgaaattaaagatgcgagcaaagaaaaaataaaggatatatataataaatcggttgattatgcaacgatgagtaatcgcgctgcgattattgcaaaaatagatttgtttattcagagaatcacccataatttatggactgcaagtgataataatgtttccttaattaagcgaatagatgctctcaaaaattgggttgaggagtgtattgatcagtgcactaatgagcaattaggtgatcgtgactatatttctgcatttgtggatcgggcgatttttcattacgcgatgaattttgtttgtaatccaatggaaaatagcgatgtaactctaatagacaagtgtactttcgacgtaataaatcataatggccttccctccacgattcagctattttatgataaatcctattgtaaagcacctgtagcgtcattacatctaaaaacagtaagcgaaggctttttaaatttggaaaatgcatataatgtaaagaaagatactcgcttaagacccctggcctcccttttactttcattttcatatgatagtgcatcagcagatatcataggagcagcagagagagttaatgatgattgtgaaaactacataaaaagtcagataaaaatattatctcgtcaagtgatgaaaaaaaactggcggagctga

SEQ ID NO: 31146 - DNA, 204 bp, Escherichia coli
atgaccaatattaatacagcttgtgtaaaaaataatgccagttatcaattaaataacgcattacctaacaaagaaaccatctccagcaatttttgtgaacgactggcacaatggggtaataagtcgcttaataatggtgaagaaagagcaattgccgtggagcgaattaaagaaagcttacaattcgaacatggcatctcttga

SEQ ID NO: 31147 - DNA, 1611 bp, Escherichia coli
gtggtggcgtttaaggtggtcgataaacaattacgcatccagttgaaaaatggtaaagaaaccacgttacgtaccccggcgcagtttgtcggttaccgtggcgatgccgctgcgccgacctgcattttgctgaaaaataacggtctgcatattgaactgcaaattgatgccaacgggcggattggcaaagacgatccggcgcatatcaacgatgttatcgtcgaagcggccatcagtaccattctcgactgcgaagattcggtcgcggcggttgatgcggaagataaaatcctgctgtaccgcaacctgctgggcctgatgcaggggactctgcaagagaaaatggaaaaaaacggtcggcaaatcgtgcgtaaactgaatgacgatcgtcattacaccgccgccgatggctctgaaatttctctgcacggacgctcgctgctgtttatccgcaacgtgggtcatttgatgaccattcctgtgatttgggacagcgaaggcaatgaaatcccggaaggcattcttgatggcgtcatgactggcgcgattgccctctatgatttaaaagtgcagaaaaactcgcgcactggcagcgtctatattgtgaaaccgaaaatgcacggtccgcaggaagtggcgttcgccaacaaactgtttacccgcattgagacaatgctcggtatggcaccgaataccctgaaaatgggcattatggatgaagaacgtcggacctcgctgaacttgcgtagctgtatcgctcaggcgcgcaaccgcgtggcgttcatcaataccggtttcctcgaccgtaccggcgatgaaatgcattcggtgatggaagctggcccgatgctgcgtaaaaatcagatgaaatcgacgccttggatcaaagcctacgagcgtaataacgtgctttccggcctgttctgtgggctgcgcagtaaagcgcaaatcggtaaaggcatgtgggcaatgccggacctgatggcagacatgtacagccagaagggcgaccaactgcgtgccggggcaaacacagcctgggttccgtcaccaaccgctgctacgctccatgcgctgcactaccaccaaaccaacgtacagagcgtgcaggccaacattgcccagagcgagttcaatgctgaatttgaaccgttgctggacgatctgctgactattccggtggctgaaaacgctaactggtcggtggaagagatccaacaagagctggataacaacgtgcaggggattctggggtacgtggtgcgttgggtggagcaggggattggttgttcaaaagtgccggatattcacaacgtggcgctgatggaagaccgcgcaacgctgcgtatctccagccagcatatcgccaactggttacgtcacggtattctgaccaaagaacaggtgcaggcgtcgctggagaatatggcgaaagtggttgatcagcaaaacgctggcgatccggcttatcgtccgatggcggggaatttcgctaactcgtgtgcttttaaagctgccagcgatttaatcttcctcggcgtgaaacagccaaacggctataccgaaccgttattacacgcctggcgtttacgcgaaaaagaaagtcattaa

SEQ ID NO: 31148 - DNA, 1611 bp, Escherichia coli
ttgcagcaagcatctgcaattgtcgcttcgtggtttggttcgcaatcggggtggcgtggtcatcaatttccagttttttataatcagttaccggaaagcaatgctatagtctttgccactaacaatagacggccagactttttgcgtgatcatccgttggtgaatgcacctgttattaagatgattaaccatccacaaaatcctttcgtcaaattgttggtaatttggggccgcgatgacaaagatttattacaggcagcaaaaggtctcgctcagggaaatatactgtttcgcggcgatagtgtggttgtaaatgacgtgaaaccactgctgccacgcaaaccttatgatgcgccaaactgggttcgcactgatcgtcctgtaactttcgcagagcttaaaaactatgaaggacagttacaggcaagtgccctgcagatcgcagcaattaatgtttcattcaatttgccgcctgatctctttctgttacgtaatagtggggttgatatgaagattaactatcgctataccacgccaatggtaggcggttctcgtattgatgttaatcttaataatcagtacattgaatcttttcgcccaagcccgcgctcgactactgatcgactgctattacatttaccgttattgcaagaattgtcagatagcaataataaaattaccattccggcgctgacattgggggcacttaatcaattacgattcaattttgagtacgttaatacgataccgagtactgatgacgggagttgtattatttcccggcctctgaataaccatgcagttattgctgatgattctactatcgatttttcaaagtatcatcactttatcgccatgccagatttacgcgcctttgctagttcaggctttccttttagccgtatggccgatttatctgaaacagtcatcgttatgcctgaacatcctggtacaacgcaggttgaaatattgctaaatacccttggattgattggtgctcaaaccggatttccggcaattaatctgacagttactgatgatataagctccatccagaataaggatgcagacatcctgctgataggggcaattccgcaagaatttgcaggtcagcagcaaattaatctgctcattgatgcaaccgctagttgggtaaaaacgccaatgcggcactctgataacgcacaaattatgacagatgaaaacaaccaaaaaactgaaacacaaacaagcatgatctctccatcgccaatggccgcggtggttggtttccagtctccatatcatccccaacgtagcgtaattgcattaatgaccgagggggcacgtggtgacgagttacttaataatgcgctaattaatagtgcaaaacgtggcaatatatttggctcagttgcggttattcgtgaatcaggtgtcgatagtttacgggttggagatacctattatgtggggcatcttccctggattgagcgcgcgcaatatatgttagcgaaacatcctgttttgctggcaggaatggcaatgctgagtgtggtgcttctggcgtgggtcgtctggcgtctgctacgcatcattagccatcgtcgtctgaatcctcatcaacagtaa

SEQ ID NO: 31149 - DNA, 429 bp, Escherichia coli; identical to SEQ ID NO: 7597

SEQ ID NO: 31150 - DNA, 3693 bp, Escherichia coli
atgggaaaaggtggcggtaaggcacacacgcctcgtgaggcgaaggataatctcaaatccacgcagatgatgagtgtgattgatgcgattggtgagggaccgatagaaggtccggtgaagggactgcagagtattctggtgaacaaaaccccgctgacggacacggacggtaatcccgtgatacacggtgtgactgcggtctggcgtgccggggagcaggagcagacaccaccggaaggctttgagtcctccggagctgaaaccggactgggcgtggaagtgacgaaggcaaaaccggtgacgcgcaccattacgtccgcgaacattgaccgcctgcgggttaccttcggggtgcagtcactggtgcagaccacgtcaaagggcgaccgtaatccttcctctgtccggattctgattcagttacagcgtaatggccgctgggtgacggaaaaggatgtcaccattaacggcaagaccacctcgcagttcctggcctcggtgattctggataatctgccgccccggccctttaacatccggatggtccgggagacggcggacagcaccacggaccagttgcagaacagaacgctctggtcatcgtacactgaaatcatcgatgtgaaacagtgctacccgaacacggccattgtggggctgcaggtggatgcggagcagttcggcggccagcagatgacggtgaactaccatatccgcggtcgcatcattcaggtgccgtcaaactatgacccggaaaaacgcacgtacagtggtatctgggacggcagtctgaaaccggcatacagcaacaatccggcctggtgtctgtgggacatgctgactcacccgcgctacggcatgggaaaacgtctgggggcggcggatgtggacaagtgggcgctgtatgccatcgggcagtactgcgaccagacggtcccggatggtttcggggggaccgagccgcggatgacctttaatgcgtacctggcacaacagcgtaaggcgtgggacgttctcagtgatttctgctctgcgatgcgctgtatgccggtatggaacggtcagacgctgacgttcgttcaggaccgcccgtcggatgtggtgtggccgtacaccagcagcgatgtggtggtggatgataacggcgtgggattccgctacagcttcagtgccctgaaggaccggcacacggcggtggaggtgaattacaccgacccgcagaacggctggcagacctccacggaactggtggaagacccggaagccatactgcgctacggacgcaacctgctgaagatggacgcgttcggctgtaccagccgcggtcaggcccaccgtgccggactgtgggtgataaagaccgaactgctggaaacgcagacggtggatttcacgctcgggtctcaggggctgcggcacacacccggtgacatcattgaaatctgtgataacgactatgccgggaccctgaccggcggacgtgtcctgtccattgatgctgccacccgcaccctgacgctggaccgtgaagtgacacttccggagaccggtgccgccacggtgaacctgattaacggcagtggtaagccggtgagtgtggacatcaccgaacaccccgcgccggaccggatacaggtcagtaccctgcctgatggtgtggagacatacggggtgtggggactctccctgccgtcactgcgccgtcgcctgttccgctgtgtctccatccgggaaaacacggacggcacctttgccatcacggcggtgcagcacgtaccggaaaaagaagccatcgtggataacggggcccgctttgagccgcagtcaggctccctgaacagcgttatcccaccggcagtacagcacctgacggtggaggtgagcgcagctgacggccagtatctggcgcaggctaaatgggacacgccgcgggtggtgaagggcgtgcgcttcagtctgcgcctgaccagtggtaagggaacggatgccagactgctgaccaccgccatcactgccgatacggagcaccgtttcagtggcctgccactgggggaatacaccctgacggtcagggcgattaacagttatggccagcagggcgaaccggccaccaccaccttccggattaacgcgccagcaaaacccgccaccattgaactgacgccggggtattttcagataacggcggtcccgcgtcttgcggtgtatgacccgacggtacagtttgaattctggttctcagaaaaacgcatcacgaacacggcacaggtggaaaaatctgcccgttatctggggaccggcagtcagtggactgtccaggggagccggattaagccggggacggatttctggttttacgtgcgaagcgtcaacctggtgggaaaatctgcttttgtggaagccagcgggcagcccagcaatgatggtgaagggtatctggaaattttccgggggctgatagatgagacgcttctgggccaggcactgaaagagcgcattgatgcttcagcgctgcgtacggaggtcacgcaactggaagaagacatccgtcagcggatggacacggatatcgcagaagtgacccggaaaatcggggaggcggaaaacagcctcacgcagttggttgcgaaaaagaatgaggaccagacactggccatcgcgcaggtgagccagaaagtggaccgggtgagcagtgaaatctcacagactgtcagccaggggcagtcagaaaatgcccgacagatagcacaggtccgccagtacgtggataaaaaagggagtgaaattacctcgaccacggataaaaaactgggtgaccaggccgtgaccatacagcaaatccagcgggttcagtcagacacgcgcaatgagctgaatgccatgtatatgctgaaggtgcagaaaacaaaaaacggtattccctatgtggccgggattggtgcggggattgaggatgttgatggtcagacgctgagcagtattctgctgcaggcggaccgtatcgcgatgattaccccggagaatggcaacaccacgccgctgtttgtggcgcaggggaatcagctgttcatgaacgacgtgttcctgaagcgactgtttgcggtgagcatcacgtcatccggcaatcctccgacgttttccctgacgccggatggcaggctgacagcccgcaatgcggatatcagtggagccatcacggcgaataccggcacgctcaataatgtcaccattaacgagaactgtgtcatcagagggaaactgtctgcaaaccagattgaaggcgatctcgttaaaacagtgggtaaggctttcccccgtgactcccgtgcaccgaagcgttggccatcaggaaccattaccgtcagggtttatgacgatcagccgtttaaccggcagattgttattccggcggtggctttcagcggtgccagacatgagcgggagaacagcgatacttattcgtcatgccgcctgatagtgaagaaaaacggtgctgaaatttataaccgtaccgcgatggataatacgctggtttacagtggtgttattgatatgcctgctggtcgcggccacatgacgctggagttttctgtatcagcatggtgggtaaatggctggtatcccacagcaagtatcagcgatttgctggttgttgtgatgaagaaagccactgcaggcatcacgattagctga

SEQ ID NO: 31151 - DNA, 582 bp, Escherichia coli
gtgaacacggcagcggaagccattcgcgccctgtcgatgcagatgccgggctttcgccgtcagatgaacgaaggctggtaccagatacgtattgccggtgatgacacggcaccggaggcggtgtatgcccgtcttcacgaacagctgggtgagggaacggtcatccacattgtgccgcgactggccggggccggaaagggtggactgcagattgtgctgggggcggcagccatcgtgggctctttcttcacggccggaggctcgatggcgttatggggtacagccctgagtgccggtggtttttctgccaccacgatgctgttttcactgggtgccagcatgatactgggcggagtggcccagatgctggccccgaaggcaaaaacaccggattaccgcgcaacggataacggcagacagaacacgtacttttcctcgctggataacatgattgcccaggggaacccgatgccggtgccttacggggaaatgctggttggctcccgccgtatatcccaggacatcagcacccgtgatgaaggcgggggcggaaaggtcgtggttatcgggcggcaggggtaa

SEQ ID NO: 31152 - DNA, 744 bp, Escherichia coli; identical to SEQ ID NO: 9276

SEQ ID NO: 31153 - DNA, 699 bp, Escherichia coli
atgcaggatattcgcgaagaaagtctgaacgagtcggttaagtcagagcagtcaccgcgggtggtactctgggaaatcgacctgacggtacagggtggtgagcggtattttttctgtaatgagctgaatgaaaaaggggagccggtcacctggcaggggcgtaagtatgaggcatacccgattgacggcagcggctttgagatgaacggccggggcagcagtgccagaccgtcgctgacggtgtccaatctgttcggtctggtcaccgggatggcggaagacctgcagagtctggtgggggccacggtggtccgccgccgggtgtatgcccgttttctggatgcggtgaatttcgttgcgggcaatccggaggcggacccggagcaggagctgagtgaccgctgggtggtggagcagatgtcgcagctgacagccatgacggcctcgtttgtgctggccacaccgaccgagacggacggggcgctgtttcccggtcgcatcatgctggcgaacacctgtatgtgggattaccggggagatgaatgcgggtataacggtcctgcggtggcggatgagttcgacaaccccaccacggatatccgtaaggacagatgcagcaagtgcatgcgcgggtgtgagatgcgcggcatggtggctaattttggcggtttcctttccattaacaaactttcgcagtaa

SEQ ID NO: 31154 - DNA, 2574 bp, Escherichia coli
atgtcccagccggttggtgatcttgttattgaccttagtctggatgctgtccgtttcgatgagcagatgagccgggtaaggcgtcatttttcaggtctggataccgacgccagaaaaaccgccagtgctgttgaacagggcctgagccgccaggcgctggctgcacaaaaagccgggatttccgtcgggcagtataaagcggccatgcgaaccctgcccgcacagtttacggatatcgccacgcagcttgccggtggtcagaatccctggctcatcctgctgcaacagggcggtcaggtgaaggactccttcggcgggatgatccccatgttcagggggcttgccggtgcgatcaccctgccgatggtcggggtcacctcgctggcggtggcgacaggtgcgctggtgtacgcctggtaccagggagattccacgctttcagcgtttaataaaactctggttctttccggtaatcagtccggactgactgccgatcgtatgctgactctctcaagagccgggcaggcagcagggctgacgtttaaccaggcgagagagtcactggcagccctggtgaatgccggtgtgcgtggtggtgaacagtttgatgccatcaaccagagtgtcgcgcgttttgcgtctgcatccggtgtggaggtggataaagtcgctgaagccttcgggaagctgaccactgacccgacgtcgggactgatggcgatggcgcgccagttccgtaacgtgacggcagagcagattgcgtatgttgcacagctgcagcgttccggagacgaggccggggcattgcaggcggcgaacgatatcgccacgaaaggctttgatgagcagacccgtcgcctgaaagaaaacatgggaacactggagacctgggcggataaaacagggaaggcattcaaatcgatgtgggatgccattctggatatcggtcgtccggaatcctcagcggatatgctcgccagtgcgcagaaggcatttgatgaggcggataaaaaatggcagtggtaccagagccggagccagcgccggggaaagacctcctcttttcgtgcgaaccttcagggggcatgggatgaccgggaaaatgcccgtctgggtctggcagcggccacgctgcagtcggatatggaaaaagccggtgaactggcggcaagggaccgggctgagcgtgaggcgtcacagctgaagtataccggagaggcgcagaaggcgtatgagcgcctgcagacgccgctggataaatataccgcccgtcagaaagagctgaataaggccctgaaagacggaaaaatcctgcaggcggattacaacacgctgatggcgtcggcaaaaaaggattatgaatcgacgctgaaaaagccgtcaggtgtgaaggtgtctgccggtgagcgccaggaagaccgggcgcatgcagccatgctggcgcttgaaaccgagctcaggacgctggaaaaacacagcggtgtgaatgagaaaatcagccagcagcgccgggatttatgggaagcggaaaatcagtatgtggtcctgaaagaggccgccacgaaacggcagttatctgagcaggaaaaatccctgctggcccatgagaaagaaacgctggagtacaaacgccagctggctgagctgggcgacaagatagaacaccagaagcggctgaatgagctggcacagcaggcggcgcggtttgaacagcagcagagcgcgaagcaggcggcaatcagcgcaaaagcccgcggcctcactgaccgtcaggcgcagcgggagtcggaagagcagcgccttcgtgaggtgtacggtgataatccggctgcgctggcgaaggccacatcggcactgaagaacacctggtctgcggaggagcagcttcgtggaagctggatggccgggatgaagtccggctggggcgagtgggcggaaagtgcgacggacagtttttcgcaggttaaaaacgcggccacgcagacctttgacggtattgcacagaatatggcggcgatgctgaccggcagtgagcagaactggcgtggtttcacccgttccgtgctctccatgctgacagagatttttctgaagcaggcaatggtggggattgtcggaagtatcggcagcgccattggcggggctgttggtggtggcgcatccgcgtcaggcggtacagccattcaggctgcggcggcgaacttccattttgcgaccggaggatttacgggaaccggcggcaaatatgagccagcggggattgttcaccgtggtgaatttgtcttcacgaaggaggcaaccagccggattggtgtcggcaacctgtatcgtctgatgcgcgggtatgcggaaggtggttatgtcggcggtgccggaagtccggcgcagatgcggcgggcggaaggtatccggtttgagcagaacaacagcgtggtgattcagaacgacggtatcaacggacaggccgggccgcagctgatgaaagcggtgtatgagatggcccgtaaaggtgcgcaggatgagattcaggcgcagatgcgtgatggcggcgtattttccggaggcaggcgatga

SEQ ID NO: 31155 - DNA, 414 bp, Escherichia coli; identical to SEQ ID NO: 5302

SEQ ID NO: 31156 - DNA, 432 bp, Escherichia coli
atgttcctgaaaacagaacaatttgaatataacggtgtatccgtcacgctttctgagctgtctgcgctgcagcgtattgagcatcttgccctcctgaaacggcgggcagaagaggctgaagccagcggcaacctgcaggtgagtgtggaagatcttgtcagaaccggcgcgtttctggtggcgatgtccctgtggcataaccatccacagaaaacgcagtcaccgtcaatgaatgaggccgtgatgaagatagagcaggaagtgctcaccacctggcctgcagatgccattgcccgggcggaagacgtggtgttgtgcctgtccgggatgatcgaagctgttcgtccggatactgatattactgaagtggcgaaaaataacacgctgactgatgatgatttttctgcgggaaagtcttcgacggcgagctga

SEQ ID NO: 31157 - DNA, 747 bp, Escherichia coli
atggcaacaccaaatccccttgagccggtaaaaggtgccggtaccactctgtgggtttacaacggcaaggctgatgcttacgcaaacccgttgtcagacgatggctggcagcgactggctaaggtgaaggatctgacgccgggcgagatgacggctgaaccctacgatgataactacctggatgatgaagacgcggactggaccgcgaccgggcagggacagaaatctgcaggtgataccagttttacgctggcctggaaaccgggagaggaaggccagaaagggcttataggctggtttgaaagcggcgatgtccgggcctataaaatccgttttccgaatggcacggtggatgtgtttcgtggctgggtcagcagtatcggtaaggccgtgacggcgaaagaagtgatcacccgcacggtgaaagtcactaacgtgggtaaaccttctgtagcggaagaacgcagcaaaattacgccggtcactgcgattaaggtaacgccgacaggtacggttgaaaaagggaaaacaaccaccctgaccgttactgtggaaccggaaaatgcaacggataagacattcagggcgatttccgccgatccatcaaaagccaccattagcgtgaaagatatgacgattactgtgacgggggttaaggatggaaaagtcagcatccctgtgatttccggtaatggtcagtttgctgcggtggctgaaattaccgttaataatgtgccgggtggctaa

SEQ ID NO: 31158 - DNA, 396 bp, Escherichia coli; identical to SEQ ID NO: 5305

SEQ ID NO: 31159 - DNA, 576 bp, Escherichia coli; identical to SEQ ID NO: 20451

SEQ ID NO: 31160 - DNA, 354 bp, Escherichia coli
atgcgtgattttcagaatgcctttgatgctgccctcgccggggtggacagtacgatcgttgaagtgatggggaaccgtgcgcagttcacctccggagcacaacgtggcggcgaagttcagggggtttttgacgatccggagtcgctgggttttgccggtggcggggtccgtattgaaggaagcagcccgtcattatttgtgcggacggatacggtgcgtgccgtgcggcgtggtgacacgctgaccattaacggcgagatgttctgggtggatcgtgtttctccggatgacgggggaagctgttatctctggctcaaccgtgggcaaccacccgctgttaaccggcgacgataa

SEQ ID NO: 31161 - DNA, 384 bp, Escherichia coli
atggcaacaaaagaagaaaatctgaatcgtcttcgtcaactggctggcctgctggggcgcgaggcggatatgtcggggagtgctgcggatattgctcaacgtgtgtctgagtgggaagaggagcttgctgtttccccggagggcattatgcactctgatgagagcggggctgatcaaaatcacacagacgatggtgagcagttgaacaacacggatgctccggatgatgttaaagccgtccgggtacggaagtgcctgcaagtaatggggtattgcccggagacaggtcgtcccgttgagctggcgttacggggtatgcgtgttctggtgccatcatcactggcaacggccatgatacagcacggaacggctgagcatgcgtga

SEQ ID NO: 31162 - DNA, 447 bp, Escherichia coli
atgataacggtaaccgacttccgcaccggcataccaggagtgggagctgtagtctctggtgccaaggccggcgaaagttgcggtatactcgttgtcatggtgaacgaacttaccgatgaggtcgatatatgctccggactcaaacatggcagaggcatagagaccggcacccacagacttcgtttcaccactgaaggcatcactgcctgcatggctgtcggtataggtcatggtcaccccggtgaagaggtcaaggccatcgagttcatgtttgttatccgcaccgacctgaacgtgggtgtagttgtcactgaatccaccgccggcagacccggttccgctcatgattcgggcccatgcaccggactcaccgttaatgtcacgcagatcacccatacgtttgttaaggttgttgacctcagcaaggaaggctttatagccgcctga

SEQ ID NO: 31163 - DNA, 507 bp, Escherichia coli
atgccagatcgcattattcatgctaactgtagctttgggggctgttattgcgcctcgataggcggtatcaaagccatacaaaagagtctctgcccatgcctgataagcagacgatatagtcggtgtttcagtttcaggctgtcccagagtaatggttgctgcatcatcagcataaatatttccggtgacagatgccatatttctggcaatgaaatttgcatttccaccactcagcctgaatccatcagcagcgtagtggagacccggcgttacagttttactattctgttcagggattcccatcatagtcagttcaccggagatatcaataccttttgttgtgaacatggaattttgtgctataacttttgctcctttatctatacttataggagtattattcagaaaggttgcaccattaagtgtaactacagcttgatcacctatggctatttggctgttatgtgcagtgatgccacctgtaaatttagtttctcctatggatag

SEQ ID NO: 31164 - DNA, 543 bp, Escherichia coli
atgaaatcgcacctgatgaacaaaaaaaacatggctaaaagctgccgtgtaagtgcgacagcgttcgacaagtggggagtaactcccgttgagcgtaaaggccgtgaggcgttttatgatgttgccagcgtgatagacaatagggttaacaatgcaattagccagcttacaaacgacaaaggcgatattgacgatgatgaactattacgagtcaggatcagattactgacagcgcaggcggaggcgcaggagcttaaaaacgagcgcgaacgaggcgacgttattgatacagggttttgcctgtacgcgctttcaaagctggcgagccagatttcttcaatcatggacagcatcccgcttactatgcaaaggagctttccacacattaccccagccatgctggatgggcttaaaagggaagtggttaaagcctgtaatgccagtgccagagttgccgacaacctcccacagatactggctgattacttgaaagaaacaaccggaaacgtaccggaaaagttgcagcagaataaagataagtaa

SEQ ID NO: 31165 - DNA, 624 bp, Escherichia coli
atgtctgaactgaacgatcttctgaccacccgtgagctacaacgctggcgattaattcttggcgaagcggcagaaacgacgctttgtgggctggatgacaacgcccggcagatagaccacgcgctggagtggctgtacgggcgcgatcctgaacggctccagcgtggtgaacgctccggtggattaggtggctcaaatctcaccacccctgagtggatcaacagtattcacacgctgtttccgcaacaggtgattgaacggctggaaagcgatgccgtactgcgctacggcattgaagatgtggtgacaaatctcgacgtgctggaacgtatgcagccttcggaaaagtacgccaggttgtggaagaaattatggcgcgactggcaaaggaagttcgtcaggctttttctggtgtccgcgatcgccgtcgccgctcatttattccactggcgcgaaactttgatttcaaaagtactctgcgcgccaacctgcaacactggcacccgcaacacggcaagttgtatatcgaatccccccgctttaacagccgcattaaacgccaaagcgaacaatggcaactggtcttactggttgatcaaagcggatcaatggtggactcggtga

SEQ ID NO: 31166 - DNA, 552 bp, Escherichia coli
atgtctcagccagcgaaagttttgctgctgtatgcccatccggaatctcaggactcggtggcaaaccgggttctgcttaaaccggccacgcagctcagcaatgttaccgtgcacgacctttatgcgcactatcccgacttttttattgatatccctcgtgagcaggcattactgcgcgagcacgaggtgattgtctttcagcatcctctttatacctatagctgcccggcgctactgaaagagtggctggaccgggtattaagccgtggttttgccagcggaccggggggaaaccaactggcgggaaagtactggcgtagcgtgattaccaccggcgagccggaaagtgcttaccgttatgacgccttgaatcgctaccccatgagcgatgttctgcgcccctttgaactagcggcgggcatgtgccggatgcattggttgagtcccatcattatttactgggcgagacggcaaagcgcacaggagctggcgagtcacgccagagcctacggtgactggctggcaaatccgctgtctccaggaggccgctga

SEQ ID NO: 31167 - DNA, 378 bp, Escherichia coli
gtgcgccggggcaatcagctccatacgctccagcatcttaatacggctctgggcctgcttcgctttggtggctttggcacggaaacggtcgatataactttgcagatgcgctacgcgttcctgctggctttcgtacatcgcttgttgctgcgccagacgggtggcgcgctgtacttcaaacgaactgtagttgccggtgtactcgaacatgctttgttgttcgatatgaataattttatcaacgatcggatcgaggaagtcgcggtcgtgagagatcaggatcagcgtgccctgatagctcttcagccatttttccagccagataacggcatcgagatcgaggtggttagtcggttcgtcgagcagcagcaagtctga

SEQ ID NO: 31168 - DNA, 459 bp, Escherichia coli
gtgttcggtcgcgttaataatgtcatcgcccgcaatgatgttgatggtgagaaccggaacggtgagatccaccgccagattatgcgtggtgctcgccgggttgcccgctttgtcattgaccgtggcggtcagggtgtggctgccatcggtcaatgcctcaagatctgccgccggaatattgatgctccagctgccgtccgcctgcaccgttgcctgataggtctgcacagttgggctgttaagcgttaccgtaacaatctgccccgcttcagcggtggtgctgccgctcaccgtcacgcccgtatcagcttcgctggcgttaacgatattgtcgctggcaacggtattgataatgatggttggcgcgctgctgtcgacgctgtagttatgcaccgccgaggcgctattgccgttaatattgctgacgctggcctgcgcggaggcgctgccctcagctaa

SEQ ID NO: 31169 - DNA, 471 bp, Escherichia coli
gtgaccgtttgtccggcttctacattcgtggtggtgccggaaagagttaaatctgcgcctttttctgcggcgttaatcacatcgtccgtggcgatagtgttgatggtgatagctgccggagtgagatccaccgttaccggatgtgtaatgctcaccgggtttccggtgctactttccccggatacagcaatattaaccgtccccgcaggccaggcgctaacctgcgccgctgtaacgcccacgctccagctaccatcggcctgcaccgcagtggtgtattccacattattaatcgtaacggtaagcggcgtgccttctgccagccccgagctgctgccggtgaccaccagcgcctgcccgtgttcgatgatattgaccacatcatcgcccgctaccgtatcgacccgcagaccgggcagattggcgtcgatggtgatatcccgcgtgccgctgccggtgttgccgttttga

SEQ ID NO: 31170 - DNA, 2304 bp, Escherichia coli
atggggatgagtgcgttcccctctttcatgacgcaggcgacgccagcaacgcaaccactgatcaatgctgagccagctgtagccgcccagacggaacaaaatccgcaggtggggcaagtgatgccgggcgtgcagggcgctgatgcccccatcgtggcgcagaacggtccttcgcgtgatgtgaagctgacctttgcgcaaattgcgccgccgccgggcagcatggtgctacgtggcattaacccgaacggcagcattgagtttggtatgcgcagtgatgaagtggtgacgaaggcgatgctcaacctcgaatacacgccatcgccatcgttactgcctgtccagtcgcagttaaaggtttatctcaatgatgaactgatgggcgtgctgccagtgaccaaagaacagttgggtaaaaaaacgctggcgcaaatgcccattaacccactgtttattaccgacttcaaccgtgtgcggctggagtttgtcggccattatcaggacgtgtgcgaaaacccggccagcaccacgctttggctggatgttgggcggagcagtggactggatttgacctatcagaccctgaatgtgaagaatgacctgtcacacttcccggtaccattctttgacccgcgtgataaccgcaccaacaccttgccgatggtctttgcgggtgcgccggatgttgagctgcaacaagcatctgccattgtcgcctcgtggtttggttcgcgttcaggctggcgtgggcagaacttcccggtgctctataaccaactgccggatcgcaatgccattgtctttgccaccaatgacaaacgcccggacttcctgcgcgatcatccggcggtaaaagccccggtgattgagatgattaaccatccgcagaatccttacgtcaaactgctggtggtgtttggccgtgacgacaaagacttgttgcaggcagcgaaaggtatcgctcagggtaacattctgttccgtggtgaaagcgtggtagtgaatgaagtgaaaccgctgctaccgcgtaagccgtacgatgcgccgaactgggtgcgtaccgatcgtccggtcacctttggtgaactgaaaacctatgaagaacagttacaatccagcggtcttgagccagcagcgattaacgtttcgctaaatctgccgccggatctctacctgatgcgcagtaccggcattgatatggatatcaactatcgctacaccatgccgccggtgaaagacagttcgcggatggatatcagcctgaataaccagttcctgcaatccttcaacctgagcagtaaacaggaggcgaaccgcctgctgctgcgtattccggtattacaaggtttgctggatggcaaaacggatgtctctattccggcgctgaaactgggcgcgaccaaccagctgcgcttcgactttgagtatatgaacccgatgccgggcggttcggtggataactgtattaccttccagccggtgcagaatcatgtggtgattggtgacgactccaccatcgacttctcgaagtattaccacttcatcccgatgccggatctacgcgcctttgctaacgcgggcttcccgttcagccggatggcggatctgtcgcaaaccatcaccgtgatgccgaaagcgcctaacgaagcacagatggaaaccttgctgaataccgttggctttatcggtgcgcagacgggcttcccggcgattaacctgacggtgaccgatgatggcagcaccattcagggcaaagatgccgacatcatgatcgtcggtggtatcccggacaaactgaaagacgacaagcagatcgacctgttggtgcaggcgaccgaaagctgggtgaaaacgccgatgcgccagaccccgttccccggcattgtaccggacgagagcgatcgcgcggcagaaactcagtcaacgctgacctcttccggtgcgatggcagcggtgattggcttccagtcgccgtataacgaccagcgtagcgtgattgcgctgctggcagatagcccacgcggttatgaaatgcttaacgatgcggtgaacgatagcggcaaacgcgccaccatgttcggttcggtcgcggtgatccgcgagtccggtatcaatagcctacgcgttggcgacgtctattacgttggccatctgccgtggttcgaacgcttatggtatgccctggcaaaccatccgattctgctggcggtgctggcggcaatcagcgtcgtgctgctggcatgggtactgtggcgtttgctgcgtattatcagccgtcgtcgtcttaacccggataacgagtaa

SEQ ID NO: 31171 - DNA, 822 bp, Escherichia coli
atgctcaagggtgacgttaagatcctgctggcgatagaggtccgccgcatcgctgcgcacgccgcgtttcagccagtcatctttctcgtcgttacgggtcagtcgggtaaaggtgtcgttatcctgcgggcgcgtcgtagtcacaccggatgcgaccatggcgtctttgtaggtttccagcgcctgctttggatcgcccgcctgtgcttcaaacttcgcaccgtcgcgcagcaccatcgcgctttccatcgacggtggctgagattttgcctgcgggatcaacttattaaacgtctgctgcgccgctgcggtatcgccaagctgcgcctgtgccagcgccacgcgccgctgagtgttcagcgaggcgttattggtggcaggcagcttcgccagctggctacgtgccgccgctttgtcaccggcagcaatatccacttccgtcagaccaagaatggcatcggcgttagttggctcccgcgtcaggacattctgatatgcagcgcgagcggcggtgtaatcacgtcgttgttgcgcccagtcagccagcgtgaggtctatgcgcgtggaaggtggttgctggcgcagcatcgcttccgcttcagcttctttgccgctttctcgcaggcgattagcggtttccaacacctgatcgctttgcagtcgattaaccagctcctgaatattgctgttccattgcgcgcgcggcaggctgttgatatgcgccagcaccgctctgtcctggtcatgaccagagagatacagcccgtaagcgtaaacctgctccgggtcgttcggcttctgctgtgccagattgcgcattaa

SEQ ID NO: 31172 - DNA, 741 bp, Escherichia coli
atgcctgtaccaaatcctgtaatgccggtgaaaggtgccgggaccacactgtgggtttataaggggaacggtgacccttatgcgaacccgctttcagacgttgactggtcgcgtctggcaaaagttaaagacctgacgcccggcgaactgaccgctgagtcctatgacgacagctatctcgatgatgaggatgcggactggactgcgaccgggcaggggcagaaatcagccggagataccagcttcacgctggcgtggatgcccggagagcaggggcagcaggcgctgctggcgtggtttaatgaaggtgatacccgtgcctataaaatccgcttcccgaacggcacggtcgatgtgttccgtggctgggtcagcagcatcggtaaggcggtgacggcaaaggaagtgatcacccgtacggtgaaggtcaccaatgtgggacgcccgtcgatggcagaagaacacagcacggtgacggcggcaaccggtatgaccgtgacgccagccagcgcttccgtagtgaaagggaagagcaccacgctgaccgtggccttccagccggaaggcgcaaccgacaagagcttccgtgcggtgtcagcggataaaacaaaagctaccgtgtcggtcagtggtatgaccatcaccgtgaacggcgttgctgcaggtaaggtcaacattccggtcgtatccggtaatggtgagtttgctgcggttgcagaaatcaccgtcaccgccagttaa

SEQ ID NO: 31173 - DNA, 141 bp, Escherichia coli
atgatgttgtttgcgaaatatttatccctgttcgtccggtttagttattcgctatatctaaatgaatttataacgagactactgtcaggcaattcaataaataatggcgttgaagatgtcaacgccattattgtttattag

SEQ ID NO: 31174 - DNA, 1167 bp, Escherichia coli
atgaaaaaacttactgatagccaagtgaaagcggcaaccgcaccggacaggccgatcaagctattcgatggtgacggcctgtacctttacgtcgcggtatccggtcgtaaaacctggcgactgaaatataagacacgcgcgggcaaatgggatgaaattgctataggcaagtacccgatcatttcactggcagacgccaggcagatcaaaaacagcttactggctgatatagcgaaaggcatcgacattaaagcgcaaccagcgcccacagagacgctacaggacgccattacggcgtacattgataagaactgccccaactggtcagctggatacattcgcaacgtcagatctgcattcaggcacgttcctgtcgcgcttttacgccgaccagttaccagcattaccgccgccgaactggtggaagtggtggaaaatgtcctcagtagcaaaacaggccaaccagcaccagcaacaggtaacaaactggcgatccggttacgggaagttttccggtacgcggagacgcgagggatagtgtcagctatcgttgccgaacgtttaccccgcgcagcaaaagagccaccagcgacacacagacgcgctacagacgacgtaaaagcactggcaaaggatttacttaccgatctggatacgatcgccagaaaggccgctatagtcctgttattaaccgcctgccggacaagggaaatcacccgcgccacttggtcggagatcgatttcaccgccagcacgcttaccataccggcctcccggacgaagatgaagcgtgagcatgttgtttacctgtcagcgccagttatcgccatccttcgcacattgtatacacccggatcgctgccggacagttatattttccagtcgccacgtaatccggcaaaaccaatcgggccaatggcaatcctgcaaacgctggaccggatcggctggcttgaaaaaacctgtgcgcacggattcagagccgcattcagcacagcagcacacgcacaacggcgctttactcaccaagcgatcgaaatgtgtttaggacaccataggaaatcagtgtcagcagcatacaaccgatatgactattgggatgagcgcatagaaatcatgtgctggtgggcgacctatttatgtgatggcgtaactgtggcggtataa

SEQ ID NO: 31175 - DNA, 201 bp, Escherichia coli
atgaagaacatcaaccccaaatttattaatttggcccagcttattgagctgaccaatattagccgcagcaccatttatcggctattacacacagacccgttgtttccgcgcccgtttaaattaagaggcggtaatcgtctttactggaatatcgacgaagtaaacgactacctatccagccaggtaaaagcctatgcgtaa

SEQ ID NO: 31176 - DNA, 357 bp, Escherichia coli
atgcgccgcaggtggatttatgaccctgaatcaggtttattattcagccgtgaaacgaaagacgtgataaaaggcggcatgactcgcaagggccatttaaacgtaagcattcaggaaggtgattttaaagcgacgcttagttatcaaaaagcctgctatgtatacacatacggcgcttatgatgagacgttatatgaagttcaccacgtgaatatgaacaaacaagacaaccgcatcaagaatattcgcctgatgccaaaggaacagcaccgccggatccataaaaacgtccgcaaactcattcggctgggccacactcaatggctgcaaccacaagtaatagaggcatcactatga

SEQ ID NO: 31177 - DNA, 312 bp, Escherichia coli
atgtactacccaaataacacttaccttaacctggttggcaataactataaaccatcctccgaagtaatggaaaaaaaagcattcgataaagcaatgagcgccgaggcagctcgcatcgttgatacgctgccatccgtattggctaaggttatcgacgaaagcgcggcggaattatttgagcagatgccggaatgtatgcgaggtgaagatccagtaactcacgacatcatcacagaagaacaggttcgccggaggcttgccgggaaaatttcaaatcgcctgggtcacggtataagttttcttcagaaataa

SEQ ID NO: 31178 - DNA, 339 bp, Escherichia coli
atgagttttcttgatatggcacgccagcgtattgctatggcggttaaagcaaacgaatcagcaccggaaccggacactgccgaacttaacttcaaaaaagggatggtgcttgtattaaagaacatcgataaggtcgatgagaagttattacaggaaatgatggttgtgctgatggataatctggaacgccgcttcggtggcaaacagccagcagaacaacagccagtcactaatacacggcacggaccggaaacaccagatatcaatacctactttactgagccagcgaataaacctggtaacagtaaagcaccgaatattaatagctatttctattaa

SEQ ID NO: 31179 - DNA, 282 bp, Escherichia coli
atggtaatagctacctgtgtggtttcgctggatagcaaggggatttattcgcaagtaaaatgcctgataaaatacacgaatctagtaatcatcaatatttactctggtcgaatgacgcgtgaagtggacggccaacagacgcagtcagtgatctacagcctgttgaataaaaccccggatgcttcccccgattctgcaagtaatacttcggttatttgcactattttatccctgttgaatttggttaagccggtgcagacgcgccgggaaacgcacacctga

SEQ ID NO: 31180 - DNA, 342 bp, Escherichia coli
  misc_feature (312)..(321): n is a, c, g, or t
atggtctataccgtcgtgctcattgtgatcggtggaactttatttacccataaggttggtaaacgtattcgtccgcttaatgtggaaaaacaacgtagcgaagcgacatttcgaactaatcttgtgcagcataataagcaggcagaactgattgcgctaagcaatgctgagtctctacaacgccaggagttgagcgaaaattttcataccattaaagagaactggcatcgtttaatgaatcgtcagcggtggcttgattactggcagaatatttattcgcgctcgcttagcgttcttccctactttctgttnnnnnnnnnngttattgcggcagtttattag

SEQ ID NO: 31181 - DNA, 537 bp, Escherichia coli
ttgcccgttgagcgtaacggttatctgcgtgcccgcaggctggtcgctggtgccggaaatcgccagatccgcgcctttctccgtggcgttgatgatgtcgtcgacggcgatggtgttaatggcgagcaccggcgcgccgagcgccacggtgacagtgtgcgaggccgtgccgctgttgcctgcggagtcggtgaccgtggcggtaatggtcacatcgccctgcgccagcgcggaaatcacgctggcaggcacgccgatgctccagttgccgttggcgtccagcacggtggtgtaagtggtcgtgccaatcgtcacggaaaccgtgttacccgtcgtcgcgcccgttgccgagccgctgataatctgcgcctgtccgtgttctgtggcgttaatgatgtcatcgcccgctaccgtgttgatggtaacgaccggcgcaacgagatccaccgtcaggttatgcatcgccgaggccggatttccggctttgtcgctgaccgaggcgctcaccgtataggggctggcagtgaggttagctaa

SEQ ID NO: 31182 - DNA, 714 bp, Escherichia coli
atgcgttgcctgggcgctgttgccagcgacattgctgacgctggcttgtacgtttgctgcgccgtctggcaaggttgcgagatcggctgctgggatcgtcagcccccagctattatccgcggcaaccgtggtggtgtagcttttgccgccgaagataacggtgatggtttgccccgcttccacatcggaggtggtaccggagagctgcaaatcgctgcctttttcggcggcgttaatgacatcgtcagtggaaagggggttgatggtgatcgccacggccgcgagatcgaccgtgaccggatgagtaatgctggttgtggttccggcagtgttagtgccagagacggcaatattgaccgtccccgcaggccagtttgtgacatctgccgccggaacaccgacgctccaggtgccatcggcgagtaccgttgcgccgtaggtgacgctattaataaccaccgtcaacgccgcccccgccgccagtccgctactgctaccggtgaccaccaacgcctgagtgtgctcgatgctgttaatcacatcatcgcctgccacggtatcgacccgcaggcctggcaggttggcatctatcacgatatcgtgcgttgcggtgccggtattatttgcggaattggttaccgaggcgctgatggtcagttctccgttgcccagcgcctgcaaaacgttcgcaggcacgctgacgctccagcttaa

SEQ ID NO: 31183 - DNA, 837 bp, Escherichia coli
ttgattgccgccgagcgtgaccgtgaccgtatctccggctgccgccgtccctgtaacctgtccgctaatggtctggttaacaccaatttcagcggcgttgataatgtcatcgcccgcaacggtattaatgatcaccccaggcaggagcgattcgacattcaccgtatgggtggtgctgccgctgttgcccgcgctgtcggtggcgctggcgctaatctggtacaccgcctcgcccagggcaccgaccgccgaagcaggcacggtaacgctccagttgccggaactatcggtggtggcgctgtacgccaggccgttcaacatcacggtgaccgtggtgccggtcgccagaccgctggagccgccactgatgatcagatcctgggttttctccgtactgttaataatgtcatcgtcggagacggtattgatggtcagcgtcgggccgctgagatcaacggtcacatcgtgagtcgtgctgtcgctgttgcccgcgcgatcgctcaggctggcggtgatggtctggctaccggtcgccagcgccgtgacatccgccgccggaatgcccacagtccagttaccggaggcgtccagcgtggtggtgtagtttttaccgttcaggttaaccgtgaccacatcgcccgccgccgcgcccgtactggtgccgcggaccaccagcgcctgaccatgttcgatggcgttgataatgtcatcacctgcgacggtattaatggtgagatccggcgcggtgacatccaccgccagcgcgtggtcggcgcttgccgggttacccgctttgtcgctcaccgtggcggtcacggtgtaactgctggcggttaa

SEQ ID NO: 31184 - DNA, 450 bp, Escherichia coli
atggctggcggaattgctgttgcctgcgctgtcggtgacgttcgccgtcaccgtgtagctggcttcgcccagcgcacctactgcggaagcaggcactatggtgctccagttgcctgcggcgtccgtcgtcgcagtgtaattttgcccgttcagcgtcagcgtaattgtggtgcctgctggctgattactggtgccggaaatttgcagatccgcgcctttttcggtggcgttaatcacgtcatcggtggcgatggtgttaatgccaatggtcggcgcggtcagattcactgtaaccgtgcggctggcatcatcgctattgcctgccgcgtcggtaatgctggcagtgatggtttgcgggccgctacccagcgccgtgacatccgccgccggaacgccgacgctccagttgccggaggcatccagcgtcgtggtgtaggttttattgtttag

SEQ ID NO: 31185 - DNA, 690 bp, Escherichia coli
gtgtataacagccagacgggaaaatacgataaacatcgcgcacgttcttttttagccgccagttggcatgatgataccagtcgctattctctgggggcatcggtacagaaagatgtttccaatcagttacaaagtattctcgagaaaagcataccgctcgacccgaattatacgttgaaaggggagttgctcggcttttacgcgcaacttgaaggtttaagtcgtaataccagccagcccaatgaaacggcgttagttagtggacaattgacctggaatgcgccgtggggaagcgtatttggcagtggtggttatttgcgccatgcaatgaatggtgccgtggtggataccgacattggctatcccttttcattaagtcttgatcgtaaccgtgaaggaatgcagtcctggcaattgggcgtcaactatcgtttaactccgcaatttacgctgacatttgcaccgattgtgacccgcggctatgaatccagtaaacgagatgtgcggattgaaggcgcgggtatcttagggggtatgaactatcgggtcagcgaagggccgttacaagggatgaatttctttcttgctgccgataaagggcgggaaaagcgcgatggcagtgcgctgggcgatcgcctgaattactgggatgtgaaaatgagtattcagtatgactttatgctgaagtaa

SEQ ID NO: 31186 - DNA, 606 bp, Escherichia coli
  misc_feature (580)..(589): n is a, c, g, or t
atgaataaaatttattcactgaaatatagtcatattacaggtggattagttgctgtttctgaactgacccggaaagttagtgtcggtacatcaagaaagaaagttatcctcggtattattttatcctcaatatatggaagttatggcgaaacagcatttgcagcaatgctggatataaataatatatggacccgcgattatcttgaccttgctcaaaacagaggagagttcagaccgggtgcaacaaatgttcaattaatgatgaaagatggaaagatatttcattttccagaactacctgtacctgatttttctgctgtttccaacaaaggtgcaacaacatcaattggaggtgcgtacagtgttactgcgactcataacggtacacagcatcatgcaataacaacacagtcatgggatcagacagcatataaagcaagtaacagagtatcatctggcgacttttcggttcatcgtctgaataaattcgtcgtggaaacaacaggggttacggagagtgccgacttctcactttctcccgaagatgcgatgaaaagatatggcgtaaactacaacggtnnnnnnnnnncggtaaggaacaaataa

SEQ ID NO: 31187 - DNA, 1188 bp, Escherichia coli
  misc_feature (1123)..(1132): n is a, c, g, or t
ttgttaagcgcaagtctttttaatctggactggaaaaacaagagttacatttataccaacagaaccccttttaaaaactcaccaatttttggcgatagtggttctggttcttatctatatgataaagaacaacaaaaatgggttttccatggtgttaccagtacagttggttttatcagtagtaccaatatagcctggacaaactactcgttatttaataatattctggtaaacaatttaaaaaagaatttcacaaacactatgcagctggatggtaaaaaacaagagttatcatcgattataaaagataaggacctgtctgtctcaggaggaggggaattaacgctcaagcaggataccgatcttggcattggcgggcttatattcgataagaaccagacatataaagtgtacggaaaagataagtcttataaaggtgccgggatagatattgataataataccaccgttgaatggaatgttaagggcgttgccggagataatctgcataaaataggcagtggtactctggatgtaaaaatagcacagggaaataaccttaaaataggtaatgggactgtcatccttagtgctgaaaaagccttcaataaaatttacatggccggaggtaaaggtacggtaaaaataaatgccaaagacgctttaagcgaaagcggtaatggcgaaatctattttaccagaaatggcggaacactggatctaaacggctatgaccagtcatttcagaaaatcgcagcaacagatgcgggaacaaccgtaacgaactcaaacgtgaagcaatcaacattatcacttactaatactgatgcatatatgtaccatgggaatgtatcaggtaatataagcataaatcatattatcaatactacccagcaacataacaataatgccaatctgatctttgatggctcagtcgatatcaaaaacgatatctctgtccggaatgcacagttaacattacaaggacatgcgacagaacatgccatatttaaagaaggcaataacaactgtccaattccttttttatgtcaaaaagactattctgctgccataaaggaccaggaaagcactgtaaataaacgttacaatacggaatataagnnnnnnnnnnagcctctttttcccagcccgactgggaaagtcgtaaatttaatttccggaaattaa

SEQ ID NO: 31188 - DNA, 330 bp, Escherichia coli
atgatagcggtagcctgcttcagcacccacatacaaggaatgagaactgtagtcttttgttccgagtccagcaaaggtcgccgagtactcattatcatggtgaacatacttactaatcaggtcgatataggcaccagagtcaaatatagcggaagcatacagacctgccccgacggacttcgtcttgccactgaatgcattactgctggcatgactgtcggtatacgtcatagtcagaccagtgaaaaggtcaagtccatccagctcatgttttttatccacaccaatctgcacatgggtgtagttgtcactgtatccaccagaagctga

SEQ ID NO: 31189 - DNA, 687 bp, Escherichia coli
atgtctcttgaaatttttaaaatggaaagaaaatatttaaaatttattactgcaataatttgcttagggtttttatggttataccaggcaaatgctgcatcagctttagataccataatccataagtctccctccgggatagtattacccgctatagagaagtctaacgtctctgtttatgcgaaagattcctcttatcattttaaacttccatttacacaaatatcaccagcgcctggtaacatcgttttgaatggtgtcaacccactggggtatattgaatttggtatgcgcagtgatgagatagtttcagatgcaaaactaaagcttgaatatactccgtcaccgtcattgatccccgttcagtcgcagcttaaagtttatcttaatgatgagttgatgggagtattaccgattaccaaagaacaactgggaaaaaaaacgttggcggaaataacgcttaacccattgtatttctcggattttaatcgtttgcgttttgaattaattggccattatcagaatagctgtgaaatctcaaccagcaataacttgtggcttgatattggacgtaacagtgaacttggtctggtcgtccagaaactcaatctgcaaaatgatctttcatattttcctgtgccattctttgatccgcgagataaccgggtaatgactccaacttattga

SEQ ID NO: 31190 - DNA, 1944 bp, Escherichia coli
atgattaccctgatcttaatgggtattggtatacttatatccacaaggtatctatggtggcgttactcttcttcagttattcttgatgagtttcctgacagcttcttttcattgacgctgttagctgctgaaacgtatgcatggtttgttttattacttggttattttcaggtctgtttcccattgaacagggaaagcatacctttaccagataataaagaagaatggcctgatgtcgatatattcatacctacatataatgaaccctttactgtcgtgaagaatacagtttatggagcgctggctttagactggccaaaagataaattacatgtctggcttcttgatgatggtgccagagacgaattcaggaaatttgctgatgagtcaggtatttgctatgttgcaagagaaacgcatgaacatgcgaaagctggaaatataaacaatgcgcttaaaatagctaacggcgaatttgttgctattttcgattgtgatcatattccttccgtttcttttttaaaaaaaacgatgggctggtttattgccgataaaaaactatcgatgctgcaaacaccacatcattttttctctcccgatccttttgagcgaaacttggggcaatttcggcagaaaccaaatgaaggacatcttttttatggtttaatccagaatggcaccgatacatggaatgcttcatttttttgtggttcatgcgcggttatccgtaggtctgcattagatgaggttggaggcattgcagttgaaacggtaacggaagatgcgcatacatcgctacgcttgcatcgtgcagggtacagctccgcatatcttcgctatcctctggccgctggacttgctaccgaaacattgtctgctcatatcggacaacgaatacggtgggccaggggcatgatccaaatcttacgtattgataatccattattgggcaaagggctgacgttatcacagcgtctttgctatctcagtagcatgatgcattttttatcaggggttccacggctgatttttttattcgcgccactatgtcctattttcttttcagttaatttgatagatgcgtcggttgcagatattatgtcttatgttctaccttatctatttgtgattatttttactaactcaagagttcagggtgaatacagacattcattttggaatgaaatttatgaaatggttctggcctggtatattacactaccaacgcttgttgccttacttgcgccagctaaagggcgatttaacgttactgccaagggcgggttaataaaaaataaatttgttgactggcgaatctcatatccttatcttatttttgctattttaaatttaattggactaataataggtgttattaatatttatagattgcaaggtcatcttgttatattaaatttattttgtttgatttggttgatttataatacaattattattggcgcaaccctggcagtctctattgaacaaaagcaggtccgcttttctcctcggatagatgtttcttttaaaggtgtgataaaactagcagatggacggtgctatccctgttctgttattgatttctccgaaggtggcctgggggttattgttgatcacatctccgatgtaaaagaaatcgaaaaaactcagcatttgtctctttatctgagtgataataaaggggaatgtgatattcctgtaaaagttgttcatgcttacaaaaataaaattggtctgaagattttgccaatgacttatgaacagaatattaattatgtcagagtaacattttcacgtgattcattatggcaagagtggaatgataaaattaagcaagataatatactaaagagcttttttgacgtatgtatcatctctcttaaagggtattacaatatgattttttatattctgcggacactaaaaaatagtcgtgagaattag

SEQ ID NO: 31191 - DNA, 915 bp, Escherichia coli; identical to SEQ ID NO: 6605

SEQ ID NO: 31192 - DNA, 1041 bp, Escherichia coli
atgggggcgtccaactatacctacgttgaagcgtgcgaaggtcaggacatgatgtcatggttaaatgcccacagccgttgcctgaccttcctaggcggcgtaccgaagctgctcatccccgataacctcagaagcgcagtgaaaaaggccgatcgatatgagcctgtcatcaacgacagttatcaggcactggctgagcactatggcacggttatcatcccggcccgaccacgcaaacctaaagataaaccaaaagcagaaaacggcgtcctcatcgtcgaacgatggcttcttgcccgcatccgtaatgaaaccttccacacgctcagggcgctgaatgcgcgccttagggagttactgacagacatgaataaccggccaatgaaggggtacggcaatcaaacccgtgcagaacgcttccgcatactggatgcgccagcactctctccgctgcctctggcaccttatgaatacacggaatacaaagctgtgaaggttggccctgactaccacgttgaatatgcccgtcactggtactccgttccacacgaactggtcggtcagcgtctgtcactgaaggcggggcagtcggtggtacagctctggcacaaggggcagtgtgtggcgcaacatccgcgcagcacacatgaatataaacacacaaccaatccgcttcacatgccagagcgccaccggcagcacgggacatggacaccggaacgcctgatcgagcagggaaaacgtacgggcccgtccacaggccgggtggttgaatccatgctgaaggcaaaaccccatccggaactggcttatcgtgcagttctggggctgctggcacttcagaaaaaatacggcccggaacggctggaaaaggcctgttacattgccctgcactataacgcccctgacagacgctttatcgacaatctgctgcgtcaccatcgggagaacctggagcttccattatcccgccagggcgaacaacatccggcatatgcttcagagcatgaaaacctgcgtggtccgggctactaccactga

SEQ ID NO: 31193 - DNA, 525 bp, Escherichia coli
atgtccagaaagagaaaatccaggagcactatggaaacctgttttaagatccttcagctcaagttcgacaagaagctgactaaccgttgtatcggactgacgttacacatcagcgcctcaaccgtttttgaggttcttgcccgcttcaaagcctcttctctgtcatggccattacctgctgatatatcccatgacacgctggagaaactcatttttccgcccaaagacacctttgcatcagagcttgtaatgcctgacatgttgtacttcgatacggaaatgagaaaaccaggtgtgacgcggcaactgttgtggatggaatacaaggcacaggcgggtgacaaagcgatgggatactcgcacttctgccgttgctaccgggagtggaaaaaacgcgacgtctctccatgcgccaggagcatcgtgccggtgaaaagctttttatcgacttctgtggtcctacggtttctgttattaatccggacaccggtgagatacgccgcgtggcaatcttcgtggccgtaa

SEQ ID NO: 31194 - DNA, 282 bp, Escherichia coli
atgttacagatagtcggcgcgctgatcctgctgatcgcaggatttgccattcttcgccttttgttcagagcattaatcagcacggcgtctgcgctggcagggctcatattgctgtgtctgttcggcccggccttactggctggctatatcaccgaacgcataacccggttgttccatattcgctggctggcaggcgtatttctgacgattgccggaatgatcatcagcttcatgtggggacttgatggtaaacatatcgcgctggtgcaaaatggcatctga

SEQ ID NO: 31195 - DNA, 2592 bp, Escherichia coli
atgcatcaatctggttctgtttctctttgtcgttccgcaatatctgttctggtggctacagcgttatattcacccatagcattggcatcaacagttgagtatggtgagacagttgatggtgttgtcctggaaaaagatatccagctggtttatgggaccgccaataatacgaaaatcaatcctggcggagaacagcatattaaagaatttggtataagtagtaatactgaaattaacggcgggtatcagtacattgaaatgaatggcaccgcagaatactcagtattaaatgatggttatcaaattgttcaaatgggtggcgcggcaaaccagactaccctcaataatggtgtgctacaggtttatggcgcggcgaatgaacctacgattaaaggcgggcgcttaatcgttgaaaaagatggggggaccgtctttgccgctatcgaaaagggaggactactggaggttaaagaggggggatttgcgcttgcggtagatcagaaagcaggcggtgcgattaaaacaaccacgcgggccatggaggtattcggaacaaaccgtctcggtcagttcgatatcaagaatggtattgctaataatatgttgttggaaaacggcggaagtttgcgagttgaagaaaatgacttcgcttataataccactgtggataatggcggcttactggaggttatggatggcgggactgcaactggcgttgataaaaaagcaggcggaaaattaattgtctcaacgaatgcgctggaagtgagtggtacaaacagtaaaggccaatttagtataaaggatggtgtgtcaaaaaattatgaactggatgatggttccgggctcattgttatggaggacacgcaggccattgacactatccttgatgagcatgccactatgcaatcgctgggaaaggatactggtacgagagtgcaggcaaatgcggtgtatgatctcggtcgatcagatcagaatggaagtatcacgtattcctctaaagccatctctgaaaatatggttatcaacaatggccgcgctaatgtctgggctggcacaatggttaacgtttcagtcagagggaatgatggcattcttgaggtcatgaagccgcaaataaattatgcacccgctatgttggtgggtagtgtcgtggtttctgagggcgcttctttaagaacgcatggtgccgtggataccagcaaagcggatgtttcgctcgatggtagctcatggaccatcattgccgatatcactacgacgaaccaaaacaccctcctcaacttagccaaccttgcgatgtctgacgcaaatgtgattatgatggctgagccagtgactcgttcatcagtgacggcaagtgcggaaaatttcattacgttgaccaccaataccctgtcgggaaacggcaatttttatatgcgtaccgatatggctaatcatcagagcgatcagctcaacgtcaccggtcaggcaacaggtgatttcaaaatattcgtgacggacaccggtgccagcccggctgcaggagatagccttacactggtaacgacgggcggcggtgatgctgcattcacgttgggcaatgccggaggcgttgttgatatcggtacgtatgaatataccttgctggataatggcaaccatagctggagtctggcagaaaatcgcgcgcaaattaccccttcaaccactgatgtgctgaatatggcggcagcacaaccgctggtatttgatgcagagttggacaccgtacgtgaacgtcttggtagcgtaaaaggcgttaattacgatacggcgatgtggagttcggcaattaacacccgcaacaacgtgaccactgatgcgggagctggctttgagcaaacattgacggggctgacgctcggtatcgatagccgtttctcccgtgaagaaagcagtacaattcgcggcttgttctttggttactctcattctgatattggttttgatcgcggcggcaaaggcaatgtcgatagctataccctgggggcttatgccggttgggagcatcagaacggtgcctatgttgatggggtggtgaaagttgaccgttttgccaacaccatccatggcaagatgagtaatggggcaacagcgtttggcgattacaatagtaacggcgcgggtgctcatgtcgagagcgggttccgttgggttgacggattgtggagtgttagaccttatctggcctttaccggctttaccacagatggtcaggactacacgttatcaaacggcatgcgcgcggatgtgggaaatacccgcatattacgggctgaagcgggaacggcggtaagctatcacatggacctgcaaaacggtacgacgctggaaccctggctgaaagccgccgtacgtcaggaatacgccgattctaaccaggtgaaagttaatgacgatggcaaatttaataatgatgtggctggaacccgtggcgtttatcaggctgggataaggtcatcgtttaccccgacgttaagcggtcatttgtcagtcagttatggcaatggcgcaggggtagaatcgccgtggaatactcaggcgggtgtggtctggacgttctga

SEQ ID NO: 31196 - DNA, 507 bp, Escherichia coli
atggtggcccggggatttacaggcagtgaaaccatcgtcagggatgcggttgccaaatggcgtaaaggctggaacccaccggttactactgccgtcagacttccttcagtctcccgggtaagccgctggttgatgccctggagaataaccagggatgaagaaaattatgcttcccgatttattagtctgatgtgtgaaaaagaacctgagctgaaaatagcgcagcaactggcactcgagttctaccgtattctgaaaacccaaaataaatcacagctaagcagttggttcactcgagtccacgaaagcggttcagcagaatttcggcgcgtggcggcggggatggaagctgatgctgcagctatatgtgaggcaatcagtagtcgctggagtaatggtgttgtcgaaggtcatgtaaatcgcctgaagaagatgctgaaacgccagatgtatggtcgagcaggatttgaactactcaggcagagggtaatgagtccactggcatga

SEQ ID NO: 31197 - DNA, 408 bp, Escherichia coli
atggtgtcagcgaaaaacgaaaccgctgttgaaatccctggaaagctggttgcggaaaagatgaagaccctgtcgcgacactcagagttggcgaaggcgttcgcgtacgcacttaaccagtggccggcactgacgtactatgcgaacgatggctgggtggaaatcgacaacaacatcgctgaaaatgccttacggggagtggccgtaggccggaaaaactggctcttcgcgggttccgacagcggtggcgaacatgcggtggtgttgtactcgctgatcggcacatgccgtctgaacaatgtagagccagaaaaatggctgcgttacgttattgagcatctccaggactggccggcaaaccgggtacgcgatctgttgccctggaaagttgatctgacctctcagtaa

SEQ ID NO: 31198 - DNA, 1605 bp, Escherichia coli
atgaatagaatctatcgcgtgatatggaattgcaccctacaggtatttcaggcctgctcggaattaactcgcagggtaggtaaaacatcgacggttaatttgcgtaaatcctctggattgacaacgaaattcagtagattgacgctgggtgttttgctggcactaagcggttcagcgtctggtgcgagtctggaagttgataatggtcagattaccaatattaatactgatgttgcttacgatgcctacctggttgggtggtatggcactggagtgcttaatattttggctggcggtaatgcctccttaaccactattactaccagcgtcattggtggtaatgaggactcggagggcaccgttaatgttttgggtggcacctggcgattgtatgatagcggaaataatgcaaggcctttaaatgtgggtcaatccggaacggggacgctgaatattaaacagaagggtcacgttgacggaggatatttaaggataggttcttcgacaggaggcgtcgggacggttaatgttgagggagaggactcggttctgacgaccgaattattcgaaatagggagttacggtacgggctcattaaatattacggataagggttacgtcacgagttcaatagtcgccactgtaggatatcaagcgaacagtaatggtaaggttgtcgttgaaaagggcggtgagtggctaataaaaaataacgattcctcaattgaatttcaaattggtaatcaaggaactggggaagcgactattcgcgagggtgggctaattacggctgaaaatacgattatcggaggcaatgccaccggtatcggaaccctgaatgtgcaggatcaagactctgtcatcacggtacgcagactctataatggatatttcggtaatggcaaagtcaatatttccaataatggactgattaataacaaagaatattcattggtgggcgttcaggacggttcccacggtgtcgtcaacgtgaccgataaagggcattggaatttcctcggaacgggcgaagctttccgctatatctatatcggtgatgctggcgacggtgaacttaatgtctctagtgaaggcaaagtagattcgggaattatcactgcggggatgaaagaaacaggcacaggcaacattactgttaaggataagaactccgttatcactaatctcggaactaatcttggttatgacggccacggcgaaatgaatatcagtaatgaggggcttgttgtcagcaacggaggaagttcactcggttatggagaaaccggcgtcgggaaggttagcatcaccacgggggggatatgggaggtcaataagaatgtctataccaccattggtgtagcgggcgtcggaaacctcaatatcagcgatggcggtaagttcgtatcgcaaaatattacttttttgggcgataaagcaagcggtatcggcacactgaacctgatggatgcgacatcatcgttcgatactgtaggtatcaatgtcggtaattttggtagcggcatcgtaaatgtcagtaatggtgccacccttaattcaacgggctatggatttatcggaggaaatgcctccggtaaggggtaa

SEQ ID NO: 31199 - DNA, 1554 bp, Escherichia coli
gtgaaattaaaccagcgagaaacgattgaggaaatcgcccaaggatataatcaacctgatattttagcagcgctggcaacattatttgatagcgatccgcttgaggatcatcccgcaaaaatcgccccactgcccggcttttatcagttcaccttatggcgcagaccacggcttaaaagtaacaacctgcctctgccagatgacgctatgcgccacctcggcactatgttgagcttttcacgcgacattaccgcctacgctgggctggagatcatcaaagacaccttcacccgcgattccctggctgactttggctgggatctgtataccgcctggacagaagctggcgctcccgcaaaagaaaactgggcatttacctcgctgggaattttaggcgatgacgacaccgcgcgtaaattaaccccgcttatccgcgcctggccgggtgaatcccagcataaacgcgcggtttacgggctggatgtgttagccagtatcggtagcgacattgcgctaatgttgcttaatggcattgcgcaaaaaattaaattcgccgcattgcaggaacatgcgagcgacaaaatcaatatggtcgccaaaaatcgcggactgacaatggctgaactggaagaccgtctggctccagatttggggcttgatatcaacggctcgctgacacttgatttcggcccacgtcaattcaccgttggttttgacgaaaccttaaaacccatggttcgtgacgcaaacggcaaagtcctgaaagacttacccaaaccaaaccagagcgatgataaaacactggcaactgacgccgttaacctcttcaaacagttgaaaaaagatgtacgcgccatagccagccagcagattgatcgtctggaacaggctatgtgccagcgcagacgctggacaacagagcagttccgcctgttcatggtggagcacccactggtacgtcacttaacccgacgactgttatggggggtatatactgaggaaaacacgctgattgcctgcttccgggtcgcagaagacagcacttacagcgatatgcaggatgagctattcacgctaccagcaggaaacatcggtattccgcatatgctggaaatcccccctgaatctgccgctgcattcaggcaaatttacgctgattacgaactgcttccccccttccaacagctcgatcgtggtagttatcgtcttgctgataatgaacagaatactcatgaactgacacgctggagcggacgtctttgccaggcagggcgcattgtcgggctagtgcgccgaggctggcaacgcctggaagaaagcggcagcgtctatgcgatgcgcaaatctaccccttatggcgatctcgaacttgaaacagaacatttttcattaatttacggcgaaacaggttatggcgacctgttacctgttgaaagcgtaaaaatcacctcgccagatgatcgctacggtaaacaacctttacttactttttccatgctcgacgacatcaccgccagcgaactcattaacgacatcgaatcactttttgattaa

SEQ ID NO: 31200 - DNA, 711 bp, Escherichia coli
atgaaaacctatatttatcaggacgaaaaatcacataaattctgggcggtggagcagcagggaaacgaactgaatatcagttggggcaaagtcggcaccaacgggcaaagtcaggtaaaaagctttgcagatgctgcggcggcggaaaaagcggaactcaagctgattgcggagaaaacgaaaaaggggtatgtggaacaagcggagaatgctacatcgaaacatactcgaacggtaacgaaaactctcgaattatctgacttttctaccatcattcaggaacagccctcagttacaccagaaatctacgtggctgacaaaaatacagacgttattttaccgtggctggcaaaagatattgctgtcgtttttccgcttgaagtcgtacccaccaccttaagccatcgccgctttcccggagatcctgttacacctgtagataaattaacccagttacgtcgcttagcctgtggcgtgtcgcaacgggataacaaaacagctacatttgacttcagcgcctgtactttagagtggcaaaacttcatcgctcaggcgatcgatctgattaacagcccgaaaacgacaaaattaccatcaccggtaatggctgtactcgcggcacttgaactgcactgcacgagatataaagagcgtgaggatgttatggatcagattattcaggaaggcggtctggaatatgctactgggtaa

SEQ ID NO: 31201 - DNA, 2022 bp, Escherichia coli
atgtggtggggcgggttgttgtactggctggctgcattagtgacgctgctatgggcggccagccagatccaggcgctgaaaaaactgacctgtgccatcagccagacactggaagaacaaccggtgctcaacagtaaatcgtggctgaccagtttgcaaaacgattacagccttcctgactcactgacggagcgcatctggctgacactcatttcacaacggatttcccggggagaactgagggaatttgaactggcagacggaaactggctactgaacaatgcctggtatgaaagaaacatggcagggtttaacgaacagttgaaagagaacctgtcattcacacctgatgaactgaaaacgctcttccggaaccgcctgaatttatcaccggaagcgaatgacgattttctcgatcgttgcctggacggcggtgactggtatcccttttcagaaggccgccgttttgtatcattccatcacgtggatgagcttcgtatctgtgcctcctgcgggctgacagaagtacatcatgccccggaaaatcataagccggatccggaatggtactgctcctctctttgtcgcgaaacagaaacactgtgtcaggacatttatgaacgttcttacaccggttttatttccgatgcaacggcgaatggtctgattctcatgaaactgccggaaacctggagtacaaatgagaaaatgtttgcttccggagggcagggtcatgggtttgccgctgaacggggaaaccatattgtcgacagagtccgtctgaaaaacgcacggatcctcggtgataataatgccagaaatggagcagacagactggtcagcggaacagaaatccagacgaaatattgttcaactgcagcccgtagcgtcggtgcggcattcgacggacaaaacggacagtatcgttacatgggaaataatggccccatgcaactggaagtcccccgtgatcagtatgccggcgctgttgaaaccatgaggaataagatccgcgaaggtaaagtacccggtgtaaccgatcccgcagaagcgtcccggctgattcgtcggggacatctgacttatactcaggcccgtaatatcacccggttcgggaccatcgaatcggtcacttatgatattgccgagggttcggttgtcagtctggcggccggagggatcagttttgccctgacggcatcggtcttctggctcagcaccggcgatcgcgatgctgccctgcagacagctgctgtccaggcaggaaaaaccttcacccgcacactggctgtctacgtcacaacccagcaactccaccggctcagtgttgttcagggtatgctgaagcacattgatttttcgactgccagcccgactgtccgactggctcttcagaaggggaacggtgcaggaaatatcagtgccctgaacaaagtgatgaagggtacgctggtgacatctctggcactggtagctgtcacaaccggccctgacatgatcaaaatgttgcggggacggatctccggtgcgcagttcatcaggaatcttgccgtggcatcttccggtgtggcaggtggagctgtcgggtcagtggcgggcgggatactgttcagtccactgggaccatttggtgcactgacagggcgtgtggttggcggtgttctggggggaatgattgcctccgctgtatcaggaaaaattgccggagcgctggttgaagaagatcgcgtcaaaattctggcaatgattcaggagcaggtgacatggcttgccggcagtttcctgctgaccggacatgagattgaaaatctgaacgcgaatctggcccgtgttatcgatcagaatgctctggagatcattttcgccgccggtatacaacaacgggccgcgaccaatatgttaatcaaaccactggtggtcagtatcatcaggcaacgccccgtcatggaatatgatgcatcccatctcggcaatatggttaaccgactggaagaagcattacccccggagttaccggcataa

SEQ ID NO: 31202 - DNA, 423 bp, Escherichia coli
atggggaagaacgaacatgtgctcgttaatcaatcgaccggtgaggtgacggggactaatgttgttacttataaaaaagttgatagtgaagaattcgttaagttatttagccgtaatatagcattaacttttgatcttacttcctcaggtattaaatcgttaaatgttttaatttggagtgtgcaaaacacggcaattcaaaaagatgtcgttgcacttgatcaattagcttttgatgatttcatgaaggaaaatccaaatttaaaaatgacattgagaacgtttcaacgaggattatctgaacttgaagctagtaagataattgcaaaaacaatgagaaagggattttattatataaaccctaactttgtttttaatggtgatcgaatagcgtttacaactcttattgagagggattgttaa

SEQ ID NO: 31203 - DNA, 285 bp, Escherichia coli
atgactaagcatgatgctatacgtatttctcaacttcatcaaatcttttacgacgatgaaggattaattgattcggaaaagaacgtgaccattttatatggtataggatttactattgatgaaatagcttattttgggaatacaactccgggaacagttcaagggcagctatttaatgcaagagctaaattgagttgtgcttcagcttcatctttaaggccgatgatcttattgagattgcttttactcctaatctttgagcaagaccgcttaaatgggctgtga

SEQ ID NO: 31204 - DNA, 504 bp, Escherichia coli
atgaagcaaattaaattcagattgaccgacgaggaatacaacgttgctcatgttaatgctatttcaaatggcgttaatagtgtaaatgcttttgcaaagaggaaggttttagatgttagctcaacaccttcaaaggttatagtatcgaatgaaccatctgtaccagtaaaaacatgcttatacccacatgaactggagttaataaagcgtaatgctgcattacacggaatgagtgttagccgagaaatagcgatacgcttacgtaaatcagttttgaaaaacgaagtttgtctttatcccgaagaagtgcaggtgcttagaaagctttcaactacgattaatagagttggtcgaaatattcattttataattagcggcgatcgtttttgcacagttaacgatcctgatttcagaaatgagataaaggaacttacagcattatgcgaaacagtcgataaaacaatagagcaattagtttttagtgttaataatcgttttgggtaa

SEQ ID NO: 31205 - DNA, 258 bp, Escherichia coli
atgactcttttagaggaaatagttaacgctaaatcttttataaaagggttctctttgtaccttaccaccgacataaaaacctctcatgatttcgccactaacgacaaaataagcgcgttttttgtcgttgtcaatccgataagcgagcctctaagcgacattttttttttatttttgtcgtttatcgcgaaattaaattgtcgttatagacgtgccatcctgtcgtttggaacgcgtgatcgtgcaaatacgatctag

SEQ ID NO: 31206 - DNA, 168 bp, Escherichia coli
atggcaattttacaacaggacatgagtaatctatcaaaaacgcgtgaacaaatgctttcagtattgcaaagggtggataaaaccgtcgaacaagaggtaagccagatggtaagagtattacaacaccgaactgaagccttaaaatttgcttcccattctatcgtataa

SEQ ID NO: 31207 - DNA, 1152 bp, Escherichia coli
atggccacctatgaaattaaaaatgcgaccagcatacataatattaacaatctcgataaaacaatctttgatagagattatggtaaagaaaacaacataccaaatgataataaaattgtgcaatactataaccttaaagatattaagcatgacataagctctcagtttataatattaaaaaatacagacagagaagtctgtccggaactaagagtaaaacttttggataatcttaattactcaaggaatacgctagataatttgaggggtgaccttgaccaagctacaatttcattcagtcaatcaagcagttctgcagaacagagttctattaaaatatctaaatataatatccttgatatgctagataatttgaccatgcgacaacaggctgttatggaggaatttttaagggtattcacatcaatgtataaagcctctgctatgtctgaggctattatgagcaacgtttttgaacaacttgtccagtatcagaaaacagaaaccgtacacgccacaatggcaagttcggcaggtgttcttgccgggtcaacagttggcgcagctggagctgcagcatctgttgtagcaaatttcagaagccatcccgaaaagatgcaaacccttacacctgatcagaagcacactatcagtggaactgatgataaaacacagcgaggattaaaaagggaagttcaagatcaacaagcttatctcaagcaaatagatgaagaaataaaaacaacaacgaaagatacaacacttgatgaagaacaaaaagaagagaccctgaaatattacgataaagaaaaagaaactacggaagaaaaaattagagataaaaacgagcgtattagtataaaacataacaggaaatataataaatattttactataggtaaagcagatgtactttcacagcttgttaatcaatcaactcaagcatcacttagaattctagaaagtactactcatgcagaaaaagacattgttgaacaggctaaaaatgtcatgcattcagttatgagtagctatctggatcaaattaatcgtgatattcaaggaagagatcaggcactcaatttattacagcaaataatacaaaccattattgatactgatagtgctatcgttcaaggcattcgctcataa

SEQ ID NO: 31208 - DNA, 858 bp, Escherichia coli
atgatgaaaaaagggttttcagactcccaaattggacaacgtttagaagacctgggcgatgatttgatgcttacgtcaaaatattggcaacgttccgttaaagatgtacaagaaagtattaatcagcaaaaagcctctggaaaatggctaacagaaacacagcaagactctattgttaaattcagagaactaaacagacagctttcacagctttctgatgcaagacaagtagcattcgtagacggctttatgaaatctctcgatccaaaagtaacggaagagtttatgaaaaacctttctaatctcactccgtattttacgaagctgggagaagctacaggaagtctctttgaagctattatgaagattgtaaactggtttaatcgtaatgatgataagacagatgctattcagaaagatatgggtgatgcatcgccattaagcaatgaagggatgaaacagaatctttctaatctcgttcctaatcaatataaaggcgctggcactgcaacaactacacctgataatagtcattctctctttaacacaattaagggattgcttttcgatgataattcttctgtgtcagatgtaaaaatgtcagtcaatgaagcaccgataaccaatctcaaacagggtgctttaaataatcttgcaatgacaactccagcttataatttatctcctgtgtttaatctgaatcctacatttgaagtggtaacagaagtgccgctaactatcgaatcagacaccggacgattgagcgattatgtggattttacagcgagagcaagtcgggatagcttcttgaaatcattaacattaaccagcttatcaggacaatccaacggcgggtaa

SEQ ID NO: 31209 - DNA, 327 bp, Escherichia coli
atgaaatttctggaatgtgctgtccgggatgtgatttatgggaccaatgtccgtattgtcaaaccggtcaacatttatgaatgtgaactcagggacaacgtgtttgtcggccccttcgttgagatacagaaaggctgtgtcattggtagtggaagtcgaatacagtcgcatacgtttatttgtgagaacgtaacactgggagagaactgcttcattggtcataacgtgacgttcgccaacgatctgtttcgttcaggagcaccagatccgtcaccggataactggatcagcattatcctggggggattcggttactgttggcagtag

SEQ ID NO: 31210 - DNA, 297 bp, Escherichia coli; identical to SEQ ID NO: 8064

SEQ ID NO: 31211 - DNA, 549 bp, Escherichia coli
atggctatccctgcatttggtttaggtactttccgtctgaaagacgacgttgttatttcatctgtgaaaacggcgctagaacttggttatcgcgcaattgataccgcacaaatctatgataacgaagccgcagtaggtcaggcgattgcagaaagtggcgtgccgcgtcatgaactctacatcaccactaaaatctggattgaaaatctcaacaaagctaaattgatcccgagtctgaaagagagcctgcaaaaattgcgtaccgattatgttgatctgacgctaatccactggccgtcaccaaacgatgaagtctctgttgaagagtttatgcaggcgctgctggaagccaaaaaacatgggctgacgcgtgagatcggtatttccaacttcacgatcccattgatggaaaaagcgattgctgctgttggcgctgaaaacatcgctactaaccagattgaactctctccttatctgcaaaaccgtaaagtggtcgcttgggctaaacagcacggcatccatattacggtgatgctgccaacttactga

SEQ ID NO: 31212 - DNA, 414 bp, Escherichia coli
atggcaacgaatgaaagcatcatggcgctaccgctggcgagtaaatttaaagccgaagcgcgggcaatggctgacagaggtttatcaacctatgaggccgtatatcaactcaacaaactggaagaacaggacaagccgcgcgctgatgcgattatggcgcttcatgaacataacgactatcagccgctgttacgtgcaatggcaaacgtgccatgtattagcgtcgataatgctcgtgaaatcctgaacatgaccatagagcaggagcgcccaaaggttgcaccagagcttaccgcagcctttgaaaactttatggacatgcacagcccgcaagccgtatcagctggcatggcgtacgatggcagaaaccagggcgatgacggcgacatcgatcgcatactgaaaaccatctga

SEQ ID NO: 31213 - DNA, 495 bp, Escherichia coli
ttgttaattctcgatgagccgacagcctcattaactgagcaggaaacgtcggttttactggatattattcgcgatctacaacagcacggtatcgcctgtatttatatttcgcacaaactcaacgaagtcaaagcgatttccgatacgatttgcgttattcgcgacggtcagcacattggcacgcgtgatgctgctggaatgagtgaagacgatattatcaccatgatggtcgggcgggagttaaccgcgctttaccctaatgaaccacataccaccggagatgaaatattacgtattgaacatctgacggcatggcatccggttaatcgtcatattaaacgagttaatgatgtctcgttttccctgaaacgtggcgaaatactgggtattgccggactcgttggtgccggacgtaccgagaccattcagtgcctgtttggcgtgtggcccggacaatgggaaggaaaaattcttatgacctttgtcaaatattga

SEQ ID NO: 31214 - DNA, 633 bp, Escherichia coli
ttgtatgtccatccgctggaatggtatctgcgtgtagagtcaccgcgcgatgttatcgagctgcccatcgacgacgaattagatgtttccggttgggagtggcgtaaggcgctgggattattgaaaggcgcgaatccgacgctgatagaatggctggattctccggtggtctatcaacaagatgaagaaacgataacggcgcttaaggcaatggtcccaatgtggttttcttcgttgcgtgcacgctggcattactattcgatggcgcagaaaaacttccgcggctatttgcagggcgatgaagttcgactgaaaaaatacttttacgtgctgcgcccgctgctggccgtgcgctgggtcgaagcgggtaaaggcgtgccgccaatgcgctttgctgagttactggcaggaagcgagcttgatgcgccgttacgcgaagagattgacgaactgctggagcgtaaacagcgagcgggggaggcggaatatggtccgcgccgtcctttgttacatgcgtttattcgcgcggagctggcgcgtggggaaattccaccgattttaccggacagtcgagatggagatgttcgggagctagataatttgctgtatcaaacggtaatgcgccgggcataa

SEQ ID NO: 31215 - DNA, 270 bp, Escherichia coli
atgtcagaaatcacatccctggtcactgctgaggcagtgaaggaagtcctgcgctctgaagaagtcctgagcgcactgaaacagaaactccgccagaaccttgaggcgcgtcttgatgcagaagtggatgccattctggatgagctgctgggcgtaccagcggttccggagccggaaggcattgcggatgacagtgctgtttcagatggcgtcgggtctcagcctgacggtagtgaagagcctcagcctgacggcgaaatgatgatgtaa

SEQ ID NO: 31216 - DNA, 501 bp, Escherichia coli
atgacaccagataataaaaagtcagcggactttattattacaccaccgctatttgtgctgaatccggcaaacgagaacctgctacgcattatgtacattggcgcgccgttggcgaaagacagagaaactcttttcttcaccagcgtacgggcagtcccttcaacaacgaagcgggaagaaggcaataccctgaagattgccacacaaagcgtcatcaaacttttctggcgaccaaaaggtttagcgtatcccttagccgaggctccggcgaaactgcgttgcacttcgtcagctgacatggttacggtcagtaacccaacaccttatttcattaccctgacagacctgaaaataggtggaaaagtagttaaaaatcaaatgatttccccctttgataaataccaattctctctgccaatgggtgccaaaaacagcagcgtaacgtaccgaactatcaatgactacggggcggaaacgccgcaactcaactgtaaatcgtaa

SEQ ID NO: 31217 - DNA, 216 bp, Escherichia coli; identical to SEQ ID NO: 10053

SEQ ID NO: 31218 - DNA, 150 bp, Escherichia coli
atgccattacccgattttcatgtttctgaaccttttaccctcggtattgaactggaaatgcaggtggttaatccgccgggctatgacttaagccaggacacttcaatgctgattgacgcagttaaaaatctgtctcttatacacatctga

SEQ ID NO: 31219 - DNA, 144 bp, Escherichia coli
atggatgataagttgaggtattttcctgcgacactcaaattgaatccagaaacaatgtcattaaatgataaaggctcaccggttaacgccattttagtactgttcacaaacatcaatgttataattgcgatgcctgataaataa

SEQ ID NO: 31220 - DNA, 1431 bp, Escherichia coli; identical to SEQ ID NO: 28378

SEQ ID NO: 31221 - DNA, 570 bp, Escherichia coli; identical to SEQ ID NO: 8546

SEQ ID NO: 31222 - DNA, 279 bp, Escherichia coli; identical to SEQ ID NO: 4909

SEQ ID NO: 31223 - DNA, 396 bp, Escherichia coli
atgctgcagggcgtaatcccgcagacggtaataatgaaccgtcatggcataacactccgtacggcaggcgtgatgactgtacgtcatcagacaggcggcaatgccggcggcttccgggctcatttcagcgcggttaccgttcatggcattgaacagtacccatgtttcgtcatcatcgtcatccggttcaggggccataaatgccccaccgttgttcagggtgtacagattccagataccaccgcagtagttttcatacagacggtccatccagccgaagacacggggctccagggtgacccactgtggaatgaggccaaaatgctgcggccagaagctgatgcgctgttcatcagggacgggagtggcaaccaactgagactggttattccctga

SEQ ID NO: 31224 - DNA, 384 bp, Escherichia coli; identical to SEQ ID NO: 5770

SEQ ID NO: 31225 - DNA, 1032 bp, Escherichia coli
atgcttggctcaatgctgtttctgccatcgtccccgtgctggggaaagcaaatttcccgtactggcagtaaacctgtggtgttgtgggctctgggaggatatggcataagctttaccctgctagggctgggaagcgtgctgatggctaccagcgccataacaacagcggtgggactgggaatattaatcatcgcccggatcgcctacgggctgaccgtgtcggcaatggtgccagcctgtcaggtctgggcattgcagagagctggagaagggaatcgcatggccgctctggcaaccatcagctccggcctgagttgcggcaggctattcgggccgctgtgcgcggcagcaatgctggccattcatcctctggcgccactggggctgctgatggcagccccagtgctggcgctgctgatgctgctgcggttgcccggcacaccaccacagcccacaccggagtgcaagagcgtcagtctgaagcgggattgtctgccttatctgctttgcgcaatattactggctgcggcggtgagcatgatgcagcttggactttcgcctgcccttactcgccagttcgccacggataccaccgccattagccaacaggtggcctggctgttgggtctgtccgcagtagctgcgcttatcgcgcagttcggggtactccgtccgcagcgcctgactccggtggccctgctcctgagtgccggagtgttgatgagtggtggtctggctatcatgctctccgaacagctatggttgttttacccgggctgtgcagtgctgtcatttggagcagctctggcaacacccgcttatcaacttctactgaatgataagctggctgatggcgcaggcgcgggctggctcgctaccagtcacacacttggctatggactgtgcgctttgctggtgccgctggtatcgaaaacaggtgtcgcaatcgcgctgattatggcagcattatttgcaactatattatttaccattgtgtctgtatttatctggcattaccgtactatcaaataa

SEQ ID NO: 31226 - DNA, 981 bp, Escherichia coli
atgaacgcgataatatcacccgattattactatgttcttaccgttgctggtcaatctaatgccatggcgtatggcgaaggactaccattaccggacaaggaagatgcgcctcatcccagaattaaacaattagcgagatttgcgcatacgcatcccggaggcccgtcatgtcactttaacgacattattccactgactcactgcccacacgatgttcaggatatgctgggttatcaccatcctctggcaacgaatcatcaaacacagtacggcaccgttggccaggcactgcatatagcacggaaattactgccctttattcctgataatgcaggggttctcatcgttccgtgttgccgtggcggatcggcttttaccgcgggcagcgaagggacatattcagaacggcacggagccagccatgatgcttgtcgttggggaatggatactccgctgtaccaggatttagtcagcagaacgcgagtcgcactggcaaaaaatccgcagaacaaattcctcggcgtatgctggatgcaaggcgaatttgacttaatgaccagtgactacgcgtcacaccctcaacactttaatcatatggttgaagcctttcgtagggatctaaaacaataccattctcagcttgataatattactgacgcaccgtggttttgcggcgataccacctggtactggaaagaaaatttccctcatgcgtatgaagctatttatggcaattatcaaaataatgttttagccaatattattttcgtcgacttccagcaacaaggtgaaagaggactgacgaacgcgcctgatgaagacccggacgatttaagcacgggatattacggttcagcgtaccggtcaccggagaactggacgacggcactgcgaagcagtcatttcagcgcggcagcccgtcgagggattatttctgacaggtttgtagaagcaattttgcagttttggcgcgaaaggtga

SEQ ID NO: 31227 - DNA, 603 bp, Escherichia coli
atgtcatcaatatcacatggcgcaccacaaaagcgtcgaattatccctaatcccggcctgtggttggcgatcattgccggaattattattactcttctgcctctgggcgataccttgcccgtcgccggacaaaatatgatcgccattctggtgtttgccattattgtctggatcagcgaagcgatggattacaccgccagtgcaattgttatttccgcactgattatctttatggttggttttgccccggatatgaatcacccggacacgatccttggcaccgcgaaagcgctgaaaatgactctgtcgggtttttctaattctgctctggcgctggtggcagcagcaatgtttatcgcggcggcaatgaccattaccgggctggataaacgcattgcgctgtttactatgtcgaaaataggtgccagcagccgcagcattattatcggtgccattgtggtgaccatcgtcctgagcctggtcgtacccagtgccactgcccgtacggcttgcgtggtgccgattatgatgggggtcattgcggcatttaaggtggataaacattcacgtttagcggcgtcaatgatgattgttatcgcctag

SEQ ID NO: 31228 - DNA, 627 bp, Escherichia coli
atggcggaactgaacctaagtaacctgacggaagcagacatcattaccaaatgcgttatgccagccattctcaatgcaggctgggacaacacaacgcaaatcagacaggaggtcaaactccgggacggtaaagtcatcgtacgtggtaaagttgcggcacgcagaacggtaaaatctgctgacatcgtgctgtatcacaaaccaggcattcccttagccgtgattgaagcaaaagccaacaaacatgaaattggcaaagggatgcaacagggcattgaatatgcgcgcctgctggacgttccttttgtttttgccaccaacggggatggctttatcttccgcgatgccaccgcagccgaaggtgaatgccttgaaaagcaaataacgctggatgacttcccctcccccgctgaactctggcaaaaattctgcctctggaaaggatacacacaagctcagcttccggtgattactcaggactattacgacgatggcagcggtaaatcgccacgttattaccagcttcaggcaatcaacaaaaccattgaagccgtctccaacgggcaaaaccgcgttctgctggtcatggcgaccggaacagggaaaacctacaccgcatccagatga

SEQ ID NO: 31229 - DNA, 279 bp, Escherichia coli
atgacagataccaaagtgaacttcagagaaaccatcttcaaggactcaagtgatgctgtaaatgagtatgctgatggatttgcttactcgtcttttggggatgtcggagcaagatttggttcaatagcattttttaagcatgtttcagactgggttaataatgaggagattcagccagttagataccaaattgccaacattcgcatgagtgaaaatcaactccttgaactggctaagtatatagtttctcaacacgaagaatcaaaaaaattaagctga

SEQ ID NO: 31230 - DNA, 378 bp, Escherichia coli
atgggcagcccatcaagagaagagattgacgcgaagcttggtcaaaacaaagcagaaattgagttaatatctgctaacatgcgcgctgaaatttcagctttcagagaattccaatctaagcaatttacagctatgaatcagtcacttaatgaaattaagggacagatattcgctagcaatggcgaagttgcagggctcaaaggtcaaattgatggcattaaaacatccatgaccgcgacccaatggctcgttggtgcggttctcgctatgcttgcggtaatcataacgcttccgcagattcaatcttacttcaaggtttctgagccgactgcgaaggaagccgctagtgaaacccatgataccaaaataaagcagtga

SEQ ID NO: 31231 - DNA, 228 bp, Escherichia coli
atgaagcaatggctcatcataattgctgtttttttgctcatttacactgttttcccagcattaaaagcaccaatgcaaataatttcactagcaataattgcgattggtgctttcattgcagtagccgtacttgtgtttaaggttttaaagtttttagtttggctatcaaaagatgatggatgcaaagttcatcaagaaaaagaaggcaaaataaccaaagttgactaa

SEQ ID NO: 31232 - DNA, 1170 bp, Escherichia coli
  misc_feature (1091)..(1134): n is a, c, g, or t
atggctcgcggctatgtttctcctgatctgtgggaagaaggaataaatgccgggctactaaactatagttttaatggtaattctattaataaccgtagtaaccataatgcaggaaaatccaactatgcatatttgaatttacagagtggcatcaacattggtagttggcgactgcgcgataactcaacgtggagttataacagtgggagtagcaattcatctgacagcaataaatggcagcatatcaatacgtcggctgaacgtgacattattccgttacgctcacggttaacagtgggtgatagttataccgatggcgatatttttgacagtgtgaactttcgtggccttaaaataaattcaacagaagcgatgttgcccgatagccaacatggtttcgctccggtgattcatggtattgctcgtggcaccgcacaagtgagtgtaaaacagaatggatacgatgtttatcagactactgtcccacccggcccttttactattgatgatatcaactctgcggccaatggtggtgatctgcaagtaaccataaaagaggcagacggcagtattcagacattatatgttccttattcgtctgttccggttctccaacgtgctggatatacgcgttatgcgcttgccatgggggaatatcgtagtggaaataacctgcaaagctcccccaagttcgtacaagcaagcttgatgcatggtctgaaaggaaactggacaccttatggcggaatgcaaattgcagaagattatcaggccttcaaccttggtattggtaaagatttaggactttttggtgccttttctttcgatatcacgcaggccaatacgacgcttgcagatgacacccgtcacagcggacaatcggttaaatccgtctacagcaaatccttctaccagacgggaaccaatatccaggtcgcaggatatcgctattctacgcaaggtttttataacttatccgacagtgcatacagtcgaatgagtggttacaccgtcaagcctcctaccggagacaccagtgagcagacactatttattgattattttaatctgttctacagtaagcgtggtcnnnnnnnnnnnnnnnnnnnnnnnnnnnnnnnnnnnnnnnnnnnntattacgacttcgctgaattacagctattccaataa

SEQ ID NO: 31233 - DNA, 525 bp, Escherichia coli
atgaacggtaaaagatatccaacacaaaaagaaatcaatgaattgtatgaatataatagcgaaaaaggtttgtttatatacaagagaagagaaagtgtaagagagtgctggaattcaacatatgccggtaagattgctggttctatagatgaaaaaggatacgttcgtatatctgtaaataaaaaagtttgtcgagctcatagaatcgcatggatatccttttatggaagtgaacctgatggggtaattgaccacataaatggaattaaaagtgataacagaatatgcaatttgcgcgttgtagatgataaacagaactcaaggaacagaaaaaagcctattaataatcgctctggagtaattggtgttgcctactataagaagaataaaaagtggggcgcatatataaacagtgataataaaaagatatttcttggattatacgatgacatatctctagccgttaatgccagaaaattggcggaatcacgattggggtatcaccataatcatgggagaggataa

SEQ ID NO: 31234 - DNA, 309 bp, Escherichia coli
atgacggtaatcgtgtacggaaaatcaacatttgcaggaaatgccaaaactcgccgtcatgagcggcgcagaaagctggctatcgagcgtgattccatctgcaacatcatcgattcgatcttcggcacagacagtgaggaagctgttcaggaagaaccgagaaagcgtttaagtctttctgaaaaagcaatatcactcggcatcatcagtaaatcaaatacagatgcgaatggcggaagcgtttgtttgcctgaagttgcactgtatgctgctggttacaggtcaatgaaatcaattacggcgagatag

SEQ ID NO: 31235 - DNA, 600 bp, Escherichia coli
atgcgtaaactttatgccgccattttgtccgcagccatttgtctggccgtatccggtgcgcctgcatgggcatctgaacatcagtccacgctgagcgcggggtatcttcatgcctcgacgaacgttcccggcagcgatgatcttaacgggattaacgtgaaataccgttatgagtttacggacacactggggctgatgacgtcattcagctatgcaggagacaagaatcgccagcttacccgttacagcgatacccgctggcatgaagattccgtgcgtaaccgctggttcagcgtgatggcggggccgtctgtacgcgtgaatgaatggttcagcgcgtatgcgatggcgggtatggcttacagccgtgtgtcgactttctccggggattatctccgcgtaactgacaacaaggggaaaacgcacgatgtgctgaccggaagtgatgacggtcgccacagcaacacgtctctggcgtggggagctggcgtgcagtttaacccgaccgaatccgtggccattgaccttgcttatgaaggttccggcagtggtgactggcgcactgacggtttcatcgtgggtgtcggttataaattctga

SEQ ID NO: 31236 - DNA, 741 bp, Escherichia coli
atgcctgtaccaaatcctgtaatgccggtgaaaggtgccgggaccaccctgtgggtttataacgggagcggcgacccttatgcgaacccgctttcagatgttgactggtcgcgtctggctaaagttaaagacctgacgcccggcgaactgaccgctgagtcctatgacgacagttatctcgatgatgaagatgcggactggaccgcgaccgggcaggggcagaaatccgccggagataccagcttcacgctggcgtggatgcccggagagcaggggcagcaggcgctgctggcgtggtttaatgaaggggatacccgtgcctataaaatccgcttcccgaacggcacggtcgatgtgttccgtggctgggtcagcagtatcggtaaggcggtgacggcgaaggaagtgatcacccgtacggtgaaggtcaccaatgtgggccgtccgtcaatggcagaagatcgcagtacggtgacggcggcaaccggtatgactgtgacgcctgccagctcctcggtggtgaaagggcagagcaccacgctgaccgtggcattccagccggagggcgcaactgacaagagcttccgtgcggtgtcagcggataaaacaaaagccatcgtgtcggtcagtggtatgaccatcaccgtgaaaggcgttgctgcaggtaaggtcaacattccggttgtatccggtaatggtgaacttgctgcggttgcagaaatcactgtcaccgacagttaa

SEQ ID NO: 31237 - DNA, 237 bp, Escherichia coli
atgcaggctgcgattatcgaatggcaggcaactggcgacgctaagagcggactggcatggatttataacacactgtttggccctggcgaattgccggacgaatctgagaaagatgctcaggcctactttaatcgcaaatatgcaccgattgacgaaaagcttatggagcttcacaagtggttttgggaacaaagtgaatccgagcgcgccgctggcattcgcatcaaaggagagtga

SEQ ID NO: 31238 - DNA, 306 bp, Escherichia coli
gtgggccgtccgtcaatggcagaagatcgcagcacggtaacagcggcaaccggcatgaccgtgacgcctgccagcacctcggtggttaaagggcagagcacgacgctgaccgtggcattccagccggaaggcgcaaccgacaagagcttccgtgcggtgtctgcggataaaacaaaagccaccgtgtcggtcagtggtatgaccatcaccgtgaaaggtgttgctgcaggcaaggtcaacattccggtcgtatccggtaatggtgagtttgctgcggttgcagaaatcaacgtcaccgccagttaa

SEQ ID NO: 31239 - DNA, 615 bp, Escherichia coli
atgttacgtaatggaaataaatatatcctgatgctggtgagtataattatgctcactgcgtgcattagccagtcaagaacatcatttataccgccacaggatcgcgaatctttactcgccgagcaaccgtggccgcataatggttttgtggcgatttcatggcataacgttgaagacgaagctgccgaccagcgttttatgtcagtgcggacatcagcactgcgtgaacaatttgcctggctgcgcgagaacggttatcaaccggtcagtattgctcaaattcgtgaagcacatcgaggaggaaaaccgctaccggaaaaagcagtagtgctgacttttgatgacggctaccagagtttttatacccgcgtcttcccaattcttcaggccttccagtggcctgctgtatgggcccccgtcggcagttgggtcgatacgccagcggatgaacaagtaaaatttggcgatgagatggtcgatcgagaatattttgccacgtggcaacaagtgcgagaagttgcgcgttcccggctcgttgaggtcgcttctcatacatggattctcactacggtattcaggctaatgccaccggcagcttattgcctgtatatgtaa

SEQ ID NO: 31240 - DNA, 417 bp, Escherichia coli
atggagtttaaagacgagtacacagaaacacatcaaaaagttgagttagcaaaaaccttagcatcatactctcctgagttttcattatcattattagataatgccgataattgtcccttagacttgtatacagctcttcaattaagaatcgggttaactcaaaaagctatatcaacactcgctcagattgatgtcagtgatattgtatactcccctgatatattactcttgcaaaataatgctttcagagaaacggcagaaatctctttaaatagacttaacgaatactataagtactttggtttatctccagtcgcacttgcagataactcatctcctttgtcaccttgtaatattattacattggttccttatcctgtccaaacgggtagaaaatgcagtaatatcattgcttaa

SEQ ID NO: 31241 - DNA, 861 bp, Escherichia coli
gtgaacaccacgctgggcgagacctgggaagaggccgtgggcgaaaaactcgatcaccaggtactgatggataaggtcgtgcattacacggcggcggtgcctgcccgggtggtttatctgacggcgggcattgactcgcagcgaaaccgttttgagatgtatgtctggggatgggcaccgggagaggaagcttttctggtggataaaatcatcattatggggcgtcctgatgaggaagagacgctgttacgtgtggatgcggcgatcaacaaaaaataccgccatgcggatggcaccgaaatgaccatttcccgtgtctgctgggacaccggggggatcgatggtgaaatcgtctaccagaggtcaaaaaaacacggtgttttccgtgtgctgccggtaaaaggcgcgtctgtctatggcaagccggtgatcaccatgccgaaaacccgcaatcagcggggcgtttatctgtgtgaagtggggacggacaccgcaaaagaaattctctatgcccgtatgaaagccgagcccacgcctgcggatgaagccacgtcgtatgccatccgttttcctgatgatccggagattttttcgcagacagaggcgcagcaactggtcgcggaagagcttgtggagaagtgggaaaaaggaaagatgcgtctgctgtgggataacaaaaagcggcgtaacgaagcgctggactgcctggtgtatgcctacgcggcattacgtgtgtccgtgcaacgctggcagcttgatctggctgtactggcaaaatcccgggaagaagagacgacccggccaacccttaaagaactggcagcgaagctgtccggaggagtgaatggttacagtcgctga

SEQ ID NO: 31242 - DNA, 1509 bp, Escherichia coli
atgaataaaatatacgctctaaaatattgttatattactaacacagtaaaggttgtctctgaactagcccgaagggtatgtaaagggagtacccgcagaggaaaaagactttcagtacttacctctctggcactatctgcattactcccaaccgttgctggtgcatcaacggttggtggcaacaatccttaccagacataccgcgactttgcagaaaacaaagggcagtttcaggctggcgcaacaaacattcctatttttaataataaaggggaattagtaggacatcttgataaagcgcccatggttgattttagcagtgtgaatgtaagctcaaatcccggcgttgcaacattaattaacccgcaatatatagccagtgtaaaacataataaaggatatcagagcgtcagcttcggtgatggtcagaacagttaccatattgtggatcgtaatgaacacagttcatctgatctccacacaccaagacttgataagctcgtaactgaggttgctccggctaccgtaaccagctcatcaacagctgatatattgaacccttcaaaatactcggcattctacagggctggttcgggaagtcagtatattcaggatagtcagggtaagcgacattgggtaacaggtgggtatggttatctgacaggaggaatactcccgacatcattcttttatcacggctcagacggcattcagctgtatatggggggcaacatacatgatcatagcatcctgccctcttttggagaggccggcgacagtggttctccattatttggctggaatacggccaaagggcagtgggaactggtcggtgtttactcgggagtaggaggggggaccaatttgatatattctcttattcctcagagttttctctcacagatctattcagaggataatgacgctcccgtcttttttaatgcctcatccggcgcccccctgcaatggaaatttgacagcagcaccggcactggctctctgaaacagggttccgatgaatatgccatgcacgggcaaaaaggttctgacctgaacgcaggtaaaaatctgacattcctgggacataatggtcagattgacctggaaaactctgtcacgcagggtgccggttcactgacatttactgatgactacactgtcaccacttcaaacggaagtacctggaccggggccggtattattgtggacaaggatgcctccgtaaactggcaggttaatggtgtgaaaggtgacaacctgcataaaatcggcgaaggaaccctggttgtacagggaaccggtgttaatgagggcggcctgaaagtcggggatgggaccgttgtcctcaatcagcaggctgacagttcaggacacgttcaggcattcagtagcgtgaatattgccagcggccgcccgacagtcgtgctggcagacaaccagcaggttaatccggacaatatatcctggggctaccggggggggttctggatgttaacgggaatgacctga

SEQ ID NO: 31243 - DNA, 1143 bp, Escherichia coli
atgacaaataaacacccatcattgttttctccttttatgctgacagaaaaaataaagctacgtaatcgtatcgttatggctcctatgacaacctggtcagctaatcctgatggaaccatctctgagcaagaactcgaattttataaacgtcgctcacaaaatgttggtttagtaataacaggatgtacctatgtcacgccaagcggcattgggtttactcatgaatttgccgcgtatgacgaccgtttcattaacagccttgaaaagttagcagctgcagccaaaagtggcggtgctccggctattttgcagattttccacgccggtaataaagccatcccggagcttgtgccaaataacgatgttattagtgccagcgcatcaagcgtaaaatctggtgactttatgaagagagtggtacaaagcagggaaatgactgaaaacgaaattcaggaaaccattagagcattcggagatgtcacaaaaagggcgattaaagcaggttttgatggcgttgaacttcatggtgcgcacggattccttctgcagaatttcttctcccctctatttaaccagcgtaatgaccgatggggaggagatcttgaaggacgtatgcgcttcccgctggccgtattacaggaagtaaaaaatgtagtctatgaatatgcgacaaagccctttgctatcggttacagaatatctcctgaagaatctgtaacaggggggctgcggatagaggatacttataaactccttgatcgactcatttcatccggtatttcgtatatacatacctcgctggtcagtattaacgatagctaccctgttgagtcgccaaatggcccccgaactattgaattgattttaaatcatattgcaggcagagtgccggtaatcgccgcaggtaaaatacgcacaccgtctcaggctcaagaagcaatttccgctggcctgccacttgttgcgatcggtaaagggctggtgataaatccagaatgggtgactttagctgaatcaggtagaagtcatgaaattcaaacagcccttaatccacaacgcgttcctgaattaaccattccggataaactatgggatcaaattcaggcatcgaaaggaactggctggtttccgttaatggattaa

SEQ ID NO: 31244 - DNA, 1638 bp, Escherichia coli; identical to SEQ ID NO: 15360

SEQ ID NO: 31245 - DNA, 141 bp, Escherichia coli
atgctgaaaggcgggatttccggtcgcagtgcaaaaggaaaacgtatccatacccgggccattcacagcattgataccgacattaagctcaaccgtgcattgtgggtgatggcagaaacgatgctggagagcctgcgctga

SEQ ID NO: 31246 - DNA, 579 bp, Escherichia coli
  misc_feature (554)..(563): n is a, c, g, or t
atgcaacagggcattgaatatgcgcgcctgctggacgttccttttgtttttgccaccaacggggatggctttatcttccgcgatgccaccgcagccgaaggtgaatgccttgaaaagcaaataacgctggatgacttcccctcccccgctgaactctggcaaaaattctgcctctggaaaggatacacacaagctcagcttccggtgattactcaggactattacgacgatggcagcggtaaatcgccacgttattaccagcttcaggcaatcaacaaaaccattgaagccgtctccaacgggcaaaaccgcgttctgctggtcatggcgaccggaacagggaaaacctataccgcattccagatcatctggcgcctgtggaaatcaaaaaataaaaaacgcattttgttccttgccgatcgcaacattctggtcgaccaaaccaaaaataatgatttccagccatttggtacggcaatgactaaagtcagcggacgcaccattgatcccgcttatgaaattcacctcgcgctctatcaggctataactggccnnnnnnnnnngaattcttcgatctga

SEQ ID NO: 31247 - DNA, 684 bp, Escherichia coli; identical to SEQ ID NO: 8862

SEQ ID NO: 31248 - DNA, 429 bp, Escherichia coli
atgaaggcactggaggaaaggttaaatatccgtctcttaacccgaactacccgtagcgtggcccccacggaagcaggggagagaattattgcctgtcttgagccacgtatagatgagcacagaatcgtcatgcttcagggggacagacgccatgcgggaacgccggaagatggtgttatctcccgggagcaaatcgcccaggttcttgtaacagctctgagcaacgatgcggcaaaaaataaaacgttcgaactggtcgcagagcgaggagaagcacagcaggatctcactcctctgtttgcagagctgcggaatgataatccacaaaaaaatgatggggttttcgatatagacaatatgccccttactgaagaacctgagtgcgttattaacgacctgaatctgtattcgaaaaattcaaaaatctaa

SEQ ID NO: 31249 - DNA, 282 bp, Escherichia coli
atgagaatactcgttgctggcgcaacaggaagtattggtattcatgttgtgaatactgctattgcaatgggccatcagcccgtgactctggtcaggaatcggcggaaaatcaagttactccctcgtggaacagatattttctatggcgatgtttcaatacctgaaacacttaccgatttaccgaaagatattgatgccatcatttttacactcggctctgatggtcagggacgtattggcgccagagcaatagattacggcggtgtacgtaacattttgtga

SEQ ID NO: 31250 - DNA, 657 bp, Escherichia coli; identical to SEQ ID NO: 8826

SEQ ID NO: 31251 - DNA, 549 bp, Escherichia coli
  misc_feature (537)..(546): n is a, c, g, or t
atgtgcttacttgcaccagaaaatccttatccgatatatgcactaccaccgctggtgagaaatgcaataattgaaactcaaaaaaatacacaggcacctttggctatggtggcaacatccgcattaacagcgacctcaattgcctgtcagaatcaggttgacgtgtgcagacctggaaatttacgtgggcctgttaatctttactctctgattctggctgattccggtgaaaggaaaacgaccgtggataaagtgtttatgaaagcattttatctcagggatgaagccctggcggaagaatacgcgaaactggttgagaattacagtacagaaaaggaaatatgggagcaaaaacaaaaagcgctggaatcaaaatttcataaagagattcgtgccggtaaagattacaaggcaacagaatcagagcttgaaacgcatctgaataagtctcctgttccgccgcagatacgtcgaacaatttttaatgagacaacgatagagggaatgttaaaatattactccgatagcaatcgttcnnnnnnnnnntaa

SEQ ID NO: 31252 - DNA, 516 bp, Escherichia coli
  misc_feature (499)..(508): n is a, c, g, or t
atgatccgtacgcttaaccgcaccagtgcctcactggaacagttgcttgatacggccaacgtagaaaacgtcgatctgatcctgacttcatcaccaatgctgctccagcaccttcaggagcaccagaaactggccccgtttgatgatgcacccgcagaaagccaaaacctggtgccggagtcgatccgtgcaacctccgttgcagtagcaatatcaggttttggtctgcttattaatcgtcctgcgctttctgtaaaacaccttcctgcccctgctgactgggacgatcttgctttgccgatctatcaggacgctttattgatgagtagtccgtcgcgttcagatactaaccatttaatggttgagtcattactacagcaaaaaggctgggtgaaaggatgggaaacgttgctgacaagtgcaggaaacctggtgacaatctcctcccgcagttttggcgtagccgataaaataaaaagcggactcggcgttgccggcnnnnnnnnnnatcgataa

SEQ ID NO: 31253 - DNA, 363 bp, Escherichia coli; identical to SEQ ID NO: 22309

SEQ ID NO: 31254 - DNA, 594 bp, Escherichia coli
ttgattcaggttagtcaggggtggaataatggttggtgggcaagttttgagtcaaacacctggaatacaattcacaacaatgaaaatgaattgtttgcactcaattataataaaatagatataaataaaacatataaaatagatgacaaatgggctctaatcccagggattcagacacaatggatgtcagcaggaagtcagtataacccttatctgaaaatttcgtatcaggcaacgccagatcttaatctggccttacgctatcgctatgactggaaagctttccgacagacggatttagatggcaacagggcgcgtaatgatcagcatcagtttgatggttatgtgacatacaaaattaatgattcatggttgtttgcatggcagaccacggtatatacgaaggttaataatttcaaatatgggaatcataaaaaaacagcaactgaaaatgcatttgttctgcaatataaaatgtcaccggtgttcaccccatatatagaatatgattacttggataaacaaggggtgtataaggggaaagataataaacatgaaaatagttaccgtgtcggtgttctgattaatttttaa

SEQ ID NO: 31255 - DNA, 363 bp, Escherichia coli; identical to SEQ ID NO: 22309

SEQ ID NO: 31256 - DNA, 426 bp, Escherichia coli; identical to SEQ ID NO: 6000

SEQ ID NO: 31257 - DNA, 363 bp, Escherichia coli
atggttaaactggcttcacaactaggagcctctgttgcccgtattgccagggaacacgatatcaatgataacctcctgttcaaatggctcaggctctggcagaacgaagggcgtatatcgcggcgtcttccggtaacaacctcttctggcgctggcgttgaattattacctgttgagataacgcctgatgagcagaaagagcctatggcggctcttactccgcttttatccactccttcacaaagcacagtcagtgccagttcctgtaaagttgagttccgccacggtaacatgacgctggaaaatccttcaccagagctgctcacggtgttgatccgtgaactgaccgggagggggcgatga

SEQ ID NO: 31258 - DNA, 405 bp, Escherichia coli
gtgtttcctgccggcgagtggaacgacacagaaaaatgcccgtcccgtcagcaggaactctcactggcaacagtaacagcccgggtggcaaccctgttcccttcatcacttccggtactccccgttgccgcacctgtcggctggaatcttccggcactggtgtcgctgatgatccacgcactgccaccacaggcaaccagcgcagtttattcacatatccggggggaaaaccgctctgaacaggcccggaaacacgcacaacaaacttttggtgacgccatcgggaaaagctttgacgctgccgttgcccgattcagttttccggcctggatgttacagcttctgcgtaaagcccgggaccgcattatccacctgctgatcacactgtgggagcgtctgttctga

SEQ ID NO: 31259 - DNA, 615 bp, Escherichia coli; identical to SEQ ID NO: 31239

SEQ ID NO: 31260 - DNA, 174 bp, Escherichia coli; identical to SEQ ID NO: 8853

SEQ ID NO: 31261 - DNA, 1725 bp, Escherichia coli; identical to SEQ ID NO: 5953

SEQ ID NO: 31262 - DNA, 351 bp, Escherichia coli; identical to SEQ ID NO: 5999

SEQ ID NO: 31263 - DNA, 378 bp, Escherichia coli; identical to SEQ ID NO: 10109

SEQ ID NO: 31264 - DNA, 207 bp, Escherichia coli; identical to SEQ ID NO: 28483

SEQ ID NO: 31265 - DNA, 264 bp, Escherichia coli
  misc_feature (211)..(220): n is a, c, g, or t
atgattaagattgagaatttgacgaagtcatatcgtacgccaacggggcgacactatgtgtttaaggatttaaacatcgaaatcccttcaggaaaaagcgttgcctttattggtcgtaatggtgcgggtaaatcaacgttactgagaatgattggtggcattgaccgccccgatagcggaaagatcatcaccaataaaacgatatcatggnnnnnnnnnnatcatggccagtcggcctcgccggtggattccagggaagtttaa

SEQ ID NO: 31266 - DNA, 699 bp, Escherichia coli
atgttaaaactgactgatatcacctggctttaccaccatttgccgatgcgttttagcttaacggtggaacgcggcgagcaggtggcgatcctcgggccaagcggcgcaggtaaaagtaccctgcttaatttgatcgccggttttctgacgccagccagcggtttgctgactatcgacggcgttgatcacaccacgacgccgccgtcacgccgtccggtgtcgatgctgtttcaggagaacaacctgttcagccacctgacggtcgcgcagaacatcgggctggggctaaatccggggttgaaactaaatgcggcgcagcagaagaaaatgcacgcgattgcccaccagatggggattgataatttaatggcgcggttacctggcgagctttccggcggtcaacgacagcgcgtggcgttagcgcgttgtctggtacgcgaacagcccattttattgctcgatgaaccgttttccgcgctcgatccggcgctacgtcaggagatgctgacgctggtgagcacgagctgccaacagcaaaaaatgacgctcttgatggtgtcgcacagtgtggaagatgcggcgcggatcgccacgcgctcggtggtggtcgccgacgggcgtatcgcctggcagggtaagaccgatgagttgttgagcggtaaggcgagtgcttcggcgctgttgggaattaaaggttaa

SEQ ID NO: 31267 - DNA, 1734 bp, Escherichia coli
gtgactacgttaaataaagctcccatgcctgatttttcatctgtggataggctattgggcgttgccacacttgttaacccacaatatgtcgtcagtgttaagcataatggtggctatagtagagtacggtttggtacgagtaattatactttagtagacagaaataactactcagcaagagatttccatacgcctaggttaaataaactggtaacagatgtggttcctgtagaggttaccagtgcaggaacagcgcagggaacatataaaaatgtaaccaagtttcctgttttctataggataggtacagggacacaaatatataaaaatgaacaaggatattatactctgaacggtgcttacagttatcttactggggggattgttcctacgccatcaatttcagattggtcatttgtgacaaatgctggcaacggtgctcttgcgtcgtatggaactcccggtgacagtggttcaccgctacttggatgggatacaactctaaataaatgggctcttgtgggggtactcagagcatatgcaggaaccacagggagtaccaactggtatgttgttataccaacagtgcaaatcaccgcaaatataaatgctgatactgataaacctgttaccagtgaggccgggagcggtgatattctctggactttcaacagtgtgacaggaaccggtcagttagttcagggagataattcctgggacatgcatggtcagaaggacttagatctcaattatgggaaaaatctgacattttctggaggcggtacaattgttttagaaaattcggtgactcagggggctggggcgctgacttttaatgatgactatgtggtgaaacctctggatgatcagacctggattggggggggtgtcattgtcaatgatgggcacgttgttgactggcaggtcaatggtgtgtcaggagatgcgctgcataaattaggcacgggtacgttgaaaattgatggctccgggattaatggtggaagcctgaatactggtgatggcgcagttattctggctcagagacccgatggcgaggggaaagttcaggcttttagtagggtatctcttgttagtggtcgctctattgtaattctttctgatgaaaatcagattaacccagataatatttattggggatatcgtggaggtacgcttgatattaatgggaatgatctgactttccacaaattaaatgcttttgatgacggtgcaattattacaagtaatggcagattggccagactgacactgtccttaaatgaaaaaacagcaactatttatcatgggaattttaagaatgatttgtctgtgacaaataacaccaccaataattcaggtgattttattgttgatggtggtataaatataaatgataattttgagcaaaatggtgggaaattgttttttcaggggcatcctgttcctcatgcggtgactagtcagtcagtagcaaatactctcaaaaaactaggagatgactcagtattaacacaaccagtgtcatttacacaggatgattgggagactcgccaattcagtttgaagtctcttgttctgaaagacaccgcgttttatcttggacgaaatgcgcagctcactactgatattagtgcagataactcatctgtcacccttggcagtgaagatgtctatattgatctgaatgaaaggactcagataaaagtacattttatggaaatgtatctctga

SEQ ID NO: 31268 - DNA, 924 bp, Escherichia coli
atgcctcatgtatgtagtgaatcgatttcatacttactgggcgaaaatggtatacttgaagaaatagataagctctacgaatcaaatgatcacggaattgataatcacaaaaaaggtaacaatgaaattaatgacatcatgattaacctgtctcatattcttattgattccttagatgatgcaaaggttaaccttacaccggtcatcgattcgatgctggagacttttttaaaattcccatatatttatgatgtaagaatactggagtggtgctttaataaaagcatgcaatattctgatgatacaaaaaagataaagcatgcatgctccgtaataaatcatattaatcttcgcagcgatcagtctaaaatagctgaggcattatttttcaatctcgataaagaaccctataaaaatagccctgaattacaggggttgatttggaataagttggttgtatatgtcaatgattttaacttaagcaatcgagaaaaaacatatttaatacaaaggatatttaataatgttgagtctgtatttaataaagtgcctgtcagcattttagtaaatgatatttttctgaaggatttttttatgaaaaatcctgagatgattaattggtatttccctcagttacttaatacctatgagggtgaaaagatttattttgataagttggggtatgattttaataataaagagtctaatgatgagattatgaaaaatcaaccaaatgatgttattaatgaaaaaattaataatgaattaaaacttaggtttagaatgatgcaaactatcttgaaatcgagagttaatgtattaccatatattaatgaacagcgtttaaataaactaaatccaccggaaaatttacgtatagcaatagaaaaatttgggtggaataataaacctatcactgcataa

SEQ ID NO: 31269 - DNA, 144 bp, Escherichia coli
atggggaatgttcggttcttgcaaggagtgaaaaaatatttttgtactaaggcattagatgtcattctgctaatttatctactccttggttttatacctgtctcttatacacatctgacgctgccgacgaagaggatagtgtag

SEQ ID NO: 31270 - DNA, 741 bp, Escherichia coli
atggcggaactgaacctaagtaacctgacggaagcagacatcattaccaaatgcgttatgccagccattctcaatgcaggctgggacaacacaacgcaaatcagacaggaggtcaaactccgggacggtaaagtcatcgtacgtggtaaagttgcggcacgcagaacggtaaaatctgctgacatcgtgctgtatcacaaaccaggcattcccttagccgtgattgaagcaaaagccaacaaacatgaaattggcaaagggatgcaacagggcattgaatatgcgcgcctgctggacgttccttttgtttttgccaccaacggggatggctttatcttccgcgatgccaccgcagccgaaggtgaatgccttgaaaagcaaataacgctggatgacttcccctcccccgctgaactctggcgaaaattctgcctctggaaaggatacacacaagctcagcttccggtgattactcaggactattacgacgatggcagcggtaaatcgccacgttattaccagcttcaggcaatcaacaaaaccattgaagccgtctccaacgggcaaaaccgcgttctgctggtcatggcgaccggaacagggaaaacctataccgcattccagatcatctggcgcctgtggaaatcaaaaaataaaaaacgcattttgttccttgccgatcgcaacattctggtcgaccaaaccaaaataatgatttccagccatttggtacggcaatga

SEQ ID NO: 31271 - DNA, 1044 bp, Escherichia coli; identical to SEQ ID NO: 29075

SEQ ID NO: 31272 - DNA, 297 bp, Escherichia coli
atgcgtagaacactaaaactggcggtgtgttggcttacactttcgggaattgttagccctgttgactccgttctgtatcggcatggtggccgcgatgactggggcagctacgccagagaagtgccgaaggtgaaatacctgaccggcaaaatcttcacgcaacgtattgaacgtaacaacctgaccctccgcacccgcatcaagcggctggtaagtaaaacaatctgcttctcgcgttccgttgaaatccacgaaaaagtcatcggttccttcattgaaaagcacatgttctactga

SEQ ID NO: 31273 - DNA, 189 bp, Escherichia coli
atgttgggcgacataaatgaccgagaaatcgctgatgagaaaacaatacgtcagtacgccaaaggcgagcagcaggagcgcgaactgcgccagaatgccgatgcaagtgagtcgcatcatggcaggccagcgcaaccgcactcccgcgaaggccgtcaacggggtcaacacgttgaccccgagacttaa

SEQ ID NO: 31274 - DNA, 261 bp, Escherichia coli
atgtcgactgaaaatgatgaaatcattaactccctgatacgccagattaataattttgataaagcattgcagcatgctgcggcgcgtagtgatataactcttttagcaatttcatttcttgcatctgttatggataaaaatgaagtcgtacgacagagtcttgttgattatatcgactcgcttcaacccggcactttcaatcatgagaaagagcatgttaagtctgtaattaattctcttattttgaatcaaaagaattaa

SEQ ID NO: 31275 - DNA, 216 bp, Escherichia coli; identical to SEQ ID NO: 3477

SEQ ID NO: 31276 - DNA, 576 bp, Escherichia coli
atgcaatatgcattagttgatgcgctggaacgaaaatttttgctggatgctcttgaatttggtgttctgaaggactggaaagaaaatccggtaaaagaacttcctgatattgatgaatctgttcaccccttccatgtctgctatggtggatatttattaaatcctggtgtttcagattcagatattagcagaaaaataaaagaccagacaggattctggctggcagctattgatgatacccgcatggattgtcattcaatagcttattatgatattcacaccctccctttgatttcgtgtggacatcaaaagatagttccttttgccgcattaataaaagctgatgaatgcatcatttcaaaaattgcttcatattctggttttgctgtaacagcctttttgagaattaaagaccaggatatcgcaacgaatatacttaaccgtgagggaatttttgcctttaatggctgtgagcgcagattcagacaacctgtaagtgaagataactggcaacaggcagtatcagaagaacgcgctattcgttgtgcaaacagattaattaaatgtaaaggataa

SEQ ID NO: 31277 - DNA, 2142 bp, Escherichia coli
atgtattcaagtagcagaaaaaggtgcccgaaaaccaaatgggctttgaaacttcttactgccgcatttttagcagcgagtcccgcggcgaagagtgctgttaataacgcctatgatgcattgattattgaagctcgcaaaggaaatactaagccagctttgtcatggtttgcacaaaaatcaacactcagtaataaccaaattgctgactggttacaaattgccttatgggccgggcaagataaacaggttattaccgtttacagccgctaccgtcatcagcaattaccagcgcgtggttatgcagctgtcgccgtcgcttatcgtaacctgcaacaatggcaaaactcgcttacactgtggcaaaaggcgctctctctggagccgcaaaataaggattatcaacggggacaaattttaaccctggcagatgcgggtcactatgatactgcgctggttaaacttaagcagcttaaatctggagcgccggacaaagccaatttactcgcagaagcctatatctataaactgacggggcgtcatcaggatgaattacgggcgatgacagagtcattacctgaaaatgcatctaagcaacaatatcccacagaatacgtgcaggcattacgtaataatcaactagctgccgcgattgacgatgccaatttaacgccagatattcgcgctgatattcatgccgaactgatcagactgtcgtttatgcctacgcgcagtgaaagtgaacgttatgccattgccgatcgcgccctcgcccaatacgctgcattagaaattctgtggcacgataactcagaccgcactgcccagtaccagcgtattcaggttgatcatcttggcgcgttattaactcgcgatcgttataaagacgttatttctcactatcagcgtttaaaaaatacgaggcaaattattccgccctgggcgcaatattgggttgcgtcggcttatctcaaagaacagcagccaaaaaaagcacagtcaataatgacagagctcttttatcacaaggagaccattgccccggatttatccgatgaagaacttgcggatctcttttacagccacctggagagtgaaaattatcccggcgcgctaactgtcacccaacataccattaatacttcgccgcctttccttcggttaatgggcacgcctacgagcatcccgaatgatacctggttacaggggcattcgtttctctcaaccgtagcaaaatatagtaatgatcttcctcaggctgaaatgatagccagagagcttgcttataacgcaccaggaaatcagggactgcgcattgattacgcgagtgtgttacaagcccgcggttggcctcgtgcagcagaaaatgaattaaaaaaagcagaagtgatcgagccacgtaatattaatctggaggttgaacaagcatggacagcattaacgttacaagaatggcagcagacagctgtcttaacgcacgatgttgtcgaacgtgaaccgcaagatcccggcgttgtacgtttaaaacgtgcggttgatgtacataatcttgcagagcttcgtatagctggttcaacaggaattgatgccgaaggcccggatagtggtaaacatgatgtcgacttaaccaccatcgtttattcaccaccgctgaaggataactggcgcggttttgctggattcggttatgccgatggacaatttagcgaaggaaaagggattgttcgcgactggctggcgggtgttgagtggcggtcacgtaatatctggctcgaggcggagtacgctgaacgcgttttcaatcatgagcataaacccggcgcgcgcctgtctggctggtatgattttaatgataactggcgtattggttcgcaactggaacgcctctctcaccgcgttccattacgggcaatgaaaaatggtgttacaggcaacagtgctcaggcttatgttcgctggtatcaaaatgagcggcgtaagtacggtgtctcctgggctttcactgatttttccgacagtaaccagcgtcaggaagtctcacttgagggtcaggaacgcatctggtcttcaccatatttgattgtcgatttcctacccaatctgtattacgaacaaaatacagatgccattccagcgaattga

SEQ ID NO: 31278 - DNA, 1581 bp, Escherichia coli; identical to SEQ ID NO: 29195

SEQ ID NO: 31279 - DNA, 429 bp, Escherichia coli; identical to SEQ ID NO: 28311

SEQ ID NO: 31280 - DNA, 918 bp, Escherichia coli; identical to SEQ ID NO: 20169

SEQ ID NO: 31281 - DNA, 1206 bp, Escherichia coli
atggttgattttagcagtgtgaatgtaagctcaaatcccggcgttgcaacattaattaacccgcaatatatagccagtgtaaaacataataaaggatatcagagcgtcagcttcggtgatggtcagaacagttaccatattgtggatcgtaatgaacacagttcatctgatctccacacaccaagacttgataagctcgtaactgaggttgctccggctaccgtaaccagctcatcaacagctgatatattgaacccttcaaaatactcggcattctacagggctggttcgggaagtcagtatattcaggatagtcagggtaagcgacattgggtaacaggtgggtatggttatctgacaggaggaatactcccgacatcattcttttatcacggctcagacggcattcagctgtatatggggggcaacatacatgatcatagcatcctgccctcttttggagaggccggcgacagtggttctccattatttggctggaatacggccaaagggcagtgggaactggtcggtgtttactcgggagtaggaggggggaccaatttgatatattctcttattcctcagagttttctctcacagatctattcagaggataatgacgctcccgtcttttttaatgcctcatccggcgcccccctgcaatggaaatttgacagcagcaccggcactggctctctgaaacagggttccgatgaatatgccatgcacgggcaaaaaggttctgacctgaacgcaggtaaaaatctgacattcctgggacataatggtcagattgacctggaaaactctgtcacgcagggtgccggttcactgacatttactgatgactacactgtcaccacttcaaacggaagtacctggaccggggccggtattattgtggacaaggatgcctccgtaaactggcaggttaatggtgtgaaaggtgacaacctgcataaaatcggcgaaggaaccctggttgtacagggaaccggtgttaatgagggcggcctgaaagtcggggatgggaccgttgtcctcaatcagcaggctgacagttcaggacacgttcaggcattcagtagcgtgaatattgccagcggccgcccgacagtcgtgctggcagacaaccagcaggttaatccggacaatatatcctggggctaccggggggggttctggatgttaacgggaatgacctga

SEQ ID NO: 31282 - DNA, 573 bp, Escherichia coli; identical to SEQ ID NO: 7168

SEQ ID NO: 31283 - DNA, 573 bp, Escherichia coli; identical to SEQ ID NO: 7694

SEQ ID NO: 31284 - DNA, 522 bp, Escherichia coli
gtggttatgaatcctgatatatatattgagtgctctgatctattagatgtcgtagatgagtgtggttcagcgaatgttaatctagcaacgataaatttatacagggattttgataaaaaaacatatgataactcagtaaggaaatttccctcggcaattgatttttttatgtcatttttatttaagaaaaatgactgtgtagtaaataagaacaaaataacgaaaccaacatatgttgattgggctgcaggttcttttctaatatttaatgccttcttttattcaaaactcaacggattcaacgaaaagtattttatgtattgcgaagatattgatatatgttggcgagctaaaaaacacttcaatacttcagttttatactatccatgctatgcagcaattcatttggcacaatttaacaatcgtaggatttttagtagacatttcatttggcatataaaaagtattatcctttttttattatataaaaatggtatgctgcgttctagtaagttgctttaa

SEQ ID NO: 31285 - DNA, 174 bp, Escherichia coli
atgatgacggtaagcgcctttctttggcaaccgggtacaacggtcgtattgggcgtgttaattacagtattgcttacagttggaataaaagccctgaatgggatgaaaacgaccagttatggtcatttaatgtttccattccgtttggtcgggcatggagtaactaccgcgtga

SEQ ID NO: 31286 - DNA, 855 bp, Escherichia coli
atgtatattatttcaagcaaaaacatgctgaaaaaagcccagtcagagggatatgccgtccctgctttcaacattcataaccttgaaactttacaggtagttgttgagagcgctgcacaacttcgctctcccgttatgctggcgggaacacccggtacatatcgttatggtggcgtgggaagtttaatttcgttagtacaatcgctggctcgcgagtacaacctgccgttagtcctgcatctcgaccatcatgaagagagtgatgacatttttaacaaggttcgcgcagggatccgttctgtcatgattgatggctcccatttgccatttgaagacaacattgcgcgagtgcaagaagttaccaccttttgccatcgctttgatgttagcgttgaggccgagctagggcgtcttggcggccaggaggacgatctgcgggtggatgaaaaagattccgcttatacctcaccagccgcagctgcagagtttgttcaacgtacccaaattgactccctggcggtagcaatcggcacagcacatggtttatatgcgcatgaaccacgactggattttgtgcggctggaacagattcgtcagcgagtggagattccgctggtgttgcatggtgcttcgggcttatcggaacaggacgttcagcactgtattcgtcgcggtatttgtaaagtgaatgtcgcgacagaattgaaaattgcgtttgccgatgcgttaaaaggatatttctacaacaatcctgcggcaaatgatccacgtcactatatgcagcccgcaaaggccgccatgaaagaagtcgtaactcgtattattggcgtctgtggtagtgaaggaaaaatttaa

SEQ ID NO: 31287 - DNA, 267 bp, Escherichia coli
atgatgctcaacagcatcactgatcaaattcatcatgttattaagaaactcctctacaactttaaacgcatcattgagcgtagctgtattgaatgtatgtatcttttcatccgttgttttcgttttcccgttacgatgaactatgtcatgcctcagtttcatcaattcattgatatttttgagtggaaaacgtggatattgcttaggttgcaggactgctttatatatttcaactaccagttggattctatgataaagaatatctga

SEQ ID NO: 31288 - DNA, 162 bp, Escherichia coli
atgtttaaaattaaggatggatcatataattatttgcaacctaaaataaaaaaagctgactataacgctctttctgacgataaactttacaatatatccgataaaaaaatgtcaaatctttatgacaaactttttgtttctttattagagcagaggcactaa

SEQ ID NO: 31289 - DNA, 486 bp, Escherichia coli
gtgctattaggggccggtggtgcctcaacggcaattggcgcgcagggggcaattgaaggtttaaaagaaattaaactctttaaccgtcgggatgagttcttcgataaagctctcgccttcgcgcagcgggttaacgaaaacaccgattgcgtcgtgacagtcaccgatctcgccgatcagcaagcctttgcagaagccctggcttccgccgacattttaaccaatggcaccaaagtgggtatgaaaccccttgagaatgaatcattggttaatgatatcagtctgttacatccgggacttctggtcactgaatgcgtgtataaccctcatatgacgaagttattgcagcaggcgcaacaagcgggttgcaaaacgattgatggatacggcatgttgttgtggcaaggggctgaacagttcacgttatggactggcaaagatttccctctggaatatgttaaacaggtcatggggttcggtgcctga

SEQ ID NO: 31290 - DNA, 234 bp, Escherichia coli
ttgttatggcgaagctatgaaaatagctgggagcaaatcttcagcgcaggtgttggtgcctcctggcaaaaacattatggcacggatgtcgtcacccaactcggctacgggcaacgtattagctggaatgacgtgattgatgctggcgcaacgctacgctgggaaaaacgaccttatgacggtgacagagaacacaacttatacgttgaattcgatatgacattcagattttaa

SEQ ID NO: 31291 - DNA, 531 bp, Escherichia coli
atgtctgaaccgcaacggctgttctttgctatcgacttacctgcagaaatccgcgaacagattatccactggcgcgccacacacttcccacctgacgcgggacgtccggtcgccgccgataatttgcatctgactctggcatttttaggcgaagtgagcgccgagaaagagaaggcgctttctcttttagccgggcggattcgtcaaccgggtttcacactcacgcttgatgacgccggtcaatggctgcgttcgcgtgtggtgtggttagggatgcgtcaaccaccacgcggcttaatccagctggcgaatatgctccgttcacaggctgcccgcagcggttgttttcaaagcaatcgtccgtttcatccacatattaccttattgcgcgacgccagcgaggcggtgacaatcccgccgccaggttttaactggtcgtatacggtgacggagttcaccctttacgcctcctcgtttgcccgtggacgcacacgctacacgccgctaaaacgctgggcgctaacgcaataa

SEQ ID NO: 31292 - DNA, 798 bp, Escherichia coli
atgacattaacaagacgtgaatttattaaacacagcggtattgccgctggagcgctggtggtgacatcggcagcaccgctacccgcatgggcagaagagaagggcggtaaaatcctcaccgcgggacgttggggagcgatgaacgtagaagtgaaggacggcaagattgtttcttcgacaggcgcgctggcgaaaaccataccgaactccttacagtctacggcggcggatcaggtacacaccacggcgcgtattcagcatccgatggtgagaaaaagctatctcgataatccactgcaaccgacgaaaggtcgtggcgaagatacctatgtacaggtgagctgggaacaagcattaaaactgattcatgagcaacacgatcgcattcgcaaagctaacggaccatcggctatttttgccggatcttacggctggcgctcttctggcgtgttgcataaagcgcaaacgttactgcaacgttatatgaacctggcaggcggttattccgggcatagcggcgattattcaaccggggcagcacaggtgatcatgccgcatgtggtcggttctgtagaggtgtatgaacagcagacctcctggccgctgattctggaaaacagccaggttgtggtgctgtgggggatgaacccgctgaataccttaaaaattgcctggagcagtaccgatgagcaagggctggaatacttccatcagctgaaaaaatctggcaaaccagtgattgccattgatcctatccgctccgaaaccatcgagttctttggcgataatgccacctag

SEQ ID NO: 31293 - DNA, 480 bp, Escherichia coli
atgcttccatcggaaacgatgatctggcagcctgagttcacagataaaacactctccaggaaacccggggcggttcagtttgttttgctggttttcttccaggatttcgtacaggtttttttgcaggttttcttgcaaaccatcccgctccatagcccattggcaccattcggcgaccatcatgaactcgttatgttgcggattcggattcaggcgctccaacgtgatgatggtattgtctaccatatgtattttcacttctcccgcggtactgaggtcaatgatctgccggtggtcatcaccccagctaaatatttgcgggccgatatacttcatgttccgcaaaatttcattcttgagttccaccggcaggaagaactgccctggtgggcgtacgcctgggttaacggaagatgggggaatgccgggggcgaatgggcggatgtctttaatgctggccataatgctacgtatccttga

SEQ ID NO: 31294 - DNA, 288 bp, Escherichia coli
atgataagaatcgcatttttaataaccaataaatttcttgagatagatagtaccactcttgctggatatgattttagcgggatgaatctacatcgtgccaccctcaatggttattgtcttgatggggcgaaatttgaaaaaactcatttaagaaatgtaatgattcaacatacatcaactagaaatgctgtctttcacaatgcggctctgatgaatgctattctgaataactcagatttaaatggaaaaggattgtctaatgtttgcaaaatacatgacaacgtataa

SEQ ID NO: 31295 - DNA, 2055 bp, Escherichia coli
atgtctgagaaaacttttctggtggaaatcggcactgaagagctgccaccaaaagcactgcgcagcctggctgagtcctttgctgcgaactttactgcggagctggataacgctggcctcgcacacggcgccgttcaatggtttgctgctccgcgtcgtctggcgctgaaagtagctaacctggcggaagcgcaaccggatcgtgaaatcgaaaaacgcggcccggcgattgctcaggcgttcgacgctgaaggcaaaccgagcaaagcggcagaaggctgggcgcgtggttgcggtattaccgttgaccaggctgagcgtctgactaccgataaaggcgaatggctgctgtatcgcgcccacgtgaagggcgaaagcaccgaagcactgctgccgaatatggttgcgacttcgctggcgaaactgccgatcccgaaactgatgcgttggggcgcaagcgacgtgcacttcgtgcgtccggtgcacaccgtgaccctgctgctgggcgacaaagttattccggctaccattctgggcattcagtccgatcgcgtgattcgcggccaccgctttatgggcgagccggaattcactatcgacaatgccgatcagtatccggaaattctgcgtgagcgcgggaaagtcatcgccgattacgaagaacgtaaggcgaagattaaagccgatgccgaagaagcggcgcgtaagattggcggtaacgctgacttaagcgaaagcctgttggaagaagtggcttcgctggtggaatggccggttgtgctgaccgcaaaattcgaagagaaattccttgcggtgccgtctgaagcgctggtttacaccatgaaaggtgaccagaaatacttcccggtgtatgcgaacgacggcaaactgctgccgaactttatcttcgttgccaatatcgaatcgaaagatccgcagcaaattatctctggtaacgagaaagtcgttcgtccacgtttggcggatgccgagttcttcttcaacaccgaccgtaaaaaacgtctggaagataacctgccgcgcctgcaaaccgtgttgtttcagcaacagctgggtacactgcgcgacaaaactgaccgcatccaggcgctggctggctggattgctgaacagattggcgctgacgttaaccacgcaacccgtgcgggcctgctgtccaagtgcgacctgatgaccaacatggtcttcgagttcaccgacacccagggcgttatggggatgcactacgcgcgttacgatggcgaagcggaagatgttgcagtggcgctgaacgagcagtatcagccgcgctttgccggtgatgacctgccgtctaacccggtagcctgtgcgctggcgattgctgacaagatggatactctggcgggtatcttcggtatcggccagcatccgaaaggcgacaaagacccgtttgcgttgcgtcgtgccgcacttggcgtactgcgtattatcgttgagaagaacctcaaccttgatctgcaaacgctgaccgaagaagcagtgcgtctgtatggcgataagctgactaatgccaacgtggttgatgatgttatcgactttatgctcggtcgcttccgcgcctggtatcaggacgaaggttacaccgttgacaccatccaggcggtactggcgcgtcgtccgactcgtccggcagatttcgatgcccgtatgaaggcggtatcgcacttccgtaccctggatgcagctgctgcactggcggcggcgaacaaacgtgtatctaacattctggcgaagtctgacgaagtgctgagcgatcgcgtgaatgcttctactctgaaagagccggaagaaattaaactggcgatgcaggtggttgtgctgcgcgataaactggagccgtactttgctgaaggtcgttaccaggatgcgctggtcgaactggctgagctgcgtgaaccggttgatgccttcttcgataaagtgatggtcatggttgatgacaaagaattgcgtatcaaccgtttgaccatgctggagaaactgcgcgaactgctgtctcttatacacatctga

SEQ ID NO: 31296 - DNA, 360 bp, Escherichia coli
atgaaaacatggttaatggggttcagcgagttcctgttgcgctataaacttgtctggagtgaaacatggaaaatccggaaacaattagatactccggtacgtgaaaaggacgaaaatgaattcttacccgctcatctggaattaattgaaacgccggtatccagacggccgcgtctggttgcttattttattatgggatttctggttattgctgtcattttatctgttttaggtcaggtggaaattgttgccactgcaaatgggaaattaacactaagtgggcgcagcaaagaaattaaacctaggagagtcagtccggaaaggggatgtgttattaaagcttacagcactgggagctga

SEQ ID NO: 31297 - DNA, 1752 bp, Escherichia coli
atgattcaggacgcttttgtgcgccagcgtgcgcgacaactttactggcagggttatccgcccgcagaaatatcacgtctgatgggaataaacccgaacacgatttatgcgtggaaaaaacgcgaccagtgggatgaaacgccacccgtgcagcgtgtcacgcaatccattgatgcgcgcctcatccagcttactgaaaaacagaataaaacaggcggtgactttaaggaaatagacctgctgacccggcagcttaaaaagctgcatgatggccagccggatgcggcggccacaggaaagaaaggccgggcgaaaaaacttaaaaatcatttcacgccggagcagattgccgcactgcgggaaaaaatcatcagcaggctggagtggcatcagcggggctggtttgactccctgaccctttgcagtgaagccgggatacgtaacaggatgatcctgaaatcccgacagattggggcgacctggtattttgcacaggaagcactgctgatggcgctgcgtgacgatgtggcacaaccttaccagcgtaaccagatttttttgtctgcgtcgcgtcgtcaggcgttccagtttaaaagcattattcagaaggccgcggctgaagttgatgtggagctgaaagggggcgataaaatcatcctctccaacggcgcagaactgcattttctcggtacttctgctgcgacggcacagtcctacacaggcaatttttattttgatgaatttttctgggtcagtcgctttgctgaactgcgcaaggtggctggcgctatggcaaccctcagcggactgcggcgcacctacttctccacgccatccaccgaaacgcacgaggcatacgtctattggaacggcgaccgctggaacgagaaaaaggccgcgcataaacgccagcgtttttctgtggactggaaaacgctgcataacggacttatctgccccgaccggacgtggcggcaaattgtcacgctggaagatgtggttaatcacggctggaaacacaccgatattgatgaaattcgtgatgaaaacaccgaagacgagttccgcaatctctatatgtgtgagtttgtccgcgaaggggaatcggcatttaacctgaatatcctgattggctgtggtgttgacggatacgacgactggaaagactggaaaccttttgctccccgcccgatgggaaatcgtccggtatggattggatatgacgcaaacggcagcagtggcaacggcgacagcggcgctgtgtccgtggtggttcctccggctgttcctggtggccgttttcgaacggtggagacgcgacgcgttcaggggctggagtttgaagaacaggccagagtcattgaagagttcacgtgtcgctacaacgtggaacacatcggcattgatgcgactggcgggcacggggatgccgtttatcagatagtgaaacggtttttccctgctgctattccgtacaccttcacgctgtcatcaaaacggtcgctggtactgaaaatgctgcaaataatgcgtgccgggcggtgggaatacgatcgtgccgaacgcgagctggtcgcggcctttaacgccgtgcgtaaggtgaaaacaccgggcggctttatcacttacgaaacggaccgagcgagggggatcagccacggcgaccttgcgtgggcaaccatgcttgctgtcattaacgaaccaattggcggcgaaggagaaaacgagcgtttcacggttatggagttctga

SEQ ID NO: 31298 - DNA, 444 bp, Escherichia coli
atgcactcaggaaagaatcgtcgctcagtgcattcacttttgatggtccttatcgcctggccgggcatgatttgctggacaatatgtactgtgctgataacgggcggtggtatgaaaccccggtggactggtacggtctggcaagagccgcccggcaaacgtcctggcatcagtctgcgctttactttaagcgcaatgtattgctcggttgctacatcccgaacccgctgctttcccggcaggatttctcggcgctggcgctggactggtttgtgttcggtaacgcattccttgagcttcggagcaatatgctcggcgaaccgcttaaattacggcacgccctggcgaaatacatgcgacgcggaagcgatcttgaatcatggtggtatgtgcaggatggcaaggacgcgtttcagtttcgccctggtaaagtgtgccatctga

SEQ ID NO: 31299 - DNA, 405 bp, Escherichia coli; identical to SEQ ID NO: 12456

SEQ ID NO: 31300 - DNA, 819 bp, Escherichia coli
gtgcatccccgtagtgccgacaatattgataatctgaaaaggtccgcagagtatataaaagaggtctttgtcagtagcggtgccagagttaccgcgcaggacgtccccattacgggtggcccctacaaaaacattgttgctgattatggtcctgccgatggaccgctgattattattggtgcgcactatgactctgccagcagttatgaaaacgatcaattgacctatacgccgggcgcggatgataacgccagcggcgtggcaggattactcgaactggcacgtttgttacagcagcaagtaccgaaaactggcgtgcagctggtcgcctatgcgtcggaagaaccgcccttctttcgtagcgatgaaatggggagcgcggtacatgcagcttcgcttgagcgtccagtgagattaatgatagcgctggagatgattggctattacgactctgcgcctggtagtcagaattacccttacccggcaatgtcctggctttatcccgatcggggagactttattgccgtggtaggcagaatgcaggatatcaacgccgttcgtcagctaaaagcggcattgttgtcatctcaggatttatctgtttattctatgaatgccccagggtttattcccggtattgatttctctgatcaccttaattattggcaacacgatattcccgccgtaatgattaccgacaccgctttttatcgtaataaacaataccacttgcccggtgataccgcagacagattgaattatcagaaaatggctcaggtagtggatggggttataactttgttatacaacagtaaataa

SEQ ID NO: 31301 - DNA, 297 bp, Escherichia coli
atgtatggcgatacggcgatcgtcgtgtattccggacagtacgtggaaaacgacgtcaaaaagaacttccttccggacaacacgatggtgctggggaacactcaggcacgcggtctgcgcacctatggctgcattcaggatgcggacgcacagcgcgaaggtattaacgcttctgcccgctacccgaaaaactgggtgaccaccggcgatccggcgcgtgagttcaccatgattcagtcagcaccgctgatgctgctggctgaccctgatgcgttcgtgtccgtacaactggcgtaa

SEQ ID NO: 31302 - DNA, 396 bp, Escherichia coli
atgacgaaagatgaactgattgcccgtcttcaggtgctgggtgagcaactgaaccgtgatgtcagcctgacggggacgaaagaagaactggtgctccgtgtggcagagctggaagaggagcttgatgacacggatgacgctgccggtcaggacacatctgtcagcccggaaaatgcgctgaccggacatgaaaatgaggttgtatcagcgcagccggataccgtgactgatacggctgatctggtcacggttgtggcactggtgacgctgcatactgatgcacttcacgccacgcgggatgaggctgtggcatttgtgctgccgggaacggcgttccgtgtctctgccggtgtggcagctgaaatgacagaacgtggcctggccagaatgcaataa

SEQ ID NO: 31303 - DNA, 273 bp, Escherichia coli
ttgctgaatatacgcgagagcgtgctgttgctcggctctatgtctgaaatgcatttttttttactgataggtatttcttctattcacagtgacagggtcattctggctatgaaggactatctggtaggtgggcactcccgtaaggaggtctgcgagaaataccagatgaataatgggtatttcagtacaacactggggagacttatacggctgaatgctcttgcagcaaggcttgcaccttattatacagatgagtcatcggcatttgactaa

SEQ ID NO: 31304 - DNA, 222 bp, Escherichia coli
atgaagaatgaaatactggaatttctgaacaggcatgatggagggaaaacggcagaaattgcggaggcgctggcagtaacggattaccaggcccgctattacctgttattactggaaaaagcaggtatggttcagcgctcaccattaagacggggcatggcaacatactggcttctgaaaggagagaagcaggcggggcagagttgttcttccacaacttaa

SEQ ID NO: 31305 - DNA, 378 bp, Escherichia coli
atgccaacaggcggctgcaccgttgatagtcgtaatgtcaacgtgaatctcccggactttcctggaagcgcagaaataccccttggcgtatattgctcaagtgaacaaaagctctcattttatctttcgggtgctaccactgacagtgccagacaagtgtttgctaacacagcaccagatgcaacaaaagcatcgggagtgggtgtctctctgatgcgtaatggaaaaatactggctacgggagaaaacgtctccctggggacagtaaataaaagcaaagtacctctgggtttaagcgcaacctatggacaaacaggaaacaaagtttcagccggaaccgtccagtcagtcattggtgtcacttttatctatgaataa

SEQ ID NO: 31306 - DNA, 540 bp, Escherichia coli
atgaaaggcttcccaattgcacatatttttcacccttcaatcccgccaatgcacgcagtggttaacaatcacaacagaaatattgattattggacggtaaaaagaaagtttgcagaaattgtctccaccaatgacgttaataaaatatacagtataagtaatgaactgcggagagtattatctgcaattactgcattgaacttctatcaaggcgatgttccttctgtcatgattcgaatccaaccggaaaatatgagtccattcatcatagatatttctacaggagaacatgacgattatatcatacaaacattagatgtaggcacttttgcaccttttggcgaacaatgtacttgctcagccgtcaataaaaaagagctggagtgtattaaggagacgatttctaagtattgtgcaaaattcacccgaaaagaagccatcttaaccccccctacgtactttaataaaaccgccattccttcagattgttggcaaattctctttttttcaccagatcattttaataatgatttttattga

SEQ ID NO: 31307 - DNA, 783 bp, Escherichia coli
atgtcaattgactttaccccaggtataataaatacatatcacggcgatatttataactgcacaacaaataccgataatgctaaaacgccagacacaccgaagtggccttgcgataatttggaagaacaacaacccattaattccacattctctggagaaggatatacctctgatcaatatgatttagcgcaacaccaacttcaacaaattaatgcgtgccacacgaacactacatatacaaatgcagaatactcaaaagttgtgactcaacttgtaagtcttattactaacattgaaacgataagttcgacaccacttacgcaacagacacaatcaatacttaatcagattaataacattagatacgaaaaaaacaaaagtgctgaatgtcgaatcattgttgtcgctaatcctaaacccgacaaggcaatcataactaaaattagcgtagaagagggaataccagtaagattcagtgtccaaaccatgttttcagatactaattttattgctgaacaacgagctgacttaccgactaatataaaagatattcaaaacctgtatcaaaaaatgacgaagttatatattgagcacagtgaaaataaaaacaggatgaaagtctttgccggaaccaactttattgatttcaatatgacaggacagaacctgtccgggttcgttctaaccttgtcaaggttttatttcgaagatctacttaatataaatttcactgacgcaaatttaggtgacactattttttcacataaagaacggctttgttga

SEQ ID NO: 31308 - DNA, 678 bp, Escherichia coli
atgtatgaatcagtatcgctgtcggcatcatttttaaatccaatctttgcccagtcagtattccgaatccaggcaaggattgagtcgttttcaaaagtaagcccaccggacaagatatcgcctgtcttttggacggcgttaccagccttgtttaccgtttcctgtaaaccgaggtattcgataacagcggcaacggtcgatttcgcaagaatatcccgcccgacttctgtcagggttgccagactggcaacatcattccccgtaaaatacggaaacctgtctgccgcagtagcaagcccggccagcgccgtcagggtggcatctttcggttgcttacccgcaagcgcgttagtcatggtggtcgcaaaattcgggtcgttgcccagcgccgccgccagctcgttcagcgtgttcagtgcgtcaggtgacgaatctacaagtgcggcaatcgcggccataacgaaagccgtgcttgcgatttgggtattattcgttccctgtcgtgcagttggtgttgttggcgttccggtcagtgccgggctgtttaatggggctttcttgttcgtttcatccattaccgccttaaccgcttttggtgtcgctgccagcgtttcagacgtgctgttggttgcactgctgagctggactatcccttttcgtgccgtcgtggcgtcctga

SEQ ID NO: 31309 - DNA, 459 bp, Escherichia coli
atgatcttcagcgcattaaaagaaatatatgatggagatcctggttttatcttcgataagatatcacaaaaactcagacatacgataacggaatttgatgagaatgggaaaagcgaaccaacggacttatttacctggtacggtaaagataaaaaaggcgattctctcgctattgtaattaaaaataaaaacggaaatgattacttatctctcggttactatgatcaggacgactaccacattcaaagaggaattcgtattaatggtgatagtctcacccaatattgtagtgaaaaagccaggaatgcttcagcgtggtttgaaagcagtaaagctatcatggcagaatcatttgcaacaggttccgatcatcaggttgtaaacgagctcaacggggaaagactgagagagccaaacgaagtttttaaacgtttaggtctgtctcttatacacatctga

SEQ ID NO: 31310 - DNA, 171 bp, Escherichia coli
atgagcaatttcatcaacaatgtaagtgcctttttctgtcagcggttcacctttccagccaatgagaaccgtcaggcgagcgccccgtggcggcaactgcaactgaccatcagcatcatccagcgtgatggtgagctggtctgcttcaaatccccggttgtcggtcagtga

SEQ ID NO: 31311 - DNA, 240 bp, Escherichia coli; identical to SEQ ID NO: 12480

SEQ ID NO: 31312 - DNA, 240 bp, Escherichia coli; identical to SEQ ID NO: 12481

SEQ ID NO: 31313 - DNA, 432 bp, Escherichia coli
ttgacaacagacagcatgattacattgatcggtacagtagttaccttgggcggagcaggcataaccatttggcagtctaaagaagcccgtaactataaaaaccaattaaaattcgatgtcaggaagatcaacttaacaaacgtatctgagcgtttgaagcgagcacaagacgaaataagacgccttcctacatccttgcaaggtattcagaggggaacgaaacccagtgatctgattcacaaaacaaaagagtatttcgatattgctttaggaactcttgacgcaaaaggcccagatgctgatatccgccaacttctcgttgaggcacaaaaaaacttaactcttacgaaacaggttggcattcaggcactccaaacccgcaagatgttcatgatctacaagcaaagattcaagatgcgatatctgcgatga

SEQ ID NO: 31314 - DNA, 567 bp, Escherichia coli
atgctgattgttcaatcttatgttgtactttccggtttgttgctcccagctgctgatgtcgctattattgctgtgtctgatagaatatccttggttataaatttatttgcaatgtcaattagcacaattctggcacctaaggtcgccagtttatacagccaaagtaaaatgaatgaaataaaagagctaactaaaaaagctatgttcttcataatgataccatgtgttttaatggctcttctgtttccctttttttcagggctgatattatctatatttggtgttcaatacagtaatgctagcgaagtgttaattattttagttatgacgcagattattaatgcaatattttgccctgtatatgtttttttaaatatgagtgatcggcaaggttttataagtaaattgcatatatatatgcttataccgtctcttgttataacattttatctgactaacatatttggtgttgttggaatagctgtgtctaagttaattgtcgtgtcattgattaatataatcccattgatttactgtattttattgtttaatcgagtgataaagtga

SEQ ID NO: 31315 - DNA, 3105 bp, Escherichia coli
atgagtaagtacaacgaattagttaagaagctaaaagaaatttttcagattgatcgaccagaactggatttcggtatttatcgtattttaaatgcgcgtgctgatgaaattaacgactatctggataataagctgaaggccaaaatccagtctgcgctggcggatgcaggaaatgccaataaatcagaattagaacatcagttgcaactgacaataaaagcggcaactgatgcgggtgtagaccctgctgatagcccaaaagtacaggagcttaaaaagcaactggcggctatggcatccggagcaaatgagcatgaaaatgcagtattttcccatctgctcactttcttttcgcgttattatgacaacggcgattttatcagcaaacgccgttataaaggtaatacctacgccatcccctattctggcgaagaagtgatgttgcactgggcaaataaggaccagtactacattaaaagcggtgaaaacttcgctaattattcgttcaaattagaagacggtcgtaaagttagctttaaattgctcgcagcggacacagcaaaagataaccgtaaagataatgaattagatcgctgctttgtacttattgagccacatgttcgtaccaaaattgatgaagaaggcgatgagtacgaacaagaatataagccagtagaagtggtgaaaaactcatctgtggtggacggtaaactcgttgaaacagaagagttagttattcacttcgaatataaggcaatgaaaaagggcactaagcaggatgctttagtacagtccgccatttcaacaattctggcagataaaacagttcaacagcattgggttgatcttgctaaacgtgcgccaacagaaaagaatccgtcacgtacagagttggagcgtcaccttacaacttatacccagcgtaatacagcagactactttatccataaagatctcggtggttttttaacgaacgaactggatttttatattaaaaatgaagtaatgaatctcgataatgtgcaaaatgcagaagtgtttgccaatgttgagaaacaattgcgcatgattcaatgtttgcgtgctgttgcgctggaactcattacatttttggcacaaattgagaatttccagaaaaaactttggactaagaagaagtttgttgttgggcatgagtatcttgtgtcactttcaaatctatcagattcgctttacgataaaattcgaactaataaagggcaacatgatgaatgggttgagctttatgctgtaaataaaattcctggatattcatttccattcacaaaagatttcttgtataaaaataatggtatgatattggatacaaaatattttgatccgtcatttaaggaggtttttttaacagagttaactaatgttgacgataatttagatggtctcttaattaattcagataattaccaggccattaattttttggaggggcggtataaggactcaatagactgtctttatattgatcctccgtataatactgcggcttcagaaattttatataaaaatgaatataagcacagcagctggaattcattaatgtatgaaaggatatctaaaagctataatttactgaaaatttctgcaattaattttaccgcgatagatcatgcggaattatataatcttggtaagatcaaggatgaaatctatggagaacaaaacaggatagcagttgttactgttcagcataatcctaaagggcgtaaccaggcaaagttcttttctgaaaatactgagtatatgttagtatatgctaaagattttaatgctgctaactttaactctgtagctatcgatgaggatgtgcttttaacattcacagaacaagataatataggccgttatcgttgggaaaactttattcgtgcaagaacaagttggtccagagcaaatagaccaaataactggtatcctttatacgtctcttccgacttaaaatcaatttctgttgattatgtagatgggtatatcgaagtatatcctacaactaaacagggggatttttcgtggaaaaatattaaagaatcatttgttgaattaaataaagataattattttaaagctgtaaatgaaaatggagaaataaaaatctatcataaatatagggagcagcaagtctttaaaaatctttggattgataagaaatatcagtctgagtttaatggtacaaatttactgaaaaacatacttggacaatcactatttgattatccgaaatcattatatgcagtacaagatgcaatcaaaatgtcgacaccacacaatggtattgtattggactattttgcaggttcagggacaacttctcatgcagtaataaaccttaataattcagataatctctgtatgaaatttatcaatgttgaaatgggtactcatttcaatacagtagttattccaagattgaagaaaattggatattcaaacttatggaaacaatgtaaaccaatcggtaaacctcaaaaaatgactatcaagtatttgaaacttgaaagttatgaggatgctcttaataatatacaattacgaagttattcattgcatcaggatattttcgacattttggtggaagatgtaaaatcagagtttgctcttaaatatatttttgaaaatgaattattttattcactattaaatactgataatttcaaaaaaccatttaactacgaaatggatattgcgacggattccgccggtgccactgagcgtaaaaacatcgatttagttgaaactttcaattatctcattggcttacatgtgaaatccatcgaatctgatatcgcacgtggctatgtgcgtattgaaggaacgctgccaacaggcgagcgtacccttattctgtggcgcgattgcgacaagatcggttatgaagaattgaataaatatgccaaccgatttgatttgtatgcaaaagaaaacacgttcgacgttatctacatcaatggcgatcataacttacctaccgcctttaccgttgatgaagaagacggcgagattgttcgtagcctgaaaattcgccagatcgaacctgaattcttgaacctgatgtttgcggaggaggtttaa

SEQ ID NO: 31316 - DNA, 510 bp, Escherichia coli
gtggatcagggtaacaaccattttgatgttgtcgcccggcattaccatctctacaccttccggcagttcgatggtaccagtcacgtcagtagtacggaagtagaactgcggacggtagcctttgaagaacggagtatgacgaccgccttcatctttggacagaatgtacacttcagattcgaacttggtgtgcggcttgatggtgcccggcttagccagtacctgaccacgttcgatttcttcacgtttgataccacgcagcagaacacctacgttctcaccagcacggccttcgtccagcagtttgcggaacatttcaacgccagtacaggtagacttctgagtctctttgataccaacgatttcaacttcttcaccaactttgatgataccgcgttctacacgaccggtaacaacggtaccacgaccggagatggagaatacgtcttcgatcggcagcaggaacggcttgtcaatcgcacgctctggttccggaatgtaggaatctag

SEQ ID NO: 31317 - DNA, 528 bp, Escherichia coli
gtggcggacgcgctaccggaagcggtattacgtcgttcgctggggttgcgtgcggaaaaaatccgctcaatgtaccgtgaaagcgacatcgtaccgggagagcagaccgccaccagcatactgaagcagcgcacaaaaaatcttgcgccgctgcctcacgcccaccagcaacagaacccgccacaggaagagacggtggtcagcattgccgttgatcctgagtctccggaatctttcatgaaacgacctaaacgtcgccgctgggttaacgagaaatacacacgctgggtgaagacacagccgtgtgcgtgttgtggtaagccagccgacgatccccatcacctgattggttatggtcagggcggaatggggacaaaatctcacgatattttcacgctaccgctgtgtcgggagcatcacaacgagcttcatgcggatcctctggcgttcgaagaaaagcatggttctcaggttgatttaatttttcgttttcttgatcacgcctttgcaactggcgtgcttgggtaa

SEQ ID NO: 31318 - DNA, 177 bp, Escherichia coli
atgtcagactatcaaatgtttgaagtacaggtgagccaggttgaaacgcttaccgaacaggtgaaacgcttcacgctggtggcaaccgatggcaaaccattacctgcgtttaccggaggaagtcacatcattgtgcagatgagcgatggtgataaccagtacagcaatgcttattaa

SEQ ID NO: 31319 - DNA, 234 bp, Escherichia coli
atggctacggtgctgaaaaaacgtattcgcttgcaaggatttattatcgctcaggattatggtcaccgcatccatgagtttcagaaggagatggggcaatgggtgaaagaggataaaatccactaccgcgaagaaattactgacggtttagagaatgcgccacagacatttatcggcctgctgaagggtaaaaacttcggcaaagtggtgatccgcgtggcgggtgatgattaa

SEQ ID NO: 31320 - DNA, 1311 bp, Escherichia coli
atgaaagcgatcttgatcccatttttatctcttctgattccgttaaccccgcaatctgcattcgctcagagtgagccggagctgaagctggaaagtgtggtgattgtcagtcgtcatggtgtgcgtgcaccaaccaaggccacgcaactgatgcaggatgtcaccccagacgcatggccaacctggccagtaaaactgggttggctgacaccgcgcggtggtgagctgatcgcctatctcggacattaccaacgccagcgtctggtagccgacggattgctgacgaaaaagggctgcccgcagcctggtcaggtcgcgattattgctgatgtcgacgagcgtacccgtaaaacaggcgaagccttcgccgccgggctggcacctgactgtgcaataagcgtacatacccaggcagatacctccagtcccgatccgttatttaatcctctaaaaactggcgtttgccaactggataacgcgaacgtgactgacgcgatcctcagcagggcaggagggtcaattgctgactttaccgggcatcggcaaacggcgtttcgtgaactggaacgggtgcttaatttcccgcaatcaaacttgtgccttaaccgtgagaaacaggacgaaagctgttcattaacgcaggcattaccatcggaactcaaggtgagcgccgacaatgtctcattaaccggtgcggtaagcctcgcatcaatgctgacggagatatttctcctgcaacaagcacagggaatgccggagccggggtggggaaggatcaccgattcacaccagtggaacaccttgctaagcctgcataacgcgcagttttatttgctacaacgcacgccagaggttgcccgcagtcgtgccaccccgttgttggatttgatcatgacagcgttgatgccccatccaccgcaaaaacaggtgtatggtgtgacattacccacttcagtgctgtttatcgccggacacgatactaatctggcaaatctcggcggcgcactggagctcaactggacgcttccaggtcagccggataacacaccgccaggtggtgaactggtgtttgaacgctggcgtcggctaagcgataacagccattggattcaggtttcgctggtcttccagactttacagcagatgcgtgataaaacgccgctatcattaaatacgccgcccggagaggtgaaactgaccctggcaggatgtgaagagcgaaacgcgcagggcatgtgttcgttggccggttttacgcaaatcgtgaatgaagcacgcataccggcgtgcgctctccatcaagacaaataa

SEQ ID NO: 31321 - DNA, 270 bp, Escherichia coli
gtgggggccctgccagctaagctttttctaacaaaatctatgtatttcaatgcactaaaaagcggtggggcaatgattttgtatcaccaaaagtatacactggcaagccgttttctcatgcgacagacacaaaaaaaccggggctgccccggctttgtatggcttttgaccaaactccatctaagctacattttccactaccatgtaggatcgcccaacctcttcaatcagtggctggaggttcttatcgctgcctttgactgtaaatag

SEQ ID NO: 31322 - DNA, 723 bp, Escherichia coli
atggcgagaactaagggtgctgtagcaaaaggggttgataatacagctgtacgcattttcttacgagggtatggctctttgggggagttgccacgcattgtggaagattgtatctgcggtgcattggggcaggaagaagagacaagaaggttcaagggtgagcgaattcttgcaatcttagaacaactggatcatatcgatacgccaacagtacatcggcagatgtgggattataatatttctcaaggtaaaaatactgagccatccaaacggaacacggaacgcatgacaagggttctaagatgtgcttccagggcactgtatcatcatttgaaattgtgtaacggattgtcgcgtgaagacgaggttgtccagatttcgactcccgatctcacggtagatgagatcgaacatgcccgtcgtttggctctggcaggtaaaattgaagagttcacacaatttgtgaactcttgccggagcgtgatcaaaaactatgagccgccagtgttcaagtacacaggggaaaatgtggtcgctttatcttcttgtacggaggtatctttaaggactgcggttagtcatccgtattatggttatgttaaaaaagccgtaaaagatgaacagccagaagacctatttacagtcaaaggcagcgataagaacctccagccactgattgaagaggttgggcgatcctacatggtagtggaaaatgtagcttag

SEQ ID NO: 31323 - DNA, 933 bp, Escherichia coli
atggctggtgctatttcattagtaaaaaaccccttaactattattgcaatgtttgctgggctagcagaggtaagcggtacagcaatactcccatggatatccgagccaaatcaaaaaatatatatattttttctaatgttcttccctacattcttagttagtctattttttttcactctccataagaagccggagtccctttatgctcccagtgattttgcggatgagaaaaactatatgactttgataggtctgcagggtatatccattacctccccattagataaaaatgatgtgccaaacgtatctatattagaagaggaaatgactcctaaaaataatgagtttgctggtaaagatgaaaacagtcgacaagaaagtgagtcctctaaacaagatgacaaatatttctcggtaggcaccattatcccatcattaaagacctcccccttgaattctgtctctgagactgttgacaagaaggagaaaatgcttaaaaaactcggtaatgaagtatcatatatggcttttcaatatgctgaatctaagcttgatgtaagttttgatgttgacaaaaccgagatgagaaatgaattcggttatcacaattttgatggcgcttattaccctccaatttccaatggagttttaactggtgaaattattttcttggaaatcgatgtgtttagtccgctgaagagcgctaatattcttagcaccctagatttgatcaacgagagctggaggcattttaaaggctttagagtctatattgtctatgtaatcacggcaaaaaattataatgaagcgaactcattcatgaagctgatttcaaaaatcaagcgtaaagccaatttcccaattgagatagatatcattacagtagatgaactaaaatacaaattcggaaaagagaaaaatgccaacaaataa

SEQ ID NO: 31324 - DNA, 705 bp, Escherichia coli
atgtacaactatatcttaaaaaaagaatctttatttgtagcgggcctgacggcagctttttatgccgccgtatatttttatgaaaggggggtcgccagtgagctgaatataccgttggatttaataactctcagcattcccacgataagcaatgacattatgagtatatgtcttttttcatttcctttattgacgatatccactgcttttcttatatgggcgaaggatgataaacataaaagagccgctgcacatttagggataagcgtagtatatgtggccggtgcatattccatgctaaacattccactcgacattctgctgctttttgtttttaatgcgctcgttcttttacacttgctgagccagtggatacctatccatgttgaaaagaaaaatgcttcctttgatagagggaatatcagagagtttggtattcaggctctcaacggtgcagccattgctttcttcttttcccttacctttataggactgggtagatcatctgttcacggcaacgaattcacagtatttatcatgaataataaagaatatgcaatagcaaaagtgtatgacgaaaatgtttttacatggaacgtggttaacgggaaagtgattcatcagctgacttactttcgcatggagaatattaatgggttggagttcaaacagaagagcttaaaaaacgatatgaaaacaaaatga

SEQ ID NO: 31325 - DNA, 1302 bp, Escherichia coli
atgaggtacaaaactcttccatacacgtttcaaagaaacggtaattactatctacagattcggctttcgaatggtcggatgtataaaaaatcacttctcactgacagctatcgtgaagtctctgctttgatgattggtgttgctccgtacattccttttgttaaatcattagccatcacaatcccgatgtttgatgcctttgtttcaaacctgattatgtcaaaacttagggctgtaaaagttccgctgctatcacatcagtcggtaattacccctgctacattcgaggaaccagcgacacaagccgaaccgcaaaacatgctaactctttctgatgcgtgggctatgtataaagcggaaaagggtaaaacatggacaaagtcgatctcaagggcgaatgagcgttacatggaagtcttgatggttgtcttgggagagacaactgacgtagttgcgatttctaagcaggacatcaagcaggtgatggaagttgttgagaatttgcctaagcgtgttgtccaaccgtatcgctcaatgaacatccagcaactgattgaatgtgatgatgtatcaccgaatgagttagtaggagtggaagccattcataagcatctcaaaatctacaaatcgcttttcaagacttttctaacagaaaacaaagatattttgattaaatccccaactgatggggtagtagcagcaccatctaaagcaaggtttggagcatacagttcggcggagatgaagaagtttgtagagtgggcacttaagcagccagatggctggcagaagtggataacattgttgttggcatacacaggagccagaaggggagaaattgccaaactggaaaaatcacaaataaaatatgatgaggatagccatcggtattatttcctgattgcagaaggagggcaggggaaaaccgaaaatgctacccgacaagtagtgatacaccctaagttgatcgaatggggtttcatggaatacgttgatcgccagtggaaagaacggattttttcagaagtggctggtacaaacatgacgaagatcggtaaagaatttgctgatgtgcgtgaccagcttgacattccgtacttagacgattttggacagcggaggcttttgcatagcattcgtcattctgtttgctctactgcgatggctggatgggtaaagaacatcttgcatctgcaacaaacagtaggccatgagaaaagtggagggatcactaaacgctacttacatacgttcccactatcatcaatttgttatgttattgatgggattagttgggtctga

SEQ ID NO: 31326 - DNA, 645 bp, Escherichia coli
atgaattttccgggcccagcatcaactgcttcttatttaagatctaattacagcagagatttcttgactattcagtgtggtgaatacacatacggaaaaccaagaattgagattgggatgcatgacgacaagcgaattctttcaattggtgaatattgctctatagctttcgacgttgtgatttttgttggaagacaaggtcgtcatgcgacaaatacattaacaagttacccgctaaatatggttgtagatcctgagttaagaaatggatttaaccctacaggacatatatggcaggcgagctctgacatatttgggaaagatcttgatgttatcatagggcatgatgtatggattggttctagatgtacaattttagcaggggttaatattggaactggtgccatcattgccgcaggttctgttgttactaaagatgtaccgccatatgcaattgtaggaggagtaccagctaaggttattagatacagacatcctccagaaataattgatagattattaaagactgaatggtggaagttaaaacctaatgagctgtggaatttgattggttcatctttcgggacgtctaatattgaaatcccattaaaaatattagaaaacagaagcgcttcagaaaaataa

SEQ ID NO: 31327 - DNA, 1311 bp, Escherichia coli
ttgcaatctttacttggagaaaacttacaacaacgaatcagtaagataattaaaaaaagtgacatcaatgaaataaatcgtcacttaaatgactttgttgatcaactatcatataagcttgatgggcagtatcaattcaaaagaccgacgcaacggcagaattcatttactcaacgccacatgatttctaaaatcatcgaaacttactttagtgacaaaattcttcattatattgacaatatcaatagggatacacctgtccacaatcttagttctggtgaaaaaaggaaggcattacttgatttagccataggttttttaaaagacaatcccaaaaaaactcaacaagctacaatattagctgtcgatgaaccagagttatctttacatgcgacatcttgctttaaacaatttgagaagattaaaaaaataagtgaaataggcattcaaaccatatgtactactcattggtatggttttcttcctgcagcaatgagcggtagtgccacttatgtttctccaaatcaagcattgataaaatgccttaaccttgagtattatcgagatgaattgtcgacccttgttaaagaatctaaaggctcatatttagatactttagaagtgaaaagcaatcatgatcttgttcaatccataataacttcaattacatcacaaaataattataattggatattgtgcgaaggacgtacagataaattatacattgaatcccatcttaaatttgaaaatttagaaaataaaaatataattgtattaagtgttggggggtcatttgcactcaaagatatttactcatatcttatcttagctttaaaagacagaaagccggcaataaaaggaaaagtcttttgtttattggatacagatcaatcgtatgataaatttgatacttcagacagcatatcgcaagtcagaatcagaagactgctgctacgcgatgatttaagtgatgctgacttactaaaaaccaccgacaatagagtttctccaccaactgaaattgaagatgtattatctgggattattttccacaaaacattacatcgactttataagaaaggtgataatagattctcatttatagagaacattaacacattaccgtccaatgttgcagctggaatattagatctgacaactagccaaaaattaataataaaaagatattttgaggaatctggaaataaaactaaattttgtcaagaatacaccaatgctctttttgatattaatgaaaaatatacgccttcatggctgacagaaattataagcttttttaactcaaaatga

SEQ ID NO: 31328 - DNA, 873 bp, Escherichia coli
atggaacagagaaaactatatgcttacttaaatttaaataatccaattgttgcctgggaggttgcaataggaagaattgaatcaatttgctataaaagtgagtttggagtatctatttggttctacaatctagtaaggaaatacttatcagataatcacaatgaaaaattacaaaatgagttagctcttgaaaaggttcgctcagacaatttcagagataaggtttcccgcctaaccggaatatacctattcaaaacaaaagaaatggctgaaatagcaatcgaccgttggagtttaaatcaaaactataaaaatactattgcagaaattgattttcatggtttgaactttacagaggtggattcagagtggatcactgattatctcggctctccacttgagcaaaatgcgccctggatgcacaactattggtctggagtaactcgcggggaaaatccattaaccgaagttttggccagtggcattggatatatcaacgataaaaaaatcagaagcatggctatcaaaaaactatatgaaaaatgggctacttcatctttgttatttaatgcagcgattgccggtttttctactggagaaatggatcagatatgtcgtgtcaaaccagcgatactacgtgaagatgacgggacactatctggagaaatttttattgacatgaatgaattcaatcgaaatcagaaaaaaatagtagccgctttaaagaaaatgtatgacaacggatatgaacctcctattgttgtaccgaatgccccaaatgctctctttgcattacctgaccttaaagatatgttttttagtactaaaaacgaagtaactaaaaacctgttcaacttattacacgctagttaa

SEQ ID NO: 31329 - DNA, 897 bp, Escherichia coli
atgagcgaacgtaaatacccgactttttcactacgcgaatttaacaatgcagctgaactttgggatgctctatcaccgacacaaaagatagacccaaactgtaaagataatattatttatagagggcaaggtgatgccaactggagcttgatcccatcagcacttcgtaatccaccgcaatatttaacaagaagaacatcacctacgtcggatgacattgttgcaagcgagataataacattaatgtcttttgtgcatcactgtgacagagtaggtgtccgtatccccggtgatagccctgacttccgcagattgcatttagatataaataatcaagattattggcttataaatccatcatcttggccaaatccagaagttttcgacttaatggctctcgcacagcatcatggcgtgccaacaagattgttagattggactcgaatcccttacatagcgatttactttgcagttagctcctgcattgctaattataaaaactggaatgcatccagtaaattagccatatgggcctttaataaagagtttataaatcttcacccacaaataaaattgcattcaacagcaggttctatcagtccgcacttagcggcgcaatttgggctttttagcgttcatccacatactggcggacgaggacggacagctacaattcatagcctagaggagctttctggggatttcccgcacccggtattctttaaatacacactccccataaaagaagtatacaatgcttaccagcttcttaataaagcagggttcagtgcggctagcatatacccttctgctgacggggcaggaaaagcaatccatgatgagattaacctcgataacgcaagaaatagattgactgagttagaaattagtctctaa

SEQ ID NO: 31330 - DNA, 1131 bp, Escherichia coli
atgtataatgttgtattggatacaaacatactccatgcggaaggtattcactcacgaggtatggcaactcttaaaaagttaatagatgaaggcattgttaaagttcatttgcctgaactagtcgtgagagaattttccacgaaaaaaatcaccgtaataaatgaagcctataataaggcgattaatattttaagaggcactgaacgcgaagcaagaggatccgaagagtcgatactgcgagatattgatgaactaaaaaacatcatagacgacaaagtgaaagtacttgatgaaaaaattaatggtgcagttaggcaatggattcaggattttcgaataaatattatcccgttacatagtgaatttacatcaactgtttttgagaactatttttgtggcaatggtgtttttaaatcgaaaaaatcaagagaagacataccagatgctttcattagcctcagtatcgaaaagttgcatgatgaagtcggtgaattaatggttgtactcaaggatgcgttgtttagaaagcatttgtctggcttggatggggtaaaagtttatgatagcttagatgaacttttccaattgcctaacattagagccagtttagaaaatgaagccgcatcctcttttttgacatcaagtttattcagaacagcgttagaaaacttcttacagcagaaaccgaattatttcgaaggattctatcttgagattactgagggaacagaactgcttgctgattgggttattggtgcacataccgaaatcaacgattatggacaagtaaaggatattacaataagtgatgtaatcagaaaatctgaaagtaactattcagcaaaaatttcttttaaattggactctaatatctcttatgtaacggattacggtgaagtgcttaaaatagagagagataaaaacagaagcgcggattgttggagtatgacaggtgatggcatgtgcgatcttaatgaaaatgtgaatttaaccttggaaggtgacttaagtattacctttcaaggtgatttcaatacattgaaaaaagaagaatccgaaacttatttgaatgaaaatgttattgttatgacaataagtttatatgaggctattatagacaaagttctttga

SEQ ID NO: 31331 - DNA, 501 bp, Escherichia coli
atggaacaggattatatagatcgtggctttggtttatggtcaaaacctggtgtcccgcgtaagggatgggtaaacgtaggagtggaagacctagaagaaagtcgaaaaatttgtgatatgtgtgggaaaacagagataaggtatgtccacataatgtcacatgagaattacccagattacttagaggtagggtgcatatgcgctggtcacttggagaatgattatgattctccaagaaaacgagaaagtgaaattaaaagtcgatcagccaaaagaaaaagatggtgtaacttaccttggaaaatatctaaaaaaaatcaattttacataaaaaaagatggatatagcatcatcattctcgacaagggtgattattttatgggaatgatagttgacgagagaacgcaaattaaatattggactagagaatgtaaagatactaacgaggcgaaattactttcattcgatagaataacagcgctaatggcaagctctaaataa

SEQ ID NO: 31332 - DNA, 225 bp, Escherichia coli
atgtatgcggcagaaaatgaagtggtttatcactttcgttacagaggggagaattattcagtacctgaagatgatttgctctgttgctatccgtcgttgtcgggcgatggtagctactttttcacgctaaaggatggaacctttatacgtggtgaaaaagtacaagaagtgatgcgtataaagacatcacctcttgaacgttatcggcgaaatatttatcggtaa

SEQ ID NO: 31333 - DNA, 879 bp, Escherichia coli
atgcagaatcgtggagggcagcaggtcatagatcggattctgcaggcttacggcttcacttcccgccaagcattctgtaaccacattggtatctcccaaagcacgatggcaaacagatatgcacgtgacacgttccccgcagactgggttgtcatttgtagcatggaaacaggtgttactgtcgaatggttagcatttggcaccgattgcataaacgaaagcgtttcacaccaacatgaactcaatgatgaacatgaaaccaaaaaaatctcgaattgtgataagacggttcgaaaagaaaacatccgaaatgagttcaatataaatccaaataaggggggtaaggcagcaatagaacgccttgtccaagcatatggattcaaaacccggcaagccttagctgaccaccttggtgtctcaaaaagtacattagccaatcgttatatgagggatacttttccctccgactggattatcaagtgtgctttagaaacaggggcatcgctgcggtggctttcgcaatctgaaggtcctatgtttatggatgcaaaatcacaaataacttgtctaaccaaacaaaatattaccaatggtaaactatttaccaacggatatttaatgtttgatcgtacacttttaccaaacgatagtagcaaaatatcaattattgaatttgaaaatgttatttacctaatcaatagcgattttgaagaagtaaacgatggcttatggcttgtagccattgatggtatttattctatacgtaatttaattcgattgcctaacagtcgaattgctttagaaagtaagaataataagatcgaatgtaaaattgatgaaattaacatcatcgccaaagtaataatgacttgtaaataa

SEQ ID NO: 31334 - DNA, 243 bp, Escherichia coli
atgacgatgttttatgcgggtacaccaatcacatgtatctggtgtgataaatcgcgttacatgacctctctgttgtgctggtggttatcacgacgttctgaatctggcttttgtctgatattttgcgacaagtacgcgcgcgtagcatcgacagcatacacattggatattcattttgtgaccaatgcgataagtagcgggataagcattgataaaatcaacaggccgatgatccacttttga

SEQ ID NO: 31335 - DNA, 186 bp, Escherichia coli
atgaagcgagaaattatcaatttcatcaatccaggtaactgctgccctggtcatgacaaatacccatgtgacaaatacaaaaataggcgttcagttcgccaacgcgcactcggtattaaaaaagagcatcgacatgtgagaagaaccgtccgtcaggaattgctattaaatattggtgaggactaa

SEQ ID NO: 31336 - DNA, 468 bp, Escherichia coli
atgtctcacttggacggaattattaaaagattcgagtccagctacaaagttaatgaaacaacaggttgctgggagtctacctattcaaaaaacaaaggaggatacacaaaatttgtagcctttggcgtaacaatgctttctcatcgggttgcttttgagctttatcactcccccattccatctgggaagatggtttgccacaaatgcgataacccatgctgcgttaatcctgaacatctctttttaggtagcgcgcaagaaaacatggacgacaagatagcaaaaggaaggcatcgtggagccaagaaaggtcatgctcatcatggtgcaaaattaacagagtggcaggttatagaaattaggaaaagactctctgaaaaagagagtcagtacaagatagcaaaagacatgggtgtatctcaatcaattataagcaacataaaaactggcaagaggtggagcaaatga

SEQ ID NO: 31337 - DNA, 732 bp, Escherichia coli
atgaaactagatactttttctcaaaggcttacatacgcgatggatcaggctgggtttactcaggcttctcttggcaatgctgttggcatgtctcagccaagcgtctggaaacttacgtctggaaaaacacgcaatacgcgcaaactttttgaaatatcaaaagtgcttggagttcgtacggaatggctttccgatggaactgggccaatgcgtgatgagggagttgaaccttataatccaaaatcttctattcctcatgaaagcacgtggggatatttggacccatgggatggaggaacgcctttaagaggtgatgaagttgaaattccttaccttaaagatattgagtttgcatgcggggatggtcgggtgattgatgaagatcacaacggctttatgttgcgcttctccaaatcaacccttcgcagagttggcgcgaacagtgatggaagcggtgttgtttgttttccggctcgtggcaacagcatggagccaaacattcctgatggaacaacagttgctgttaacaccaacgataagaaaatagttgacggaaagatttacgccattaacgagaacggttggaaacgcattaagattctctttcgatcagggcctgacaaggtaagcattagaagctttaactcactggagtacccacaagaagaaaagaatctaagcgatatcgagatcatcggaagaatcttctggtggtctgtagttgactactaa

SEQ ID NO: 31338 - DNA, 1089 bp, Escherichia coli
atgtcgcatcttatgctttcccgtcacgggatctggtactaccgtagggtctacctgacacctcggaaacgccgtgaaattcgtatttctcttcgcacacgttccaaacgtgaagccttgctccgtgtggagaaatatctcacctcacaacctttccactgcgttccgcagtccatcccggcacacactgcaactccgtctgcttccttccaacaaccacaacagaaaaagcctttcaagagtctgaagagtgagcttgataagtacaccagcgctaaaacaggagaggttggtgaacgagaaatattgacgatcaacaggtgcgtaaatgcatatctgaattctacaaaagagcctttcagcaaaagaagcgcggcggcgtttgttgatggccttgaaggttcagcatccaccagaaaccgttacatcaaaaagaactcggcgtttttcaaatggcttgcaactcgcacggatgatgagattcgaaacccatttgaggggatgggggttaaggaaacaaccgcaccaatggatcgccgtccagcatacacgctcaacgatctgaaacgattgcacattgctttacatggcgtgaaggattggaagcggtggatcattttgattggtcgctattcggggatgaggcagaatgagatctgccagctttaccacaatgacgtgatgaaagttgacggagtttggtgtttccgtgttgataacttgaatccgaatcagacgcttaaaacggacagttcgcgccgattcgttccgatcaattcgcaactgctgacacttggtctacttgatttcatcaaagaaagaaaaggacatctgttccctgagctaacgttgcatcttgggagctatggtcactatttcagccgttggtttacgaggttcagaggcaagcatggcctgcctgaatatcattcactgcggcactatgccgccacaacatttaaacagaatggcttccctgaacagttcgcttcgcaggtactcggacactcgaacgcgacgatcacgtataaccgatacgggaaggggattgctgttaggatgctagtcgagttgatcgaggtactctaa

SEQ ID NO: 31339 - DNA, 954 bp, Escherichia coli
atgccaactcgtagaatcgcttacgcatactacgatcctgattggattaaaggtgagcatacgcttctcgccctcaaaaggaatactgtcgagccgcttgcttattcactgtctatgaaaggatatattttttgtccttcttgctatgaacatataacacgagtgcctgccgatcctgacaagggcatgactacaaatgaagttccggcctattacaaacaccttaaagatgataatgcacctttctgtagtttgagatgtggtcccattcagtacaaaaaatacgcatctcaagaggctgcaaaaaaagctgttgaagatgaagagcttatagttataagcggttttctcgagtctcgtcctgataacaatccaaggctcgattctgagggcagtgaggtacctatcgattcacattttgagaggaaaaatggtaaagaggtttcattgcctatttcccgccatcatgttgagtctttcaaggttccgagccaagtaactagtgtccagtctttatgcgtcaatttcgatcataattattatcgtgagatttaccttgttggtgctgatggtaaagcaaagcgctacagattttgtgactcactaaaagaaatcaatgacatagttgagggctcttctgatccagcatttttctttggtacgttttggaaaattgaaaagtttacaggccatagcaatgtctggttaaagatcaaccaaggaacatcatttagggatttcagagtacgtatcactaatgataccgctgaagggagaggattttttaatgataaaaatcgtgggcggataactgttttttatagtcgagtagatgaggtcggcatgggttatatgacaccccagttagggtggggggaggttgcactattgcctgcaaaatatgatgattttttaatcagtgattatgtgtcatctcgtaaggacaatcattaa

SEQ ID NO: 31340 - DNA, 1746 bp, Escherichia coli
atgagtgtggaaaagctgatcgttgatcatatggaaacctggacctcggcgttgcaaacccgttccaccgccgggcgcggcagttccggaaaaattgatttatatggcattaagaaattacgtgagctgattctggaactggctgtgcgcggtaaactggtgccgcaggacccgaacgatgaaccggcgtcggagctgctgaagcgtattgcggcagaaaaagcagagctggtgaagcaaggtaaaattaaaaagcaaaaaccactgccggaaattagtgaggaagagaagccgtttgaattgccggagggatgggagtgggtgcgtattagtgaaattggacatgactggggacaaaaaactccagataaagattttacttacattgatgttggttcaataaataaagaatatggaattattgaagagccatctattctttcagcgaaagatgccccatcgcgagcgagaaaaattgttcagcaagggactatcatatactctactgttcgcccgtatttgttaaatatagctattattgaaaacgaaatactacctgaaccgatcgctagtactgccttcgctattattcatccatatacggcgatggatgctaatttcatttattattatctacgttctccggtatttgtttgttatgttgaaaattgtcagacaggggttgcctatccagcaatcaatgacaaacaatttttttctggaataactccagttcctccatccttggaacaagttcgcatcgcaaacaaaatcaaagaattaatgtccctctgcgaccaactggaacagcaatccctgaccagtctggacgcacatcaacaactggttgaaaccctgttgggaacgctgactgacagccaaaacgccgaggaactggctgaaaactggacgcgtattagcgagcatttcgacacactatttaccaccgaagccagcgtggatgcgctaaaacagaccattctgcaactggcggtaatgggtaaacttgtgccgcaggatccgaatgacgaacctgcctctgaactgctcaaacgaattgcgcaggaaaaagcacaactggtgaaagacgggaaaataaaaaaacaaaaaccgttgccgccgattagcgatgaggaaaaaccgtttgaactgccggatgggtgggagtggtgtcgtatcgttgatttagcaattgtaggtacaggcgcaacaccttctcgtgatgagcccaactattggaaaaatggagtaattaattgggtgacaagtggagaaacttgcttaccttttattcaaaacaccaccgaacatattacccaaaaggctgttgatgaaacaaatgtttcaatctatccaccaggaactcttattattgcaatgtatggacaaggaaaaacaagagggcaaatcacagagttattaataagtgctggaacaaaccaagcatgcgcagccattcgattaatcgaaacggataatgagcatcgtaaatttataaaacttttttttgaaaagtcttatgatgatttacgtagtttagccgctggaggtgcacagccaaatctaaatgtagcaaaaatatcacaaactgttataccattgccccctaaaagagaacaaaatcggatcgtttctattgtgggggagttattaatttattgcgataaattacgcaaaaatatccagaccgcccaacaaacccaactgcaccttgcagatgcactaactgacgcggcgataaactaa

SEQ ID NO: 31341 - DNA, 327 bp, Escherichia coli
gtggcgtatcagcggaaaatgcttgatagaggtgtctggctggaattcgacatgattggcctagacattaccttcccgaaagagggaatagcgccaggggtgcaggagactgccgatgccgtcgctcatctcattgagttgggatacgccgatcagcttgttctcagccacgatgtcttccttaaacaaatgtgggctaaaaatggcggtaatggctggggatttgttccagatgtttttctggcctatctggcggagcgcggcgtcgataaaacgatcctcaaaaaactctgtatcgataatcccggacgattattgaccgcataa

SEQ ID NO: 31342 - DNA, 417 bp, Escherichia coli
atggctgtcatttataccctcactaaatcgtcacttgtcaagtctggtggtcaattacattggaatattgattttccatcagaacaacaaccattaaagatcgtcaatggtcgggttgtgcttcggggatggttactggcagaagtggaaaaagatctccgtgtcgcagttaaaattgaacatttgacatacagtttccccttcaatataaagcggcctgatgttatttcaactatactgaagcagcaacctgaaaaacatcaaaaacttcagtgcggatttgatatcagtgtcccattttcaacaaaaataattattgggctggagtctgatggggtgattacctggttggaagagttattttttttccggtctgatgataaaattaagtgtctatatcagatagtatctgaatag

SEQ ID NO: 31343 - DNA, 417 bp, Escherichia coli
atgtatgatgctctgttctgtgctcgtcttttccgaacgttcaatgtcgttgatgactttaactatgaggcgttgtcgattgaaaacaatctgaatctgccagcttcacaagtggtagcggtactctgtaggattgcggaaaaccatgtctatccagctatgattcgcatggattatggccaggaattttttgatccaacacggacggaatgcgcagaaaaacatgtagtaaaactggagattacccaatcaggtaagttggcgcagaacgcttttatcgagagttttaaccggacataccgaacaaaaatactcggtttttgtctgttcagaacgctggatgaaaagcgggaactggcggcaaactggttgtcagaatataacagtgaacgccatatcaaccacttaaccatatga

SEQ ID NO: 31344 - DNA, 342 bp, Escherichia coli
atgcgtctggtaacattgatgaatctgggaagccacattttgctgaatgttgtgaccataccttaccggcggagcgaaaccgtgctggctcactccatgctcgccgccatcccggataactctattaggctgtttgacaagcacttttacaatgcagaccagctgctgacgctgagcctgcagggtggtaaccgccactggctactacctgcgtggaattatatcgcatcagaaacagaagaaagttacggtcccagatacaggcttctgaaactgaagatgtcactgccggccaggaaaggaattctgcactgccagagctctggtacgcccgagcggtaa

SEQ ID NO: 31345 - DNA, 363 bp, Escherichia coli
gtggagaaaacggtgctgacatcactcccggcagaccgctacaaagcaaaagaggtggcagaactttactattcacgatgggaaatcgaagtcgggtccagaaacctcaaaagcagccagctgaacaatgccctggtgctgagaagccgtagggttgaggtgctggagcaggaggtgtggggcatgttgctggcttataagctgatacgacgtgaggcaaccaaagcggcgtcagaaatcagctttaagttcgcattccagtttatcgcgacagaaatgatagtgctgggaaatacggcatcaccggggaccatcccgaaacgactggtgcatctgcgggtactctggaagcagtgttcataa

SEQ ID NO: 31346 - DNA, 300 bp, Escherichia coli
gtgctcaccgataagatagaggcaattggctcgactaaagagcaggccttggaaactctgggcctgtcgtccgggggcgataccaaggatatttttctgcggcaggtcgtccagcagatgtcacatattgatcacctgctgaaaaaggactggtaccttctggacaccaggccagaacgtccgttttacgtatcagataatccagtcgtgcttaagaacagtaatgacttcggtccgtacggtaatcttggtctagccgttcgcgggatacagatttacctcccctgtcatcgacgctga

SEQ ID NO: 31347 - DNA, 2688 bp, Escherichia coli
atgtcggtaggatcacgctggtacaaatttgattttcataaccatacgcctgcttcggatgattacgggatttcaggcgtcactcccagagactggcttctggcttacatgcggcaacaggtcgactgtgttgtcatcagcgatcataatagtggcgcatgggtcgacacgttgaaagatgaattggagcggatgcgccaggaagcgactacctgtggcttgcctggctttcgccctctgactttgttccctggagtggaactgaccgctaccggaaatgtccatatcctggccatactgcacacgcaaagcaccagtgccgatgtagagagacttatcggccagtgcaacaataactgtcccatcccgcgagatgtttataatcaccagcttgttcttcagttgggttctgctggtattatcaacgttatccgccgtaatccggaggctttgtgtatacttgcgcacatcgacgcacctaaaggggtgttaaaaagcctgactaatcagggcgaacttgaagcggcttttcgcgaaaaaccccatgcggtggagatccggcacagtgcggtcaatattactgacggtacccacaaacgtcttatccaggatctaccgtggcttcggggctctgatgcacatcatactgataatgcaggtgtacgaacctgttggctgaagatgtcttcacctgatttctacggtctcaagcatgcattgctcgatccggagaattgcgtattgtttgacaaaaaaccgccagagaatccggcttcacatctgcgtagcctgaagttcagaacccgccactgtcgtcctgctgagcaggaggcagctattgtggaattcagtccgttttataacgccgttattggctcccgaggtagcggtaaatctacgctcatcgaaagcattcgtcttgctatgcgaaaaaacgaaggattaacccaggggcagagtaaaaagctggaacagttcagtcgaataggggggggaatggatgctgactccttcattgaatgtgtgtaccgcaaagacggcactgatttcagacttagctggcggcctgatggtaaccatgacttacatattttcagcgaaggagaatgggttcctgacagtcactggtcggccgaccgttttccactctcgatctacagccagaaaatgctttatgaactggcctcagactccggagcattcttgcgcgtttgtgacgagagtccggttgtcaacaaacgggcttggaaagaacgttgggatcagctggaaagggattatctaaatgagcaaattacgctgcgtggctatctggctaggaaggtgagtgcgggggcgctgcagggggagttatccgatgctgaacgcgccgtcagtcagttgcagtcaagtgcatactatccagtttgcaccagactggctgtagcccgggctgaactgtcagcagcaaccacctcccttgagttatatgagcaacgtattgcggccctgctggcgttgttggaggaacctctgccggtttcagtaactccgttggcaccgtccgagtcgctggcggtatttatgacgcacctgtcgtccgtacaacaaaattatggccagcgtctccacgcccttctgacagaatgtgccactgaacttagcgccgtcagggcagataatccttttgtaactctcggggaaaccgttcgtgatcaggaggtgaatgttgagcatgaggctgttgctctgcgggctcagggacttaatccggatgtacttaacgagctgatggagcgttgtgagtcgttgaagaatgagcttaaaaactacgacggccttgatggaatgatcaccacctcggtggctcgttcggagcagttgctggctgaaatgcgcactcatcggatggcgttgacagaaaaccgaaaggcattcttgtcttctctgtcacttagcgatctggacatcaagattctgcctctttgcgcgccccatgaggatattctggctgactatcaggctgttaccggcatcagcagttttgtcgaacgtatctacgatcacgataacgaaagtgggttgctttacgatttcatcagtgagcgtccgttctctccgttgccggccgcaacggagaggaaatatgcgttactggatgaacttaaagcgttgcactttgctatccgctccgaggatactggggttgggggggggcttcatggtaccttcagaaatcgtcttaaggcgttgaatgacggacagcttgatgccctgcaatgctggtatccggatgacggcattcacatccgttatcggactcccggagggcagatggaagacatttcttctgcttccccaggacaaaaaggagcgagcatgctgcaattcctgttgtcttatggcaccgatccacttctgctcgatcagccggaggacgacctggactgcttgatgctgagctcgggggtgatccctgccatcatgtcgaataagaaacgccggcagctgattatcgtgtctcattctgcaccgatcgtggtgaatggtgatgcggaatacgttatcagtatgaaacatgatcgtacaggtctgtatccgggactttgtggatcgcttcaggagacgccgatgaaggcacttatttgtcggcaaatggaaggtggtgaaaaagcattccgttcgcgatatgagcgtattctcagttaa

SEQ ID NO: 31348 - DNA, 207 bp, Escherichia coli
atggcacaggttaatatgagtttaagaatcgacgctgaactgaaggatgcttttatggccgctgcaaaaagcatggatcgtaatggctcccagttaatcagggattttatgcgccagaccgttgaacggcagcataatacctggttccgtgaccaggtctgggcagacagcctcggtactaaccatctgttaccgatgtcacgctga

SEQ ID NO: 31349 - DNA, 324 bp, Escherichia coli; identical to SEQ ID NO: 28561

SEQ ID NO: 31350 - DNA, 264 bp, Escherichia coli
atgcgtaaagcccgttttactgagaatcagatcgtcactgtgattaagtcagttgaagccggacgaaccgttaaagatatctgccggggggctggtatctctgatacccacctactagatctatggactacctccgttttgcaagtactgaatctggttttgagttgttgcttacctctatccggcatcaggaaaatctgtgcccaaatgggtaatccgcacacaatcgcctcaacaactggacggcctctgaggccaatataa

SEQ ID NO: 31351 - DNA, 2142 bp, Escherichia coli
atgtcaaccggattacgtttcacgctggaagtggacggcctgccaccggacgcgtttgcggtggtctcctttcatctgaaccagtcactctcttcgctcttttccctcgatctctctctggtcagccagcagtttctctcccttgaatttgcgcaggtgctggacaaaatggcctacctgacggtatggcagggcgatgacgtacagcgccgggtgaaaggtgtggtgacctggtttgaactgggggagaacgacaaaaaccagatgctgtacagcatgaaggtgtgcccaccgctgtggcgcacagggctgcgccagaacttccgtatcttccagaatgaggacatcgaaagcatactcgcgacgatcctgaaagaaaacggggtgaccgagtggagtccgctgttcagcgagccgcatccttcccgtgagttttgtgtccagtacggcgaaaccgattacgatttcctgtgccggatggcggcggaggaaggcatcttcttttatgaggagcacgcgcaaaaaagtaccgaccagagcctggtcctgtgcgacaccgtgcgttatctgccggagtcctttgagatcccctggaatccgaacacccgtaccgaggtgagcaccctatgcatcagccagttcctctacagcgcacaaatccgcccatcttccgtggtgaccaaagactacacctttaaacgacccggctgggcagggcgttttgatcaggaaggccagcaccaggattaccagcgcacacagtatgaagtgtatgactaccccggacgtttcaagggtgcccacgggcagaactttgcctgctggcagatggatggctggcgaaacaacgcagaagtggcgcgcggaacaagccgttcgccggagatatggccgggacggcgaattgcgctgacggggcatccgcaggcgaacctgaaccgggaatggcaggtggtggcaagtgaactgcacggcgagcagccgcaggcggtgccgggacgcaggggttcaggtaccacgctgaataaccactttgcggtaataccggcagacagaacatggcggccacagccgttgctgaaaccgctggtggacggcccgcagagcgccgtcgtgacgggaccggcaggagaagaaatcttctgtgatgaacatggccgcgtgcgggtgaaatttaactgggaccgctataacccgtcaaaccaggacagttcatgctggatccgtgtggcacaggcgtgggcaggcaccggctttggcaacctggcgataccgcgtgtgggtcaggaagtcattgtggacttcctcaacggcgatccggaccagccgattattatggggcgtacctaccaccaggaaaaccgcacccccggcagcctgccgggaacaaagacgcagatgaccattcgttcgaaaacctataagggcagcgggtttaatgaactgaagtttgacgatgcgacagggaaagaacaggtctacatccacgcgcagaagaacatgaacaccgaggtgctgaataaccgcaccacggatgtgataaacaaccatgccgaaaaaataggtaacaaccaggcgatcaccgttaccaataaccagatccagaacattggcgttaatcagatacagacggttggtgtcaaccaggtggaaacggtaggcagcaaccagattgtcaaagtgggttcaaaccaggttgaaaaggtggggatcattcgtgcgctgacggtgggcgtggcttaccagacgacggtaggcggcatcatgaatacctcggtggcgttgttgcagtcctcacaggtagggctgcataaatcactgatggtgggaatgggctacagcgtcaatgtagggaataacgtcaccttctcggtgggcaagacgatgaaggaaaacaccggacaaacagcagtttattctgccggtgagcatctggaactctgctgcggtaaggcaaggttggtgctgacgaaggacggaagcatatttctcaatggtacgcacattcatctggaaggagagtcggatgtgaacggtgatgcgccggtgattaactggaactgtggtgccacacaacctgtaccggatgcgcctgtgccgaaagatttaccccccggaatgccggatatgcggcaattttga

SEQ ID NO: 31352 - DNA, 744 bp, Escherichia coli
atgaaacccgaactcattatcaaagccatgcagaccgttatcagtaaacaggatgaaggcgcggaacaacttattgccggtgcgctggccgcacttaacgaagcaaaagacgcacacacggccagcatgggtaaactcagcgacattgaggcttccattcagcgttgtgagcaggaacgacagaccgcgctcagtgaaagtgcacaggccgaacaggactggcgcagccgctttcgaactctgcgcggcaacctcactcctgaactgaaagctgaacacagtaaacgtatcgccagccgagaactggctgatgagttcaccggtctgattaccgagctggagaaagacaaaggcctcgccatgcttggcgcatgctcctccggtacggcttatatcagcgcccacgaaaaagcattcaccacttacgccaacagcgaatggaagaaagtgctggccggtatcagccccgcactgttacgtgcctttctgttgcgtatacggtcgctggaaatgagcggagaaacctcgccgcgtgcgaccgtgacccgcgagctgggcgatgccctgaatctgcagtcagccctgtatcatttcgatatggagcaggagccggttctgtccgtaacgggcatgaatcgcccggtcataaccggggttgatatggcgctgttaagaagcccggccagacggatgaagcttgccgctgaactggccgcaaaagaccacgaacaggcagagggctga

SEQ ID NO: 31353 - DNA, 240 bp, Escherichia coli
atgtttcactgtccgttctgcaaaaagaccgcgcacgtccgtaccagccgttatctgtcggaaaacgtcaaacagcgttatcaccagtgtaccaatatcgaatgttcggccactttccgcaccatcgagtcggttgacggtgtgatacgtgccgccccggagaaaaccgaccccgcgccggtggcgccaccaccgccgcgtaaggtgcagggctgctacagttcgccgttccggcattaa

SEQ ID NO: 31354 - DNA, 567 bp, Escherichia coli
gtgaccactgtgaccatacagcaggcctttgaggcctgtcagacgaacaaaaatacctggctgaaacgtaaagccgaactggcagaccttgaacgggaataccgtgaacagctccttgccggtgacgaacaaatcccgagcagaatgcaggatttgcgcgacgatatcgacgtgaaaaaatgggagattaatcaggccgccggtcgctatatccgctcacatgaggaagtgcagcacatcagtatccgcaaccggctccatgaatttatgcagcagcacggcgcggagctggccgccacgctggcacctgagctgatggggtataacgaacagcttcccgcagtaaaacagagcgccatgcagcactcggttgattatctgcgtgaagccctgtcggtgtggctggccgcaggtgaaaaaattaattattccgtgcaggacaacgatattttaacggccatcggattcaggcctgatgcggcttcgcgggatgataatcgcgagaaattcaccccggcacagaacctgatttacacccgccgacgtgcagaactggccgcacggtag

SEQ ID NO: 31355 - DNA, 186 bp, Escherichia coli
atgcaggtgcatgaaccaactcaagccgcgccggtactggtgttgcgtgggataaaaaatacggggatttgcatgcaaaaccatgcaccttatggatgcatggtttttttcgggaaaaatagcggaattttcggggatttttttgcgtgctaccgtgcggccagttctgcacgtcggcgggtgtaa

SEQ ID NO: 31356 - DNA, 510 bp, Escherichia coli
atgatattaattgactgccaagacaaaatactttctttattccgaaaacttcctatttaccacaatatgggtctagacgaatttgatagttatctagagaaatgctttcctaatatatattttctcgatgatgcgagagatttttctaaaacagatattagcgaaaaaaacgacacaaaactttcggttattataaagcatttatcatatcttaatgatcatgcacaatatgactaccttatagatccagaacagtttgagcaaaaagcactttctcatggtgtagaactatctagagaaagcagcagtacaaaacgaaaccaagatgcagttaaagaaagaacaaaaaaaataaatgaggaggctcttttctttgaattacacaccaaactcagtagagaaaaaggtagaatccattttcatataggctcaagcctgagcgaaaaaataaataaattaagtgaaggtcgtctaatagttggcattgtgtgcaaacacttatcaacttaa

SEQ ID NO: 31357 - DNA, 1122 bp, Escherichia coli
atgaatttttatgtggatgaaaccggtcataccggtccaaatctgtttgaccgcacccagcgtgttctatcttacggcgttctgtcctcacccgatgacctggacaaggtggccgaatctgaactggccagtttgcgcaaaaagctgggcgtacagcgccttcacgctgctgagctgggcatgtatcgccttgatgatgtggtcgatacgctgctggttctgcagaagaagcaccggatacggtttgatgtctggcaggtggttaaacgggatcacgccattatttcgttctttgatcaggtatttgatcagggactgaatcctgcggtgccttggagcgcctactggacgccactgcgttatccgttgctgctgaatttagcaaatctgtttgatgacgacctggctgaaaaatcatggcgagcccggctcgaggcacatgatgaacgttcttcctctcttttcagcgaagtttgtaacgtgttgcttcagcgggttcatactttgggtgacgctcgctcagttgaactgataacggatgcgctgtcttgggcgatgatgaattttgataaattggggtacaattgcaaaactaacaaacaaaagttgcagatcatgcctaatatgatcggttttcagtctgtattacacggtatttgctcccgtttaggggcaccaaacagaaaagcaaatatcattgtggatcagcagtcacagtttaataccactcaacgggaactgaacgatctttatttcaagattcgcgaacaaccgtgggaacttggacctggattgcccgtcatggatatgaagaacatgccagctgaaccacttgtcttcctgtcgggtacgcaaagcgcagggctggagctggttgatatttatctctggactttcaagcggtttatggaagataaggagctgaccaagcctcttacgcgccttgtttatacaaatcttaagaccgccagaacagacaacgtttccctgcagtcagttggaaaacgttttaaggaattttttgaaaataaacctgagcctacagcagagaaaatggctcaggtacgtgagctgcgtgaattagaagaggccagacgtatgccatatgtgatgtccaaataa

SEQ ID NO: 31358 - DNA, 492 bp, Escherichia coli
atgaatactgaagaattacttggtcaatttaccaaagttggactaaatgtagcgggcacttatgttgagtatcattttaaacaatatcatgcatccaaagatcagagccaaaaggtccacagaatgatggaagatacgctgctcggtaccagtagattgttcagcgtgagcgcccccatacaggagctaaaatcaggactgagaaacatgctgcagccactctctcaggagactcgcaaactggatgatatgacgatacgcctcccgttaaagcgtctgcaacggaaacaacgtcatgttttgatgcatgcagtgtggttgttacgttatctcgattcgcatctgggagataatgaaggggaattctttttgtttctgcatgacgtggcgatgaatagcgatgctcaaatcctagatttgtggacgtcaatgaatgatagaaaaaaatgtagtagaagctgtttacaggtcaaatctactacctgttcttaa

SEQ ID NO: 31359 - DNA, 693 bp, Escherichia coli
atggtagaaccaattggcgagttagtatcggagtgcttttacgctcaagatatcggtaaactgcattcatcgaggaaagtctcgccagattggtattccaagttaccaatcccttggaacaaaactgttacttggatcgatagttcgagccctaatgaagcaggtgcagaagaacataagggtaatggtcgttactataatcaacgagaagtccggctactgctagaggctttgcagtcattgtcgagtgatggctgcattgcacagcttgagcaaactattaccacagaacagccatatcctattggtataatcacaatgtatcgtcagcaaaaagaggaaattgacaatgctatcagtcgggctgaatgggctgcatcgttacgtggtttgatcaagatcgataccgttgattcatatcagggccaggaaaacaagataattatcctcagtctggttcgcgataatcccaacaaactacaaggtttcctgcgcgacgcgccgcgaataaacgttgctatttcgcgagctcaagaaaggttattgattctgggagcaaggcgtatgtggtcaaagaccaataatgattcagcacttggaaacgttcatgaatttattagtaaacaggttgcagtagatgaacccaactaccaaatcctgtgtggtcaaagtctgcttggagataacaactaa

SEQ ID NO: 31360 - DNA, 843 bp, Escherichia coli
atgtcactattacctgaatatgaagatgcagaagtatccacaaagtctctctatgaaatatccttaaagcatcagatagagaagcttctattttttcgtgaaaaattcgttacatcactaaacagacctcgatacacaaactatgtagaacctgactgcgaatatttttttgattctgtcataaataattcagcagcactagcagaatactatctcccttatatcatctattctatcattggtacgacactcacccccccacaaagaccatggtttagtaagtttaaaaataagtgcggtgaagatggttatcagaaagcaaaatcagcactattttcaaaatatgagatcggtattcttatcaaatctaccagcattgataatgaaatttatttaaaaaaatgccatgatttatttgataagtctatagagactataattgaaggaaaatatgatattgttttcactttaaacaactatataaaacacaactcaatgactttttgttacgcccctttatcaaacactagcgatgataaatgcaaaagtaatcttttccttagcttcacaaaagatcaatgttttatgcttgaagattcaatacttaaaacattgatttcaagtgatttaaatgaaaccaacaacactggtgagataattgatataaatggaatgaaattcacaaacaaaggaagcataggggcagccaaattattagaacttattgatgacatgataagaactattgtgaataatgtaatttcaaatgccaaaggacaaactaccacttctgaaacatataaaaaatatttagacattattgaaacaagacaaacagcataa

SEQ ID NO: 31361 - DNA, 414 bp, Escherichia coli
atgcataaatcagaaaatgaaaaaatagattttattctggatgaacatgagcggatattcagaaaacagggttctttgtgtatggcactgggtaagggctttttagttatagctattctttgtggtgttgccacattctgtgtttctggcttgtatctgaaatccctgtgcctgtccgttgccagctgttgtggggtattcagtcgtatttttaattattacagcgtaccggaggaatcacgcatggtcctcagccgtcagagcctgcttcagcttatgcgtctgactgaagacgtaccagatgtgagacaggaactgcttaaccgtttgttgtccggtaaaaaactgactggtcgggatgaacaggatatccggcgtctctggcaggaaaggcagaggaaacactatgcataa

SEQ ID NO: 31362 - DNA, 1377 bp, Escherichia coli
atgctagatccgcgttatattcgtgtcgatggtaaaccattactcactatttatcgtccaagtttacttcctgatgcaaaagcaacgatagagcgttggcgtacttggtgtcgtgaaaatggtatcggtgagatatatataacatacactcagtcttttgaaaaagagtctcctgaagtgtatgggattgatgctgctattgagtttcctcctaatggctcaaatattccaaatatcacccatcagattcccaacctttctgatgatttcaccggtaatatttatgactggaacgagttggtcaggcgtagtgaaaactatacggaccctggttatcgtttatttcgtggtgtaactcctagctgggataacaccgctagacgaaagaataatggcacgattctgtatggaagttctccttgtctttatcaaaaatggcttttcaatgcatcattggacactacacagcgtattagtaatccagaagaacgtttcatatttatcaatgcatggaatgaatgggctgaaggtgcacatcttgagcctgatcaggcgtatggatttggctatcttgaggccacccgtacggcattgatccggactcagatttgtactcagtctggttatcgtcatcaaaacaaattagccgttgttattcatgccttctatctcgatatcctagaagagatcattaaggaagtgcaaaggatagcctcctgccagattaagttatttgttacaacgccaaagcaacaggagtgggccgcacgaagcatactacaaacctctggccttgattataatctgatgccattagaaaaccgtggccgtgatgttttgccttttttaaaaattatgaggtcagtgattgctgaggagtatgactatattgtcaaggtgcatactaaacgttccaaacatcgtaacgatggcgataaatggcgcgatgatctctactcaaaattaattacgccacatgcgattgataatgcgttgggtatctttagagaacagcctaaggtcggtattattggaccggaaggccatattgttccaatgaatttctattggggctcaaacgcagagaaagttgaaaaactttgttatcgtatgggctacaaactagatgatattcgtgagcttaactttgttgcaggtactatgttttttgcgcgtgttgatgcattaaaaccgttaataagtctagggttgaccgacgaagacttcgatgttgaagctgggcagattgatggtacactagcacatgcgattgaaagagttatttcagtctcttcatacgctgcaggcctttctatgagttctacattatcagatgaaattaactccgagaaatatgattttgccaactttggttga

SEQ ID NO: 31363 - DNA, 1563 bp, Escherichia coli
atgaacaagccgaaagacattctttcaccggatgcaccgttcattcagaccggcagggatgtggtgaaccgggctgacagcattgtgggaaacacaggccagcagtgtagtgcacagcagataaaccgcagtgaattcacaaactatacctgtgaacgggacacgatggtggaggagtattgcacacggactgccaggatcaccggagactggaaatacacagatgaatatcgtgaggtgacgataccgcactcacagttccggttcagtatgaacgggctgaaactggtgttcagtgtcacggctccggtaaccggtacagtggaaagtgcatcattgtctgtatacgccgcttttttcttcctgaactctcgttataccttcatgaattcaacgttcaatgttggcctggtaaacgggcagtcgggtactttccccctgtccggggcgacaggtttgcaggtgacacaagggcaggttctgaccggcagtggttgtactgctaacggtaactgtctttctggcgggaacggtgaccgacaggtttatgagaaactggccagcggcgcgtccacctttacactgaaactcaggatgaaggtccgtgataaagaatgggttccacgggtggagtgggtggagagttgtccgtttaataaagcggatggcgtgctgaaaggcactgagtgttcagagccgggtggtacgaaaactggtgtgatggaaggtaaaccctggagcatcacacaggcgtgctgggcataccgggataaatatgtcacacagtccgcagataatggtacctgtcagaaatatgtcgataatccggcctgtacgctggcctcacgtcagtgcgcgttttattccgatgagggaacctgtctgcatgagtatgccacgtactcctgcgagtcaaaaacatcaggaaaagtgatggtctgtggtggtgatgtcttctgccttgacggtgaatgcgataaggcgcagagcggaaaaaacagtgattttggtgcagccgtatcacagctggctgcgcttgccgctgctggtaaggatgttgccgccctgaatggtgtggatgtcagggctttcaccggcgaggcgaaattctgccgtaaggccgcagccggcttcagtaactgctgtaaggatggtggctggggtcaggatgtgggtctggcgaagtgtaacagtgaagaaaaggcgctgggaaaggcaaaggacaacaaactgacggtgagtgttggcgagttctgttcgaaaaaggtactcggtgtctgcctgcagaaaaagcgcagctactgccagtttgattcgaaactggcgcagatagtccagcagcaggggcgtaacgggcagctgcgtatcgggtttggcagcgccaaaagtcctgactgtcgtggaataaccgtggatgaactgcagcgtattaagttcgaccagctggacttcactaacttctacgaagacctgatgaataaccagaaaatcccggacagtggtgttctgacgcagaaagtgaaagaacagattgctgaccagctgaaacaggcaggacagtaa

SEQ ID NO: 31364 - DNA, 1521 bp, Escherichia coli
atgaacaagccgaaagacattctttcaccggatgcaccgtttatccagaccggcagggatgtggtgaaccgggctgacagcattgtgggaaacaccgggcagcagtgcagtgcgcaggagattagcaggagtgaatacacgaattacacctgtgagcgggatttacaggtggagcagtactgcacacgaactgcccgtatggagctgcaggggagtaccacatgggaaacccggacgctggagtatgaaatgagtcagctacctgcacgtgaagtgaatggtcagtatgttgtctccattacctctcccgttaccggtgaaattgtcgatgcgcattacagctggagtcgtacttacctgcagaagagtgtacctatgacaattacagtactgggaaccccactgagctggaatgccaaatactcagcagatgcctcatttacaccagtacagaaaacactgactgccggtgtggcttttacgtcatctcaccccgtccgggtcgggaatacaaaattcaaacgtcatacggcaatgaagctgcgtctggttgtcagggtaaaaaaagcctcgtacaccccgtatgttgtctggtctgaaagctgcccgttcagcaaggagctggggaaactgacaaaaacagaatgtacggaggctggcgggaacaggacgctggtgaaagacggtcagtcatacagcatgtaccagagctgctgggcataccgggacacgtatgtcacgcagtcagcagacaagggaacctgtcagacctacaccgacaatcctgcctgtaccctggtgtcacaccagtgtgccttttactccgaagaaggtgcctgtctgcatgaatatgccacgtactcctgtgagtcaaaaacatccgggaaagtgatggtctgtgggggagacgtcttctgtctcgatggcgaatgcgataaggctcagagcgggcagagtaatgattttgccgaagccgtttctcagctggcggcactggccgcagcaggtaaggatgttgcggcgctgaacggggtggatgtccgtgctttcaccggtcaggcgaaattttgtaagaaggctgcagccggatacagcaactgctgtaaggacagcggctggggacaggatatcgggctggccaaatgcaacagtgatgaaaaggccctggctaaagcaaaatcaaacaaactgaccgtcagcgtcggggagttctgttcgaagaaagtgctgggtgtctgtctggagaaaaaacgcagctactgtcagtttgattcgaagctggcgcagatagtccagcagcaggggcgcaacggtcagttgcgtatcagttttggtagtgcgaagcatcctgactgtcgggggattacggttgatgagctgcagaaaattcagttcaacagactggatttcactaacttctacgaagacctgatgaataaccagaaaatcccggacagtggcgttctgacgcagaaagtgaaagagcagattgctgaccagctgaaacaggcaggacagtaa

SEQ ID NO: 31365 - DNA, 426 bp, Escherichia coli
atgccccatcaggctctgcaggaccttcagcggtataccggcatacagcatgtgcatcgcataggaatggcggaacgtatgtggcgtgatcgggacagagaacgtcacaccatcagcggcagcggcggcaaccgcttccccaatccaggtcctgaccgttctgtccgtcacttcccagatccgcgctttctctgtcctgcctgttcgtttattacgccgttccatggggattttcagtgttgccaccatcgtctgcagctggctgacgtaccaggagtcggagagcgggaccagccggtgagtctgctgaccggctggcattcttcctgccgtcctggcggctttttcggtccgttgtttcagggtcgcaagctgcacaaacggatacggaggcgtgagcgaaaaatccccccgcgtcagcgctag

SEQ ID NO: 31366 - DNA, 582 bp, Escherichia coli
atgcaacttgtttaccgtcgtgtaagttctgcacaacaggttactgctcgccagttgccagacatgccctacgagagcgatgccaatcatttggtgtttgaggataagaccacggggcgcaattttgatcgaccagcatacaaacagatgttgcagtgtgcccgtgccggggatgatttgtacgtacatagtctggacagattgggacgcagcttaaaaggcatccttaccagcattgaggagttgactgccagaggtgtggtcattcactttgttaaagaaggactgactgttggagaaaatgacaatccaatgagtcaggcgatgctgcaaatctttgctgtggttgcagaactggaggttaatctgattaaacagcgtcagcttgagggatacgctgcagctaaggaagaaggtcggattgttactcgtggcaaaggccgccatgtgttggaagtaaaagatagtgtgagaaaagccttactggaaggtaaaagcatcagagccattgctgcacagtttaacctgagcactcgtactgtcatgaatcttaaaaaagagctgattggcgcagttgtttaa

SEQ ID NO: 31367 - DNA, 675 bp, Escherichia coli; identical to SEQ ID NO: 22861

SEQ ID NO: 31368 - DNA, 393 bp, Escherichia coli; identical to SEQ ID NO: 11160

SEQ ID NO: 31369 - DNA, 993 bp, Escherichia coli
atgtatattgcggcagaaagaaaaccagaaatacaaggggaagtactgaagaatattttgaaccagctaccagcaattaacgaaaatgatatgttcatcatgaataatgagtactttaccgatgcgaaaaaggaacagcttaatattaccgcatggaaagatctcagtaagtacaaagacgtatcaatcacctttctcggagctaatttcgaaaattcattgatctataaaggcaataaagaactctttgaaagtactgaacttggaggattactgacacgaaaaacagctctcaaagacagattaaaggtttattacttctcaaaaaatcaaaaactatcgaagacatggaagactaataaccctgataaagtacaaaaaatatactcatttattgataaaaaacttgagggacaggatttctactggacgaagaacaaaagcgattctcagagcctcaaaaacggcacagagataagcccggatgccagagggtttaaccagtaccaacacttgctcacgtgcgtctggctcgcttgtatgcgtccctctgaaacagaggctaaacagtgcgaattgttctttgagattgacggcgaggcgatacatgttgcgagggagtacgaaagtttacaccagttcgtactacgaggaatttcaagggattttgacagtactgaaacacagactgtttatgtttttgatgaatggcaagccagatctcttacagataatattgagtatatagatatcggtattgatgatgagcagaggtcgagaggcaggccgcaaggttcaaagaataagcaaaagcgtttcactcttgatgataatcacgctaagcgttttcgccgctggaaaagccgcaacccagggcttgagttagaagcgttcaaggtgtttcttgccagtggtaatacagcactcagtcccgaagagcaaaaggctatgtggaacaaatacgaaaaggaagtacaaaaaagcaaaaaatga

SEQ ID NO: 31370 - DNA, 516 bp, Escherichia coli
atgaaacagatttctttctttattcctctgctggggaccttattactttccggctgtgccggaaccagtacggaatttgagtgtaacgccaccacatccgatacctgtatgacgatggagcaggccaatgagaaggccaaaaaactggagcagtcctcagaagcaaagccggttgcggcatcactgccgcgcctggctgaagggaacttccggacaatgccggtgcagaccgtcaccgcgaccactccgtccggcagcagacctgcggtgacagcacatccggagcagaaactgctggcacctctcccgctgtttaccgctgcccgggaagtgaaaacggttgttccggtcagttcagttacgccggtaacacctcctcgtccgctaagaacaggtgagcagacggcagcattatggatagcgccttatattgataaccaggatgtttatcatcagccatccagcgtgttttttgttattaaaccgtctgcgtggggaaaaccacgtattaattaa

SEQ ID NO: 31371 - DNA, 576 bp, Escherichia coli
atgatttttggttacgcgagagtctcaacaaaggatcaaaatcttgagcgtcagttggcagtgctggaacctgtttgtgacaaaattgtggcagagaaagaatcaggtaagtccaccagcgaaagacctgaattgttgaacctgctttcacacctccgcgaaggtgacacgctcgttactcactcgattgatcgccttgcacgtaatacccgcgatttgctggaaatgattgataacctcgtggctcgtggaatcactgttcaattccttgcaaactctatgagttttgataattccccacaatcacgccttatcctaaccatgatgggagccgctgcagaatttgagcggggtatgatcgcatctcgtcgcaatgaggggattgctcttgctaaagaggctaagaagtacaagggcaagcaaaagaacaaagagctacataacaagattatcgatatgttacaggccgggaagaatacaccagacgagatagcaaagttatgtgattgcggcagggctacagtttttcgtgtgaagaaagaaatgcttgccagtattagcggcatcaaacgctga

SEQ ID NO: 31372 - DNA, 207 bp, Escherichia coli
gtgggctcggagatgtgtataagagacaggtacaaatacaatgttaaatctggtttatcgtacaaggatactgtagggctacggttacagatcaaccgtgtagattctggattggacgtgcgtgttgccgatcttgattactactggctacaggagcggggcagcatgtgtcagccagcatatatggtacttgatcgttctgaatga

SEQ ID NO: 31373 - DNA, 510 bp, Escherichia coli
gtgaaatatttccggctgcaaaattactggactcagcaggccgggcttttcaccatgagcgccagaaaggccatgctggcacatcctgaactggactataacctgcagtacagccattacaacggcacggtacggaaccagctggcagcagaccaggcgcagcagcgacaggccattgcgaaactggctgaacactacggcatcatgtttttttaccgggggcaggaccccatcgacgggcaactggcgcaggtcattaatggcttccgggatacgtatggtctgagtgttattcccgtttccgtggatggcgtgattaatccgctgttgccggattcccggactgaccaagggcaggcgcagcgcctcggcgtgaaatatttcccggccatgatgctggttgacccgaaacagggcagtgttcgcccgttatcatacggctttatttcgcaggacgacctggcaaaacagttcctgaacgtttctgaagattttaaacccaatttttaa

SEQ ID NO: 31374 - DNA, 162 bp, Escherichia coli
atgagccacgatttgaacgtgatggcctgcttattgaggggcaaagaactaatcttctgcttaattcaacaaatccatctaaatggaataagtcaggcaatctggaactcacagaaatatccacggattcttttaattttacttatgggagatttactgtaa

SEQ ID NO: 31375 - DNA, 189 bp, Escherichia coli; identical to SEQ ID NO: 9782

SEQ ID NO: 31376 - DNA, 282 bp, Escherichia coli
gtgcgaaataagcaggtggtgttactcattgccggaatatccggcatcgcgacgggaataatcgtcagcctgaatatcccctttatccatcaggggcttttttatcccgccagccctgtagaaattgtcgtttcgctgtgccttaccttttctgtttctgttgtgttttttgtgggggcaattgtgggatggatttcggtgtctgaaatatattacagccgcaggactggtctgaatgaattatcggaaatatcagagggaacttataatgagagaaaataa

SEQ ID NO: 31377 - DNA, 813 bp, Escherichia coli
atgatgcctgactacatgcaggcctaccgagcatccggtctgttgcccgacatggcgaacaataacgcggtacatgttaacgaaaaaatcataccgaatgtagccgccggtctgataaaagttaaacccctggcagagcgtttcaccggagaaggcgctattgagttcgtcgacgcatctcaggaaaaatatgatgtaatcataacctgtacaggctatgaaatgcctgattactcgttcattcagggatttgacagaacacagctctatgagcactttttctggacagaggacccttctctggccgtcattaatcccccggtggataccgccggtttcggggctgcgtttccctattttgatatcatcagccagtgggtaatgaacgtattctccgggaagacttcccttccggaaaaagaagctatgcgcaaatggtgtgctgagcacatggcttcacttcatgttaagcgattttatgacagctggctggaaaccatccggattgggctgctgtcaggtcttctcccggacccggcccgcgacttttcccgatactggaacatcatcagcagtatggtcaaacctgcctatctggccactcctcccgcatttccggagcatggtatgatggacagcctgtttgatttccggatcgccagaatacgcatactgtcagggctgggaaacgatgctctcggttatttactgaaaaaaggtgatatcactgacgcagaataccgggcggccctggaaatcgatccccggcagtcgatttctgtacacctgccgtattcacagacctacctctga

SEQ ID NO: 31378 - DNA, 510 bp, Escherichia coli
gtgaaatatttccggctgcagaattactggactcagcaggccgggcttttcaccatgagcgccaaaaaagccatgctggcgcatcccgaactggactataacctgcagtacagccattacaacggcacggtccgtaaccagctggcggcagaccaggtgcagcagcgacaggccattgcgaaactggctgaacactacggcattatgtttttttaccgggggcaggaccccattgacgggcagctggcgcaggtcattaatggcttccgggatacgtatggtctgagtgttattcccgtttccgtggatggcgtgattaatccactgttgccggattcccggactgaccaggggcaggcgcagcgcctcggcgtgaaatatttcccggccatgatgctggttgacccgaaacagggcagtgttcgcccgttatcatacggttttatttcgcaggacgacctggcaaaacagttcctgaacgtttctgaagattttaaaccgaacttctga

SEQ ID NO: 31379 - DNA, 333 bp, Escherichia coli; identical to SEQ ID NO: 12755

SEQ ID NO: 31380 - DNA, 333 bp, Escherichia coli
atgacgagcaaagaaacctttacccattaccagccgctgggcaacagtgacccggctcataccgcaaccgcgcccggcggattgagtgcgaaagcgcctgcaatgaccccgctgatgctggacacctccacccgtaagctggttgcgtgggatggcaccaccgacggtgctgccgttggcattcttgcggttgctgctgaccagaccagcaccacactgacgttctacaagtccggcacgttccgttatgaggatgtgctctggccggaggctgccagcgacgagacgaaaaaacggaccgcgtttgccggaacggcaatcagcatcgtttaa

SEQ ID NO: 31381 - DNA, 237 bp, Escherichia coli
atgtgggtattttccctgggtgtctggtttcatatcgtcgcccgtcttgtttacagcaaaccctggatggctttttttctggcggagctgattgcggccatccttgtgctgttcggcgcataccaggtgctggatgcatggattgcccgtgtcagccgggaagagcgtgaggcactggaagccaggcaacaggccatgatggcagagcagcaggagggcggacatgtctctcactaa

SEQ ID NO: 31382 - DNA, 282 bp, Escherichia coli
atgttctccgtttatctctccggcccgccgcagacgcagcatgtgttttgtgtatccccggcggcccgggtcgcgcacacgggtctggcaggcgaagaatggctgaaagccttcccgctgcaggctttccagtacggtgatggtgggaatgtacgcatatcgtttactgcgggaagtatgtcggtcttcaccgaaaatactgggaacatagtgcatcagttcttcgtgtgtcagcggacggtcacggcgtatctggttcgcataaccaaaacgactggctag

SEQ ID NO: 31383 - DNA, 252 bp, Escherichia coli; identical to SEQ ID NO: 5211

SEQ ID NO: 31384 - DNA, 138 bp, Escherichia coli
atgccacagggacatcgccaccagaaaagcaccggttctgacgagatcttccacgctcacctgtcgattgagactggatcccgcctgttctgcctgtcgtttcagcagggcgagatgctcaattcgctgcagggctga

SEQ ID NO: 31385 - DNA, 495 bp, Escherichia coli
atgaacagggaccagccaggggaatttttctcttacttcagccggtgctgcatgctggtggtgccatctacaaaggggcaattgctttttgtgacaacccggcgcggtacgaccggagatatggtgcagagatacctcttcagatattactccatgcatgtagcaggcaatgcaggggagagcgccaagagcattggcgatgctccgttcctccgccgttggtgttctccccttcaagccacgagattttatttttaccgcgcttttccgcgttttgctggctggtgggcgctctttctgtttagcgatacggcggtcgatagaatcccgcattttctgatattgcgattctcgccaagcggggtcagccaacttttcccgttgccgagcgatcgctcgttctctggcagccttctgccactcgcggcgctgttcaagtttttgttcgattgttttcatatggcaaaaaaaaggcggcctaatggccgccaatga

SEQ ID NO: 31386 - DNA, 123 bp, Escherichia coli
atgtcaaaagtaaatgttttgattttttcagcaattgttggctttggttttactgccggagtgcagatttatattacgtgggaaaaaatcatcaactgcgcatggagttgttttattaagtga

SEQ ID NO: 31387 - DNA, 264 bp, Escherichia coli
atgcgaaatgaaaaaaatcgcttagaacgcgttacagagcgttttagggaggttctgttagttctcctgcattgcgcccgtagttcgctgacgctcacacgcgcagtacagcgccccgtccagggaaatcctggacggcgtaaactcgctggcgcgagcgctaactgcggcattctgcggcgcaaatcagcgtcatcgttgtctgcgagtcagtcgggcttagcagggcgggaaggtggtcgtggttccggtcggttacggtag

SEQ ID NO: 31388 - DNA, 852 bp, Escherichia coli
atgagccttatcgatttaagtttatcaggattatcagaaccaggaacaaaacttattgaaaaaataagtgatgccattggtgtgctttatgaacctacaagaatcaggaaaaaagcgaaggctgaagctgaagctaaacgcacagagctaatttccaggttagagcttgagggaatagaaaaacgggcagttgagcgttttctcaaacgtgagacgaaacgacaggaaaacattgaaaatataacaatgcaagcagcacaaagtctatctgagagtgataatgtttctgatattgacgaagattggatagaggctttcttcagggagtgtgaggatattagtgacgaacaaatgcaaatgctttggggaagaattttatccgaagaagcaaagtcaaaaggttcgtttagtcgtagaaccttaaaactattatccactataagcaaagaagaagcgaaccttattacttattttggaaagtttgtttggcaggcaaacaaactcactccaattttatttaccgatgagaatggagatatggaaggtataactttcgataaactttcggttttagactctttaggcgttattcaacaaggcattggttatagtttaacctttaaaagtaaaaacggtcgtatcggttattacggaacggttttttcagttgagtttcaaagcgatgattcatcaacctggaaactaccaataggaacggctttacttacgcctatcggtcaagaattgatgaaaatatgcggttccactccagatattgcgtatttaaataaattcctcaacaaaataaatgttgaaggaagccaggtaaaactatcacttattaatatgtaa

SEQ ID NO: 31389 - DNA, 213 bp, Escherichia coli
atgaatgattggctctgttctttacatgatttaatcacaaatcctgtatttatgctgtctttttcagttttttgggtgtctacgggaacacttttaatcagaactgtattcagaaaaattaacatatctgaaatttgcatactttttttattattgacactaataattctgtctttatgtatttttgtaacattaaaagcttcttttaactaa

SEQ ID NO: 31390 - DNA, 282 bp, Escherichia coli; identical to SEQ ID NO: 16716

SEQ ID NO: 31391 - DNA, 366 bp, Escherichia coli
atgagcatcaaaacccataccggaataatcattaccaatgatggtgagaaaagagtgaagttgcgcgaaacgccgacaacctggtgtgttggtccgaaagaaacatatcgcaaggaagatggccgtcgttgtggggcaccactttcccgccgtcgtctccttttgagcacgataaaacctatcgggcaggttgagcaaccaacgactccggtaacgaagatttcagacaagagtctggcaaacctgatcgctgatgcggacaaggtgctggagcggaacacccccgttgcagatgaggaatggtggcaggatttccgagccgcaatgctagagcttcaggaacgtcgtcgggaggagttgaagtga

SEQ ID NO: 31392 - DNA, 522 bp, Escherichia coli
atgcttcacctcaattacgacataacgcacctacgcggcgcggaatataacccgcgttttatcggtgaggatgatcttgcgaggctggcggaaagcgtcagggagctggggcttgtgaagccattgatagtgcgcggcgatttgctggtggcgggacaccaaaggacgaaggcgctacgtaagttgggaataacgcgtgctgcggtgtatgtgttgccctgtgaaacgacggtatacgacgaagtacggtttaaccaactgcataacggaacggattttgatagcggagatgagcgttgcagggtgtccggtctggaagataagcatggttttgttcaggtatcggcaagccagatctcaggcaatatgcgcgcgaaaatggcatatgttcgaaagaacatagcggaactggttatcaagtatggtccgtggggtggttgtgttgctactcagtctggtgaggttattcactgtgaaccgccccgggaatcctggagactaaacttcctgagaaagaggtaa

SEQ ID NO: 31393 - DNA, 1068 bp, Escherichia coli
atgaataaacaagtaattatttctgactggatcaacaaccctaacagcctgttaagcactgattctggctacctattacgccatgttaatggtcgtatggtcaaaagcgatgagcacgaaacctttttctttgttgaagacgatgggcgtatctatgaggatggttactcttatgaagcccaaactggttgtatccctgcggagctggtggacgtaacagaagatctgcgcaaagcatggcttgaacagcagcagcgcggagatgattacgtaaacacctatcaggaacgccagaacgcgcgtcttgcccgatatattgctcgtgcagaaaaagccagaaaagaaggtgcggtagcgcataagcgagcgcatgacctgttggatgtgatcccgttaggccagccgattttagttgaccattatagcgcgaaaggccatcgccgccgtttgtctaaagctgatgcgttattcagaaaagcgtttgttgaatgcgaaagtaaagcatcacactacgagagcaaagccgcaggtgttggtcgtaatggaatttcgtctgatgatcctgatgcgctatttaagttgcttcgtaagctgcaaggctgcatgaagtcacacgtcaaaatgaaggccgcaaataaggccattcgcaaatacaaaaaagaccaaatacagcagctttctgcattaatcgatctcaggtttacagaaagcgaagccaaagagttactggccggagatttctgtgggcgcatcggattcccttcatacgcactgagcaacaataacgccgaaatcaaacgactacagagccgtattaaggagcttgaatcggtcaagtctgtaacaggagcacagcgcgaagaatacgacggcttttctatggagatagatccagaggataaccgcatcctgttttatttccctggcaaaccagaggcaaacattcgttcgctgcttaaatcacgcgcctttaagtggagtccaacccgtaatgcatgggttcgcaagattactccaaacgccctggctgatgcccgatatctaaaagaatcgctattgaaagcctga

SEQ ID NO: 31394 - DNA, 192 bp, Escherichia coli
atgaaaaaccgtaaagcaaagatgcttatttcccgtgtatacagactttgctaccccagccagtggttgagagttagcaatcgccgtgtggtgttgttttcattttctggaattgccagagagggagtcaaagataagcgcagcgcggcgcaaaaccgctggaaaaaccacttgcgtactaaaggagagtga

SEQ ID NO: 31395 - DNA, 210 bp, Escherichia coli
atggctgttgccgcaagttacaccatgcatctctattgtgactgccgccagtgtacggaaggtgtatatccagtaccagacttcggtgaatatatcggtacgtcatgggctggctgtgcaaaagaggcacgtaaagatgggtggcgaataagcgccgacaaaacgcgtgcttttgcgcccgggcataaagttttgaggattaacaaatga

SEQ ID NO: 31396 - DNA, 408 bp, Escherichia coli
atgaccactttaaccgacaaagaactgattaaagaaatcaaagagcgcataggcagcctggacgttcgagacaatattgagcgccgtgcttatgaaattgctctggcatcactggaagcagagccggtagcgtgggaatgcggtgaaaacataatcctgtttaaccctgacacagttgaagcatacgcaaaacgtgcggaaatatcacctaaacctctattctccgcgccgccaacggtggtagtgccggatgatgggcgcgaaaagttcgaagcacttgtcaggtttcatgcgggtgataaaaaccatgaaacattattgcttcgtgccaacgaagggatgaattaccaggacccgaatgttgatctggcgtggatattctggaagtccagtcgtgaacatatataa

SEQ ID NO: 31397 - DNA, 141 bp, Escherichia coli
atgaagcacatacaaccgaaaacatggcagaaactggactctatgggagctaagttggagaagattactcaacttaagcagtggcatatcggcgaatattatggaagtcttggtcgggatgttcggttggtaaaaagttga

SEQ ID NO: 31398 - DNA, 396 bp, Escherichia coli
atgtcagcagaaccaatttccggtacggccgttgctgctggtggcctgatgggggccagcgtttttggtattgcaactggtattgattacggcgttgtattcggggcatttgctggcgctgttttctatgttgctacagcggtgaatattagccgtctcaagctgattggctatttctttacatcgttcattgttggagtgattggagcgccgttagttggctcatttcttgccaaatggaccagctacaacgatcgtcctcttgatgcacttggtgcggttattgtggctgcattgacaattaaaatcctcacgttcgtaaacagccaggatctcggtagcatctttggaatgctttcccgcttacgtggagggggttcaaatggtaagcagtga

SEQ ID NO: 31399 - DNA, 297 bp, Escherichia coli; identical to SEQ ID NO: 16724

SEQ ID NO: 31400 - DNA, 543 bp, Escherichia coli
atgaccaaagatgagatttttaacagcgttcttggaaaagagggcggctatgtggatcaccctgacgacaagggaggcccaacaaagtggggcattactcagaacactgcccgtgctcatggataccgtggcgatatgcgcgatttaacccgcgaacaggcactggaaatccttgaggctgattactggtacggaccacgctttgatcaggtggccgcattatcctctgatattgccgcagagctgtgtgacacgggggtgaacatggggccaacagtggcgtcaaaaatgcttcaacgctggctgaatgtgttcaacctgcgcgggaagctgtatcccgatttggatgcagacggacgaatcggtccacgtaccattaatgcgctacgtgcttatcttgggaatcggggaaaagacggcgaacgggtgatgctgacgtcgctgaactgtacgcagggcgaacgctatctggagctggcggagaagcgcgaggctaatgagtcgtttgtctacggctggatgaaagagcgagtggtggtatga

SEQ ID NO: 31401 - DNA, 279 bp, Escherichia coli
atgactggtttgaaagccgttttgtcatttatcggcaccgttatattggttgcattcggtgcgtttggttttggtcgtatgaaggggcgagaaaaggccgaagatgaagctgaaaagcagcgcattaatgagaatgcagccgctgtaaaagccactgcggagcggcgtatagaagtgacaaaagaggtggggaatgtacagcagagtgttaaccatatggctgatgacgatgttgatcgcgagctgcgggagtcgtggaagcgtcccggtggtggttga

SEQ ID NO: 31402 - DNA, 606 bp, Escherichia coli
atggaggcaattgcattgtttaatctgatttatgcagatcccccctgggaatacaaagataagtgtaaggatgggaatcgtggagctggttttaagtatccaacgatgaaagctgaggatattgctcgtattcctgtctggcagcttgctaatcctgaatcgtgtttgttggccatgtggtgggttccgactcagccagaagaagcgttgctggtggtgaaagcatggggattcaggcttatgaccatgaagggcttcacatggaacaaatgtggtagccgacaaccagataagctggtgatggggatggggcatatgactcgtgcaaacagtgaagattgcttgtttgcggtaaaaggcaaattgccgacccgccttgatgcggggatcattcagtcgtttacatcgcctcgtctggagcattctcggaagcctgatgtggttcgtgacaagctggtaaggctgttaggtgatgttcctcgtattgagctgtttgctcgcggtgatttacctgatggttggcatggctggggcaaccagtgcaatggaggtatccagttgcatgatgctctctggttagcggtatataattatatatttatataa

SEQ ID NO: 31403 - DNA, 531 bp, Escherichia coli
gtggcggctaagctgccgctcgggcagttcgaggctggccagcctgcgggccttctcctgctgccgctgggcctgctcgatctgctggccagcctgctgcaccagcgccgggccagcggtggcggtcttgcccttggattcacgcagcagcacccacggctgataaccggcgcgggtggtgtgcttgtccttgcggttggtgaagcccgccaagcggccatagtggcggctgtcggcgctggccgggtcggcgtcgtactcgctggccagcgtccgggcaatctgcccccgaagttcaccgcctgcggcgtcggccaccttgacccatgcctgatagttcttcgggctggtttccactaccagggcaggctcccggccctcggctttcatgtcatccaggtcaaactcgctgaggtcgtccaccagcaccagaccatgccgctcctgctcggcgggcctgatatacacgtcattgccctgggcattcatccgcttgagccatggcgtgttctggagcacttcggcggctga

SEQ ID NO: 31404 - DNA, 414 bp, Escherichia coli
atgaacgcaatcgacagagtgaagaaatccagaggcatcaacgagttagcggagcagatcgaaccgctggcccagagcatggcgacactggccgacgaagcccggcaggtcatgagccagacccagcaggccagcgaggcgcaggcggcggagtggctgaaagcccagcgccagacaggggcggcatgggtggagctggccaaagagttgcgggaggtagccgccgaggtgagcagcgccgcgcagagcgcccggagcgcgtcgcgggggtggcactggaagctatggctaaccgtgatgctggcttccatgatgcctacggtggtgctgctgatcgcatcgttgctcttgctcgacctgacgccactgacaaccgaggacggctcgatctggctgcgcttggtggcccgatga

SEQ ID NO: 31405 - DNA, 657 bp, Escherichia coli
atggtcggcccatgcctcgcgggtctgctcaagccatgccttgggcttgagcgcttcggtcttctgtgccccgcccttctccggggtcttgccgttgtaccgcttgaaccactgagcggcgggccgctcgatgccgtcattgatccgctcggagatcatcaggtggcagtgcgggttctcgccgccaccggcatggatggccagcgtatacggcaggcgctcggcaccagtcaggtgctgggcgaactcggacgccagcgccttctgctggtcgagggtcagctcgaccggcagggcaaattcgacctccttgaacagccgcccattggcgcgttcatacaggtcggcagcatcccagtagtcggcgggccgctcgacgaactccggcatgtgcccggattcggcgtgcaagacttcatccatgtcgcgggcatacttgccttcgcgctggatgtagtcggccttggccctggccgattggccgcccgacctgctgccggttttcgccgtaaggtgataaatcgccatgctgcctcgctgttgcttttgcttttcggctccatgcaatggccctcggagagcgcaccgcccgaagggtggccgttaggccagtttctcgaagagaaaccggtaagtgcgccctcccctacaaagtag

SEQ ID NO: 31406 - DNA, 285 bp, Escherichia coli
atggttaaggggagcaacaaggcggcggatcggctggccaagctcgaagaacaacgagcgcgaatcaatgccgaaattcagcgggtgcgggcaagggaacagcagcaagagcgcaagaacgaaacaaggcgcaaggtgctggtgggggccatgattttggccaaggtgaacagcagcgagtggccggaggatcggctcatggcggcaatggatgcgtaccttgaacgcgaccacgaccgcgccttgttcggtctgccgccacgccagaaggatgagccgggctga

SEQ ID NO: 31407 - DNA, 339 bp, Escherichia coli
atggaggcgttcgctgaacggttgcgagatgccgtggcattcggcgcctacatcgacggcgagatcattgggctgtcggtcttcaaacaggaggacggccccaaggacgctcacaaggcgcatctgtccggcgttttcgtggagcccgaacagcgaggccgaggggtcgccggtatgctgctgcgggcggtgatagactatggccgcgagcatgtggagcagatcatgctgacggttgcggaagggaacgaagccgctataaacctctatcagcgatcggctcgttgccctgcgccgctccaaagcccgcgacgcagcgccggcaggcagagcaagtag

SEQ ID NO: 31408 - DNA, 207 bp, Escherichia coli
atgaaagaccaaaaggacaagcagaccggcgacctgctggccagccctgacgctgtacgccaagcgcgatatgccgagcgcatgaaggccaaagggatgcgtcagcgcaagttctggctgaccgacgacgaatacgaggcgctgcgcgagtgcctggaagaactcagagcggcgcagggcgggggtagtgaccccgccagcgcctaa

SEQ ID NO: 31409 - DNA, 213 bp, Escherichia coli
atggaatacgaaaaaagcgcttcagggtcggtctacctgatcaaaagtgacaagggctattggttgcccggtggctttggttatacgtcaaacaaggccgaggctggccgcttttcagtcgctgatatggccagccttaaccttgacggctgcaccttgtccttgttccgcgaagacaagcctttcggccccggcaagtttctcggtgactga

SEQ ID NO: 31410 - DNA, 633 bp, Escherichia coli; identical to SEQ ID NO: 30074

SEQ ID NO: 31411 - DNA, 501 bp, Escherichia coli
atgttagttagtaaaagcaacgaaattaacactagcacatttataaatagtggaagttgtaatgaaagaaaatcttctaaatccatggagttactagcttatagtattataaaattaatttgtaaagaagctgcctcagggacgtataacggtgctcttgaaattttacaaaaaatgatgtctgaatgtaaatatcatgaaggcaatgcttttgtcattatgggagccggagaacaattaaaacgtattaaatatgatgctaatgaaaataaattaaaagtatacaacgtacactttgataataatcaagagttagttgctgatggtgagcctgacgtagtatttttaaaaaaaacggtgtgggaagaccttctcgttaaactaaagctggagaacaaagaaaatgcggtttctgaaattaacctgtcatctaataaaataatgttgatcagtttattgaatgcgctaagagaaatgaacagaccctattcggcaatataa

SEQ ID NO: 31412 - DNA, 447 bp, Escherichia coli
  misc_feature (417)..(434): n is a, c, g, or t
atgcaattgcaacatggaaaaaataatacacaacaatatatatttggcgactttgtattaaaaaacaatggaatattattattcaaaaacaaagaatatcatattcccccgaaagaacttggcgttattattctattgcttaatgctgacggtgaaattgttagcaaagaagagattatcgataaggtctggagcgcgagtgttgccagtgatgaatctctaacacgatgtatttatgcattgcgcaagcttttgcatgagaataaacaatgtaagtatatcgaaacggtctatggtcgtggataccgttttactgtacctattgtgattgtgaccgataatgaaccggtaaagtcgaccactactcttgccgtttttccctttcgtactgaaggttcgatcaatgttctaaaactnnnnnnnnnnnnnnnnnnttttgtggtttag

SEQ ID NO: 31413 - DNA, 294 bp, Escherichia coli
atggatataacacctttccttcatgcactttgtgctgtggctgcgcaggtactggttggtctttttaccggaaactgggcttacggggcgatagccggttgtacgttcttcattgctcgtgaacatacccaggcagaatatcgctggattgaaatgttcgggcatggcaagcgtatgaatatgccgtggtggggtggttttgatccgcgcgtgtgggatgtggcaagcctgatggatttttctgtgccggtggtggcttgtctgctggtctggctgttggttaatcgtgggtga

SEQ ID NO: 31414 - DNA, 156 bp, Escherichia coli
atggcgggcatcaattgtctgttgcgtatgggcgtagctttccagcacgcgttggtggaaagtttcgcagaggggaactggcagaaaaagttgatgccggagcttatcaataataagccgggagagagtggtaaagtcgacaggataactgcctga

SEQ ID NO: 31415 - DNA, 309 bp, Escherichia coli
atgcaaactttcaccggcgatttgcgttttatccaccgaaaaccaccgcagtgggaagtggggtgccatatcaggcaggtagcgttcagcctcccgccggttaaacggttcatgagacttaggcgcagggtggaaagcgtgtcctgtcagcagcgcctgctcagcctcgccaaaattcaacgctttttcacgcagagcggcccagtcatgacgggcatcaattgcctgttgcgtatggacatggctttccagcacgcgctggtggaaagtttcgcagaggggaacgggcagaaacagttgatggcgtag

SEQ ID NO: 31416 - DNA, 1194 bp, Escherichia coli
atgtcaccagggatcgaagatacgccccaaaaaccactgtcctgctggccacttgcgttcagtgccgggcttctcggtatcggacagaacggtctgctggttgtgctccctgttctggtcatacagacaaatctgagtctgtctgtatgggctgccctgctgatgcttggctcaatgctgtttctgccatcgtccccgtggtggggaaagcaaatttcccgtactggcagtaaacctgtggtgttgtgggctctgggaggatatggcataagctttaccctgctagggctgggaagcgtgctgatggctaccagcgccataacaacagcggtgggactgggaatattaatcatcgcccggatcgcctacgggctgaccgtgtcggcaatggtgccagcctgtcaggtctgggcattgcagagagctggagaagggaatcgcatggccgctctggcaaccatcagctccggcctgagttgcggcaggctattcgggccgctgtgcgcggcagcaatgctggccattcatcctctggcgccactggggctgctgatggcagccccagtgctggcgctgctgatgctgctgcggttgcccggcacaccaccacagcccacaccggagtgcaagagcgtcagtctgaagcgggattgtctgccttatctgctttgcgcaatattactggctgcggcggtgagcatgatgcagcttggactttcgcctgcccttactcgccagttcgccacggataccaccgccattagccaacaggtggcctggctgttgggtctgtccgcagtagctgcgcttatcgcgcagttcggggtactccgtccgcagcgcctgactccggtggccctgctcctgagtgccggagtgttgatgagtggtggtctggctatcatgctctccgaacagctatggttgttttacccgggctgtgcagtgctgtcatttggagcagctctggcaacacccgcttatcaacttctactgaatgataagctggctgatggcgcaggcgcgggctggctcgctaccagtcacacacttggctatggactgtgcgctttgctggtgccgctggtatcgaaaacaggtgtcgcaatcgcgctgattatggcagcattatttgcaactatattatttaccattgtgtctgtatttatctggcattaccgtactatcaaataa

SEQ ID NO: 31417 - DNA, 159 bp, Escherichia coli; identical to SEQ ID NO: 5044

SEQ ID NO: 31418 - DNA, 240 bp, Escherichia coli
atgacgttgaagtacggtaataagagcgttccattcggtgcaattgtcacacatggagagaataaaaatggcagcattgtcgcggaaaacggtcaggtttatctgactggacttccacagtcagggaaattacaggtttcatggggcaaagataaaaactcaaactgtattgtcgagtacaagcttcctgaagtttctcctggtaccttactgaaccagcagacagcaatctgtcgctaa

SEQ ID NO: 31419 - DNA, 465 bp, Escherichia coli
gtgctgctggcgcatcagcaaaatattcttgtccagatgcttggggatctgccggtcggatttatttaccgtgactgtcagggcagcgcttttatgcctcacgcgacagactggctcgattctattggcgaggcgcaggcggaaaatattttcacccatgagcagttgctgcgctatttcccttattacctgctggttaactccacttttgctgtgaccgctgcgctgggggctgccgggctggacagcgaatcgaatctgatggctcgtgtacgagcatcgctggctgaagtgcgtgatcaggtgactcataaaacctgtctcaactacgtgctggaaagtccgtacttgaacgtaaaaggtaactttttctgttatctgaacgatcataacgagaacaccattgttgacccttcggtgatctatttcgatttcgctaacccgctgcaggctcaggaggtctga

SEQ ID NO: 31420 - DNA, 198 bp, Escherichia coli
atgatgggcgcggggtggatgcgggacgtaccctgctttcagggcaggatggtacaagtttttctcattacggaggtaatttcgacattgggtctggtcattcaatcaataactatgaccaaattgtttctaaccaaccaggattttcccgtttttcatttgcagggccttcacgaggtgatggggttaattatgtaa

SEQ ID NO: 31421 - DNA, 222 bp, Escherichia coli
atggacgacattgtgtctgcaggacctattgcagttgcgacatttgttggtttattggtagggctttttcaaacggtaacacagttgcaagaacagacgttgccatttggcgtcaaattattgtgcgtaagtatttgcttttttttaatgagcggatggtatggtgaaaaattatattcgtttggtatcgaaatgctgaatttagcattcgcgagaggatag

SEQ ID NO: 31422 - DNA, 132 bp, Escherichia coli
atgatgggcgcggggtggatgctggccgcgctttgcttaattggcagccacacacaattttggaccatgcacactatatggaattatggacaggggacggactcgccgcaggaagtgcacgggaaggcgtaa

SEQ ID NO: 31423 - DNA, 198 bp, Escherichia coli; identical to SEQ ID NO: 31420

SEQ ID NO: 31424 - DNA, 198 bp, Escherichia coli; identical to SEQ ID NO: 31420

SEQ ID NO: 31425 - DNA, 339 bp, Escherichia coli
atgaaaaagtttatatttgcgatagtctgcattgcactttcttcctcagccatagccgctgagaagtttaaagagatagacggcgctgcatatggtgacaagtggcctctaacctttgaaaaggcaaaggtatcatgtgttaaccgtgcttatgcttttgtgtatgacatcaaaactgatgatagatatcctctgaatggcatggcggtagatgctgttaaatcaggaaagctggaggggtctaacttagatgacgtatggaaggatgaccctgagtatgacggcgttaaaatttcaatttcaccggtgattgatgccgctacagccctttgtaattaa

SEQ ID NO: 31426 - DNA, 846 bp, Escherichia coli
atgtctaaaaatgatgttaatgcgtctgccgcattggaacgtgtcctttctgcatacggctttaagcagcaaaaggaactagccgaaaggcttggcatacatgcaaacaacgtgagtagctggcttgctagaaacgtaatccctagcaacgttttcgttgagtgtgctcttgatactggagctgacctgcgatggctaattaatggtgagcttgcaaatgcaagatttgaagtggtgaaaactaagcttaaaggtaagcaactctatgatgaaatcatggcaaatggagggagggcggttctgcgtcggattctcgatgcgtatggttttactctgcaaaaagagcttggagatttattaggtatatcttccggcactataagcacttgggttagacgcgattttttccccggtgacgtggttgtcacttgcgcccttgatactggcgtatcgttagaatggttatcaaccggaaaaggccagatgcgtaacagtaatgatggtgaaccggcaaatgctttaacgattagaaagtgccgcctcgaggctggcgaactcaaagatatcggacgctggactcctgatatatctatggttccatcaaatactgatgatttagtgtttattgatggtgtgagcacatcttggcttgttgatagttctaactcgaagataggaaatggtcgctggcttattggtattgatggcgcactcgatgtttttgacgtaatcaggttgccaggcggaaaggtcaggttatcaaataagtctgctgagtttgaatgtaatatttcagatatcacaccatcaggtgcggttatttttactttggaaaagcatgtttaa

SEQ ID NO: 31427 - DNA, 711 bp, Escherichia coli
atgaaaccaagcacacactgcgtttattgcggtgttctcatgaataaggttgaaaatcacccccactgccgctcagttgaacacatgattccgcaagtttcagtctccattcatagaaccaacggcgaaggtgatttctatgtatgcaaaaagtgcaatggcgataaaagccgaattgacgaggtgttaggtgtcatttgccgcatggtaggagagcactcaacaggcagctttgatgctgttaataaattccataatgcgcttaaaagaaaagactcgaaatttcgtgaagcattccagagtgttaggcatacaaaaaaaggtgcgcagataacattacccctaaatggtagggagatttaccaatacggcacctggttagccaagggagtatttttcttagagtatgggcaattgttgactgtagataaattaatttggattaatatcgttcgccacgatgaagtaatggctattaaagaaatgtatagaaatgaacgtggctctgaggcatttgatgatttatcgaagaatagcaacattccaaatattaatggcgagtcgtttctgattgttggccaggatgcccgagaaatgtttatttgcttcaatagagtaatgatgtttcatataaagatactggatagaacgtttattaatcaaaaaaaatgcaaaaaagccctactcaatctggaaaaaagggttcgataa

SEQ ID NO: 31428 - DNA, 225 bp, Escherichia coli
atggataactatcatattacaaaagatggcgataagtggaagttgcaaaaagagggcaatgaccgccctagcaagaccgcgcccacaaaggccgagctgattaaaacaacatctgagtttatgtcgaacaaaacaggctcggtcaaaattcacaaggaagatgggaaaattcaggaagaacgcacttatcagagaaaagatgatcctaaaaagtctaagggctaa

SEQ ID NO: 31429 - DNA, 270 bp, Escherichia coli
atggacgaatcaagaaagcagtttgaagaatggtttgaaaattacaccggatgtgatcctaaaaataaaatatacgccaatatggttgagatgtattggcaagcgtggcaggcatcgcgagcagctattgaaataaccgcgccaaagtttatcgacagcagagaagcattagccaaagggtttactgttgattattccaatggcttcggcgatggaatggatgcttatgaggaaaacatccgcgccgttggagtcaaagtgaaggagtga

SEQ ID NO: 31430 - DNA, 186 bp, Escherichia coli
atgagtcgacgaagtagctttttggggtttgtaatattcctgttctgcactggttacatcgtaatctggtcaatttcgaacattgaccgtggcggggaatatctcattgtaatgttctttcctttgtttcttgggtggtacgccgcaaggttgctggaagaatggggttacaggcataaaaaataa

SEQ ID NO: 31431 - DNA, 543 bp, Escherichia coli
gtgaaaacgggggctgaagccatccgggcgctggccacacagctcccggcgtttcgtcagaaactgagcgacggctggtatcaggtacggattgccgggcgtgatacaggtgaaacggaattatcagcccgtcttaatgaaccgctggcaaatggtgctgtgatccatatcgtgccgcgtctggcaggagccaaaagtggcggtgtgtttcaggctgtgctgggggcggctgttatggcggttgctatatggatgccgggggtaggaattatggcgagtaatctgctgttttctctcggtgccagtatgacgcttggcggtgttgcacagatgctggcccctaaacccaaaaccccccgcacacagacaacggataacggcaaacagaacacctatttttcttcactggataatatggttgcccagggcaatgttctgcccgttctgtacggtgaaatgcgcgtgggatcacgtgtggtatctcaggagatcagcacagcagatgaaggtgatggtggtcaggttgtggtgattggtcgctga

SEQ ID NO: 31432 - DNA, 1479 bp, Escherichia coli
atggaaactcagtggacaaggatgaccgccgatgaagcggcagaaattatccagcataacgacatggtggcatttagcggctttaccccggcgggttcgccgaaagcccttcccaccgcgattgcccgcagagctaacgaacagcatgaggccaaaaagccgtatcaaatccgcctgctgacgggggcgtcaatcagcgccgccgctgacgatgtactttctgacgccgatgctgtttcctggcgtgcgccatatcaaacatcgtccggtttacgtaaaaagatcaatcagggcgcggtgagtttcgttgacctgcatttgagcgaagtggcgcaaatggtcaattacggtttcttcggcgaaattgatgttgccgtcattgaagcatcggcactggcaccggatggtcgagtctggttaaccagcgggatcggtaatgcgccgacctggctgctgcgggcgaagaaagtgatcattgaactcaatcactatcacgatccgcgcgttgcagaactggcagatattgtgattcctggcgcaccaccgcggcgcaatagcgtgtcgatcttccatgcaatggatcgcgtcggtacccgctatgtgcaaatcgatccgaaaaagattgtcgccgtcgtggaaaccaacttgcccgacgccggtaatatgctggataagcaaaatcccatgtgccagcagattgccgataacgtggtcacgttcttgttgcaggaaatggcgcatgggcgtattccgccggaatttctgccgctgcaaagtggcgtgggcaacatcaataatgcggtaatggcgcgtctgggggaaaatccggaaattcctccgttcatgatgtattcggaagtgctacaggaatcggtggtgcatttactggaaacgggcaaaatcagcggggccagcgcctccagcctgactatctcggccgattccctgcgcaagatttacgacaatatggattactttgccagccgcattgtgttgcgtccgcaggagatttccaataacccggaaatcatccgtcgtctgggcgtcatcgctctgaacgtcggcctggagtttgatatttacgggcatgccaactcaacgcacgtagccggggtcgatctgatgaacggcatcggtggcagcggtgattttgaacgcaacgcgtatctgtcgatctttatggccccgtcgattgctaaagaaggcaagatctcaaccgtcgtgccaatgtgcagccatgttgatcacagcgaacacagcgtcaaagtgatcatcaccgaacaaggcatcgccgatctgcgtggtctttccccgcttcaacgcgcccgcactatcattgataattgtgcacatcctatgtatcgggattatctgcatcgctatctggaaaatgcgcccggcggacatattcaccacgatcttagccacgtcttcgatttacaccgtaatttaattgcaaccggctcgatgctgggttaa

SEQ ID NO: 31433 - DNA, 372 bp, Escherichia coli
atgaataaaaaaacgcttatgtttgattttattttggtcagaccccgaatctacattaatgacaatatctcgctgggaccggggaaaatcgatcttttacgagctatagatgggtttcattccctttcagctgccgcaaaagatctgggaatcccctataaaagggcgtggctcctgattgatacactcaataaaggcataggtaagccggtggtaattacatcaacaggcggcagtaaaggtggaggctcggttttgacaccacttggcaagaaactgcttacatggtacgacaagttagaggctaaccttaacgagcaatcacagcaggacttgcaggagctcgaaaaaattatcttcggagatagctag

SEQ ID NO: 31434 - DNA, 807 bp, Escherichia coli
atgtcgtcagtttcaaacaggaatggtaaaggttttttctcaggcgcggtaataggggctttaggtgggttgattggcctcggaggggctgaatttcgccttcccgtactgatcggtagtttcaaaatcccttctctggaagccgtcatttttaacaaagcaatgagtctcgccgtggtggctattgctttaattttccgaacaaaatctatatcttttgatcagttggtggcgcatcttgatattgtcataaatttgctggcaggaagtcttattggagcatggtgggccgcaggtcgtgccataaagatgtccagaatctggctggacagaatcattctgatcctgcttgttttactgtcttttgtcatgctctctgaagcctggatgccgttgcacagtatttcaggcgggttatttcaacctggccttgccatgattattgtgggggtggtatcagggggctttatcgggatagtcgcagcattgctcggagtggctggcggagagcttcttatccccacaatcgttatccttttcggggcagatattaaactggccggaagtctttcactgatgattagcctgccaacaatgattgttggcttttcccgttatataaatgcagatgctttcctgattctgaagcaagaaaggacactgtttgtatggatggttattggttcagtaattggtgcagcaattggtggacttatggtcggcttgttcccacttaaagcccttatgactttacttggtgtgatccttcttatttctgccatcaaaactttcaaacacacccgataa

SEQ ID NO: 31435 - DNA, 1110 bp, Escherichia coli
atggttgattttccaacagttggttttgttggctggaatccttttcaatttttgcatgttaaagaattggccaaagctatacctggatctgtatttataattgaaaaaaggaaaaattatattaaagatttttcatgtaacttattgcataacacagatgttccggtaatagtttgggacagatcaaagatggcggaactggatgggttatttgacataataatctgccaaacaatatttttcagaatggaaacatttgttaaaacaaagatcgtaatgattcagtatggctatgcaaaagagccccataactatggagcatggcgttctttaggagatctttgtttaacatatggtgattatgccagaaaaaaaattagtcatttctgcccttctgtaagcattggtaatccaagatgtgataaatggcataaggtcattaataataaagatgtgcaagttccagaaaataataatgtaacgttaaaaaaaatattgtatgtgcctacatggggcgatttatccagcatagactattatcttgatgaggttattgccctgtcaagaaactatactgtaatgctaaaattgcatcataatacagattttttggaaggtgaaagaaagaaaaaaataaatcatagaattcatttctatggagctaatgatgatgtccttgagttgataaatgaatctgatattgtgatttctgattatagcggggcaatatttgacgctgtttattttaaaaaaccaataatactattgaataataaaaatcatcatgaaaatgatagtttaaaaatagatgaatttagtatcgaatatgctgctcggcctcatttggggcatgaggttaataatcctgaagagttgtttggtgctgtgcagtatgtattaaataacaaagaatatttttctaaaatacatttgtcgttaagaaatgaattgtttcttgataatggaaatgctattgagctggctataaaagcaatcagggagttgcactctgggagttatgagttaaatcagcaacaactatatatgcgcgtaacaacaaaagatttgcttgctaccaaaagaaagttaaacatagcattaaagaaataa

SEQ ID NO: 31436 - DNA, 492 bp, Escherichia coli
atgaagccacgaaatattaataatagcgtaccactgcaaccattagttcctgatcaggagaacaaaaataagaaaaatgaagagaaatacgtgaatccagttaaaattacgatgaggtctggtttaaattatattgaacaagaatctcttggaggaaaatatctaacacatgatttgtcaataaagatagcggatatttctgaagaaataattcagcaagcaatattatcggctatgagcatatataaatttccgataacagatgatttaatgagtatggctacaaatgaactcataaaactggccaaaatagagaataatttagacctgaataaattctctactatatgcaccgacgttctatcccccctcgtcaccagacataataaagaaaaaaaaccagacgacttactgcccttcgcaaaaatcccctttttaattttcatcgaaaaaatggaaattgataatatgaatcaaggtcatgcatattaa

SEQ ID NO: 31437 - DNA, 288 bp, Escherichia coli
atgatcgtagtaaagaaattgcaaatcattaaaatcaaagtaaaatctattgccatttggattaatagaacgatatgtttttattttcccattttcatcgaaacgtctatagcaatcaaggttattatagatattgtgcatgaaattcactttatcaatatctatttcattagctatatctttttttctattgtacaaaacattgtctatgatatattttatagtttcatcattaagttgaaaatcttttacatcatcaccaggcatgatgttatgcagattaactaa

SEQ ID NO: 31438 - DNA, 1926 bp, Escherichia coli
atgagcaaaatatcagatttgaattattctcaacacattacattagccgacaattttaaacaaaaaaatgaagccctagatacctggtatgtgggaatgaatgattttgcccgaattgccggggggcagaatagcagaagcaatattctttctcctggagcatttttggagtttttggcaaagatatttaccctgggttatgtggattttagcaaacgctccaacgaagcgggtagaaatatgatggctcatattgagtcctcatcttattctaaagatactgatggcaatgaaaaaatgaagttttacatgaataatcctgaaggggagcgagcggatttatctaaggtgaagatagaaattacacttgcctcagcttctactaaagggattcgtgaaggacatacagtcattatatttaaacaatctgatggttcgactaatcgttatgaagggaagtcttttgaaagaaaagatgatagttcattacacctgattactaacaaggttctggcgtgttaccaacgcgaagctaacaaggaaatagcgcgtctattaaataatcatcagaagttaaataatcatcagaagttaaataatcatcataagttaaataatctacagaagttaaataatctacagaagttaaataatatacaggggttaaatgattcgcaggggttaaatgattcgcaggggttaaatgattcgcaggggttaaatgattcgcaggggttaaatgattctcaggggttaaatgattcgcaggggttaaatgattcgcaggggttaaatgattctcaggatttaaatgattctcaggatttaaatgattctcaggagttaaataactcgcaggagttaaataattctcaggacttaaataactcgcaggtgagttgtaaaggttcagttgattctacgattacggatttattagaaaaaccattgaataatgcattattagcaataaggaaagaacatctgctattaatgcctcatgtatgtgatgaatcgatatcatacttactgggcgaaaatggtatacttgaagaaatagataagctctacgaatcaaatgatcacggaattgataatgacaaaaaaggtaacaatgaaattaatgacatcatgattaacctgtctcatattcttattgattccttagatgatgcaaaggttaaccttacaccggtcatccattcgatgttggtgacttttttagaattgccatataataatgatgtaaaaatactggaatggtgttttaataaaagcatgcaatattttgatgattctgcaaagataaagcatgcatgctccgtaataaatcatattaatcttcgcagcgatcagtctaaaatagctgaggcattatttttcaatctcgataaagaaccctataaaaatagccctgaattacaggagttgatttggaataagttggttgtatatgtcaatgattttaatttaagtaatcaagaaaaatcacgcttaatactaaggttatttgatgatgttaagttgctatttaatgaagtgcctgtcagcattttagtaaatgacatttttttgaaggtttttttcatgaaacaacctgattttgctaagcggtacttctatcaattacttaagaagtatgagggcgaacagctgtatcttaatgagttagggtatgtttttggtgatgaagaaaaaacaaaagaaattgtaaataaacttccgggttatgacgttaagatttttgaagaaaagatcgataatgaattaaaaattagaacaagaatgatgaaaatcctccagaatggcaaaattaatatatatgaatatattaataaagaacagctagaaaaattaaatcctccggaaaatttacgtataacaatagaaaaatttggctggaagaaaaaaactatcactgcataa

SEQ ID NO: 31439 - DNA, 999 bp, Escherichia coli
atgccccatgttgatgctgttatttcattaactcataagcaaaaagaacatattttattacaatataaagaccgtgataacctttatgtaattggtaatcctttaaccacttttaatatagataaaaatattcagcgagatccatatctctgtgtcgcgatatgtcgtctagtcccaatgaaaaacataaaagaaatgatagatattttttgggatgctgtattgattaataataaattgaaacttgaaatatggggggatggggatgaaaaagatgatcttcagaattatgttgaaagtttaggtgcatctggtcatattacgtttaaaggttttacaagtaaccccggtattatctttcaaaaagctgcaatgagtttagctacttccttatttgagggatttggcgtgagttttgctgaatcgctatcattaggaactccagtaatatcatatagaacactttatggaccagaggagattataacaaatggagttgatggctttttagttgacaatcgtaaggaatttattaataaaattattgagttagcaggaaacacaacattgcaacatcatatggggaaaaatggtatacataatatgaaaaaattctcaaaagaaaatattataaacaaatggttatcattgtttaataccttagaagataaaggtgctaaaataaattgcattggaaataaatcggaatctaatgatttcttttacaatgtaacaggcagtgcgtatggttgggtgtatgttaagcatagtaatcaaatggaaaaatgtctaaagaatggtcgaaatatactagtggcaaaagtattttttaataaagattttaaaggccagaaggttgaaatacgtgaaggtgattacaaaataacatcacttgagtatattaaagaacgtgatgacttccgctttaaactaagtagagggaataatgtttattcaggtgctttaggaatgagatgtcttaaaatgagcttggtttaa

SEQ ID NO: 31440 - DNA, 372 bp, Escherichia coli
atgaaaaaatctgaaggtttgcagtcgctgcagcaatcgctttctggcctgccgcagtgggcatcagagcgtattctgcaacaggtaaaccagcttactcactatgagccggtgatcggcattatggggaaaaccgggtcgggtaaatcatcactctgtaatgcgctgtttgccggaaaaatctctccggtcagcgatgtgagcgcctgcacacgcgaacctttgcgctttcgcctgcaagttggcgaacgctttatgaccatagtagatctgcccggtgtcggtgaaagcaaaagtcgtgatgcggaatatgctgcgatgtatcgccagcaactgacgcaactcgatctggtacgtaaccggctcatttaa

SEQ ID NO: 31441 - DNA, 312 bp, Escherichia coli; identical to SEQ ID NO: 26039

SEQ ID NO: 31442 - DNA, 1128 bp, Escherichia coli; identical to SEQ ID NO: 28094

SEQ ID NO: 31443 - DNA, 168 bp, Escherichia coli
atgctgtcggtgtgcttgaggtttttgctgccggcaattttgcaggtacgcaacgctttaccacaagagacggcaatgtatacatgcgtaaactcgccaataagtggaatggcactgatggtccgtggggcgtatggcgtcacactcaatcagctacccgccctttga

SEQ ID NO: 31444 - DNA, 894 bp, Escherichia coli
  misc_feature (871)..(880): n is a, c, g, or t
atgttatataatataccttgtcgaatttatatcctttccactctgtcattatgcatttctgggatagtttctactgcaaccgcaacttcttcagaaacaaaaatcagcaacgaagagacgctcgtcgtgaccacgaatcgttcggcaagcaacctttgggaaagcccggcgactatacaggttattgaccaacaaacattgcagaactccaccaatgcctccatagccgataatttgcaggacatccccggagtagagataacagacaactccttggcaggccgtaaacaaatccgcattcgtggcgaagcatcctcccgtgttttaattctcattgatggtcaggaggtaacttatcagcgcgccggagataattatggtgtgggactgttgatagatgagtctgcgctggagcgtgttgaggtagtgaaaggtccatattccgtactgtacggttcacaggcaattggcggtattgttaacttcataaccaaaaagggaggtgacaaacttgcatctggagttgtgaaagctgtttataattccgcaacagcaggctgggaagaatcaatcgcggtccaggggagcatcggtggatttgattatcgcatcaacggtagttattctgatcagggcaatcgtgatacgccggatggacgtctgccgaataccaactatcgtaacaatagtcagggtgtatggttgggttataactccggaaaccatcgttttggcctctcgcttgatcgctacagactcgcgacgcaaacttactatgaggatccagacggaagctatgaggcatttagtgtcaaaatacctaaacttgaacgagagaaagttggggtattctatgacacagacgtggacnnnnnnnnnngacgtggacggtga

SEQ ID NO: 31445 - DNA, 219 bp, Escherichia coli
  misc_feature (207)..(216): n is a, c, g, or t
atggacattgcagttattggttccaatatggtggatctcattacttacacgaatcagatgcctaaagaaggagaaactctggaagcacctgccttcaaaatcggatgtggtgggaaaggtgctaatcaagcggtggcggcggctaaattgaattcaaaagtcctgatgctgactaaagtaggtgatgatatttttgcggataatacnnnnnnnnnntaa

SEQ ID NO: 31446 - DNA, 150 bp, Escherichia coli
atgaatattgaaaacttaaaaacaaaagcagaagcagatatttctgaatataagaaaaagaccgggaaagaagttaccagtattcagtttaccgcacgggaaaaaatgacgggtcttgaaagctatgatgtcaagattaatttaatctga

SEQ ID NO: 31447 - DNA, 243 bp, Escherichia coli
atgtttggaacagcaaaagaaatcatcgagaaactgaaaaactatccagaagacgaacccttactcatggttatgtggcacaaagaagatattgctgaagtaaggacagatctcactgatgaacaatgcgtacaggtgatgcaaaaaatcagacaatgccataacgctgatgtcggcgttaattgggaggttatatcaactacggcgaatgagttgtttccgaacggggtggtaaaatgctga

SEQ ID NO: 31448 - DNA, 399 bp, Escherichia coli
atgaaatatgcaccattggcactaatattttttgtgctttctgctaatgccacgccagttgaagagcctaacactatcgtgtacccacgatgcatgaaaatagatccggaaacacacaagcaattacctggttacgatattgttatggatatagggaataaatttaaaatcgtttccccaaatgggaattcggtgatatccatctcgcttgcccaaagtgaaaaagataggaacatgttcgacgcctcagtcggcgatgtttacttctctcgttaccatgttcaacctgatgggaactttctatactcagcctggagtgaaaaggcgaaagttacagtgctgtgtaatggtaaaagcggtgagcggcattacgttgaccctattcatttcgagaactga

SEQ ID NO: 31449 - DNA, 231 bp, Escherichia coli
atgtttgttcttatcgctggcgttaacgtgcgcaatgaatattttgttaatcgcatcgctgggatcgctggttacgctgggcgctcagtcgagtttatcgatgaaacaacgcgtaaaattgatttattaaatgatattgagcgttcggatattggaatcaacgacgctgatatatttttaatgttaaaagcgtttgtagaaatgggatttaaaatcagtttacacaaataa

SEQ ID NO: 31450 - DNA, 735 bp, Escherichia coli
atgccgagtacgaagtacaaaatcacagaagaatggttacgtcagcgttacatggttgacctgatgagaaaagaagacattgccgccgaagctggttgcagcaaggcaaatattgaccgcttattagccaaatgggggatcaggcgcggaaacgcgcggatctccgctaccccagcctggaatcgtggcaaaaacaaaaataatgacgaacgtatgaagcgactctccgaagcccggactggcactggcaaccctatgtatgggaaaacctcgtggaatgccggtctgcgtgctgatatcgatgagcgagtggccaccgtttcgaaaaagctaaccgacagaacaatccgcgcggagacgaaggaaaagctggcggctgccaaacgcggaaagatcggagaagaagcgaacaactacaaaggtggcatcatcgtaaaaaccaacggctacatgatgcagctggttggtaacaatggagtttcgcaatacgaatacgttcatcggttgatagcgaaagaacgtctcggtcgggagctacgtgacgatgaacatgtccaccatattaaccgcgatacggtagataacgcccctgggaatctggtggcacttccagaagacgcccacattcgcctgcatagcgaaatgcgtgaaaaggtatggagctgggagcgccagcgggactggctggcctccaatgggtatgagttcgtgaagattgatgaggtgactgaatga

SEQ ID NO: 31451 - DNA, 1170 bp, Escherichia coli
atgaaaattaccagtgtagttgaagagagcaatggcctgacgcacgaacgagccgaagaaatctggaatatgtttgagaaatccggcgcgtatgccttcaacaaatcacactccgttgcttattctttaatcagttatcagtctatgtggctaaagacgcactaccctgctgagttcttcgcagctgcgctcaccattctgggcgaggataagcatcaggggctggtgaaggatgcgctgacctatggcattcgcgtattgccaccagacgttaatgtgtcatctaaccgaattgagatccgcacactcgaagacggcagtcaggcactgtatgcgccattctctgctgtgaaaggctgttctgaaaatggttgtcaggcaattatgcgtgcgcgtgagaaagttggtggcaaattcgagtcagtggcacaattcgatgaagcggtcgagaagcgtgcatgtaacagtcgtgtacgcgagtcgcttcataaagtaggggcttttgcgtcaattgagccaggcagtctgccagcaactgatcctgaacgactgcgcgaccaggctgagctgatgggcaatctcatcattgacgctgttaaagcatcacgtccgttcgaaatgaatcctaagcgttctgccgaaatcaacgtactcatgacacgtatggcggctgaaatgggcttgggtgaggagttgatacgcccgactattggtattaaacccaaaatcatgatcattctggacaatgcgaacggcaatgacgctcgtaccggctacttcatggagaacggatacgacgactttaaggcaaaactactgacagttggagatctgcgcatgggcgatctttatgtcacgggtgtttgtaagaaggttaaggacaaagagaaagactataccaaagacgagataggccagttcacagactttatgcgggaagaaattaatcttgtacgaccaacctacattttgacgtgtggtagtcgttcaaccgcactatttaacaataagagtaaaccatcagatctgattggtcgtaaggagtacttcccagagcttgatgcaaccgtcttctacggatttaacccgaatatcctgtacttccgaccggaagaaggagagcgactggaggccattctggctgatatcgcggagacaataaataagtaa

SEQ ID NO: 31452 - DNA, 201 bp, Escherichia coli
atgatcaaactctatcttatggcagtagttacaggtctatctgtagttttcatctactgtttgctggttccgtcgctgatttctaccaagagtgatttagccgtcatgtttggagttatcgttgcttttggtgctcctgtgatcgggtttattgcaggtcgtaagtttctaaagtcactcatcaattcgaaggagaagtaa

SEQ ID NO: 31453 - DNA, 1206 bp, Escherichia coli
atgagcgagatgagttatctggaaaaattgctggatggggttgaggttgagtggaagacacttgggcaaacttgcaaaattgaaacaggaaagcttaatgcgaatgcggctgttgatgatggagagtatatgttcttcacgacagccaaagagacaagcaaaattgataaattccgctgggatacagaggcattgctgattgcaggcaatgcgaatgttggtgaggtgaagcattacatcggcaagtttgaggcttatcagcgcacctatgttctgacaaatttcgacgaaaatgtaagtgttagatttttgtattttgtgcttagccatagcctgaagaaatatctcgaggaaagaacaaatagcgcggcaatgacatatatcgtgctatcaaccttagagaatttccctatccccatcccctgcccggataatccggaaaaatcccttgccatccagtctgaaatcgttcggattctggataaatttactgcacttaccgctgagcttaccgctgagcttaacatgcgtaaaaaacagtacaactactatcgcgaccagttgttgagttttaaagatggtgaggttgagtggaagactttgggggaaattggagattttacatatggatatgcagccaaagccatggattcaggagatgcccgtttcgtgagaattactgacataaataaagacgggaagctatcgaaagaaaacccaatgtacgttgaattaaatgaggaaaatgagaaatataccttagacaaaaatgatttactcatggcaagaactggggcaacctttggtaaaacaatgatttttgaagaaaattatccagcagtatacgctggttttttaataaagttgaacctaaataaaacgattattaatgccaaatattactggcactttgcacaaagtgattttttttgggaacaggctaataaattagtatctggtggtgggcaaccacagtttaatgctaatgcactgaaacaagtcagagtacctattccatacccatctcaccctcaaaaatctttagacgaacaggggcgtattgtggatattctggataagtttgatgcaatcgcagcttccatcaccgaaggtcttccgcgtgaaatcgagttgcgccagaaacaatacgaatactaccgtgatttactgttcagtttcccgaaacctgaaactgccagtaattaa

SEQ ID NO: 31454 - DNA, 138 bp, Escherichia coli
atgattgtattttttcagtttctaagtgcatttttaaatgcgcctgttcttagccaagtgctggcgattgtcttcatcgtggttctgatatggtttttcaagtcagtgataaacagaggcgtgcgctggcttatttaa

SEQ ID NO: 31455 - DNA, 2199 bp, Escherichia coli
atgagttttaacgcaaaggatatgacccagggcggtcagattgcgtccatgcgtatccgcatgttcagccagatcgccaatatcatgctttactgcctgtttatttttttctggatactcgttggtctggttttatgggtaaaaataagctggcagacgtttgtgaacggctgtatttactggtggtgtaccacgctggaaggcatgcgggatttaatcaagtcccagccagtatatgagatccagtattacggcaaaaccttccggatgaacgcggctcaggtactgcatgataaatacatgatctggtgcggtgagcagctatggtctgcattcgttctggcgtctgtcgtggccctggttatttgcctgatcaccttctttgttgtctcctggattctggggcgtcagggtaaacaacagagcgaaaatgaagtcacaggtggtcgtcagctgacagacaatccgaaagacgttgcccggatgctgaaaaaagacggcaaggactccgatatccggattggcgacctgccgattatccgggattccgaaatccagaacttctgtctgcacggcacggtcggggccggtaagtcggaggttatccgtcgtctggccaactacgcccgtcagcgcggtgatatggtggtgatttatgaccgttcaggggaatttgttaaaagttactatgatccctccatcgataaaatcctgaatccgctggatgcccgctgtgccgcatgggatttgtggaaggagtgcctgacacagccggattttgataataccgcaaatactctgatccctatgggaacaaaagaagacccgttctggcagggttcaggacgtaccatttttgcggaagcggcgtacctgatgcgtaatgaccccaaccgcagctacagcaaactggtggacacactgctttccatcaaaattgaaaaactgcgtaccttcctgcgtaattcaccggcggccaacctggtggaagagaaaattgagaaaacggcaatttccatccgtgctgtgctgaccaactacgtgaaagctatccgttacctgcaggggattgagcataacggtgagcccttcaccatccgtgactggatgcggggtgtccgggaagatcagaaaaacggctggctgtttatttcgtcgaatgccgacacccatgcctccctgaaaccggtgatctccatgtggctgtccattgccattcgtggtctgctggcaatgggagaaaatcgtaaccgtcgtgtgtggtttttctgtgacgagttacccacgttacacaaactgccggacctggtggagatcctgccggaagcccgtaagttcggtggctgttatgtgtttggtatccagtcctatgcccagctggaagatatctacggtgagaaagcggctgccacgctgtttgacgtcatgaacacccgtgcctttttccgttctcccagccataagattgcagagttcgctgccggtgagattggtgagaaagagcacctgaaagccagtctgcagtattcctacggtgctgaccccgtgcgtgacggggtatcgaccggtaaggatatggagcgccagacgctggtcagttattccgacattcagtctctgccggatctgacctgttatgtcaccctgcccggaccgtatccggcagtaaaactctcactgaaatatcaggcacgtccgaaggttgcccctgagtttattccgcgtgacatcaacccggaaatggagaaccgtctgagtgccgtacttgccgcaagggaagcagaaggtcgtcagatggccagcctcttcgaaccggatgtgccggaagttgtttccgaagaagacgtgactcaggctgaacagccgcaacagccgcaacagccgcaacagccgcaacagccgcaacagccgcaacagccggtgtctcctgccatcaacgataagaagtcagattcaggtgtgaatattccggcaggggggatcgagcaggagctgaaaatgaaaccggaagaagagatggaacagcaactgccacccgggatcagtgaatccggtgaagtggtggatatggccgcttatgaggcatggcaacaggaaaatcatccggacatccagcagcagatgcagcgtcgtgaagaggtgaacattaatgtgcaccgggagcgtggggaggatgttgagccgggagatgatttctga

SEQ ID NO: 31456 - DNA, 981 bp, Escherichia coli
gtgattcgcaaattcattgaaataaaaataatcaaggattctgataaagacgagatttctctaacaagattagaattatattcatgcattaaatacattgataataaaaccctatctcttatactaaggaaagaagataaaaaactattatcgctgtctgttcaacccaaagaattagattggttaataaatactgtactgcaaaacctagcgaagtcatatagcaagttcgctacgtttctcaaccctatagaaggaaagttaatcaacgcattaaaactactatctttaatgaaaataaccacagagcaagacgcggtagtattaaaaacattaaacgacactttaaagtcctcataccacaacctagcattctatgatgctatttccgaatatgtcgttataaggtacaacacccacagtgaaactttatccactgacagcataaaaactttaatatacacgattctcgataagttaataagtagaaaccttggtaggtatgaggtgatagctatagtcaatagaggccttgctaatattttttcagtagccaaaaaactgggcgttaatatagaagacgacagcaaggtcgataaattacttcatgaaattagttcttatccgaatacagataaagcaagagctgctgaaacaatactatatgatctgtacagaatatcaacagaaaagaatagagataaaataaaatcatttatcaaaaatatttccacaactgatttcaatgaagaaagaaagattaaatttgaattatttttattagcatcagagatttcagacagctatgacaatcttcctgagaaagtatccaagcttgttgaaaactataaaggatttagatttaactcagaagcagagacaatcagaggtttattacgctatatagtcaacacacggaaattaagtgatttctcacaagcacttttgaagattgaagagataataaataattacaaataa

SEQ ID NO: 31457 - DNA, 174 bp, Escherichia coli; identical to SEQ ID NO: 22511

SEQ ID NO: 31458 - DNA, 510 bp, Escherichia coli
atgaaactggcagcgggtgaaccacctgccagacgtggttatcctgcttctgtttttgacagtttgcctcgcttactggagaggccgggaccaacactaaaaggaagtattactgccttttataccgtattactggagggggaggatgaatcagacccactgggggatgaaattcgctcaatccttgatggccatatctatctaagtcgcaaactcgctgggcaaggtcattatccggcaatagatgttctaaaaagtgtgagtcgagtatttggtcaggtcactgatgaaaaacacagagataatgctgcacgggtaaggaagatcctcacaactttggaagatctacaggtgtttattgatttaggggaatatcgagctgggcaaaatgctgaaaatgattttgctatgaatgcacggcctaaactcacaaattggttgaaacagtcagttaatgaaaaaatgccaatgagtgaaacgctaaaagagcttgaacgaattgttaagtaa

SEQ ID NO: 31459 - DNA, 294 bp, Escherichia coli
gtggggcttacacgtactgcagttttgaaaccaacgggagagcagttaaccatacagatcagtgatgcctttcttggttcagttttgaatgcttctggtcaaattatggaaaggtttgtcccggacactccaggcgaaaggggaaatttacgcctgattgatgaactgccaccgtcgtatcaggaacgtcgagttattaatacaccactagagacacggataagagtcattgatggcgtactgacatgtggcattggtcaacgtgttgggattttcgcatacttcgcccactga

SEQ ID NO: 31460 - DNA, 171 bp, Escherichia coli
atgaaaaaattaaaactattaaataaatacagctacttacatagcataaacggctcgctgattgaagcagagcttgacgacgtttcagtgggcgaagtatgcgaaaatcccaacacgttgaccaatgccacatgtcagtacgccatcaatgactcttatccgtgtctctag

SEQ ID NO: 31461 - DNA, 315 bp, Escherichia coli
atgaccgtttgccccggctgcgcgacggcgaccgaagcctttaccgcgctcgaagcgggcgcgcaggcgctgaaaatattcccgtcatcggcttttgggccgcaatacatcaaagcgttaaaagcggtattaccgcaggacatcccggtctttgccgtaggcggtgtgacgccagaaaacctggcgcagtggatagacgcaggttgtgcaggggcaggcttaggcagcgatctctatcgcgccgggcagtccgtagaacgcaccgcgcagcaggcagcagcatttgttaaggcgtatcgagaggcagtgcaatga

SEQ ID NO: 31462 - DNA, 210 bp, Escherichia coli
atgacgatggtaaatggcgtcggcgcatgggttggctcgattctgagcggtatggcagtggattacttctcggtggatggcgtaaaagactggcataccatttggctgatgtttgcagggtatgctcttttcctcgcagtgatatttttctttgggtttaaatataaccatgaccctgaaaagataacgcatcgttcagttacacattaa

SEQ ID NO: 31463 - DNA, 906 bp, Escherichia coli
gtgacctcaccatttattcaacaaattgctgataaccgggtatgtcaggtactcacctgccttcctgaaaaatttgtggttgattttgcaaacggtattgatgttgcacaggagcatatcagcacggccggggggcgcacgttcttccagcgtttaaaagaaggtctgaccggcgaaggcgctgcacgccagaatgccatcaatgcgtcgcttgcacagggcgttgaggcgtccctgcgctggctgacggagctaacaacgtcgcttgccaccacaaattacgcaattacccgggtaaacgacagggtcagctcactggtcagtgatactgccaggctggtgcattattcggctgacacgcgggagcagttactcactctggcagaacaggttcatcagaaactgaatcatcttgaagaaaaactccaccgtgttgaccaggttcagcgggcgcagttacatcttgagcaggtattctcatggtggagcaccgggcgatacgcgtcattttcccccgccggacgctgttatgtggcgcttgaagagcttcgctggggcgcgtttggtgatgtgatacgtcagggtgaaacaggccaggttaatcagttactggatattctcagatataaatcattaacgcagatggcacaggagagtggtggtagcgcaacagtacggctgaactcactggactggcttggtggtcagagccgggagcaggcagataacgaatggtatgaagcgattaactggctgggggactggtgcagtgaagagcggcatcctgtgatctggtcaaccacacaggctgcagaacacttaccggctcgcatgccccgtctctgctcagcagagcgtctctctgaaagtatggtcgatgaaatatttctgaagggggctacatga

SEQ ID NO: 31464 - DNA, 147 bp, Escherichia coli; identical to SEQ ID NO: 8534

SEQ ID NO: 31465 - DNA, 534 bp, Escherichia coli
atggcacacgcacttaagctcggtgataaaatgatttcaatcaatctattacctatgaccctggttaacaaacctgacgcagtctcttttttacttgatgaaataaaggccaatgctctggtacctgaacaaatcatcgttgaatttactgaaagtgaagtcatatctcggtttgatgagtttgccgaagcggttaaatcgctaaaggcggccggtatcagtgtagcaattgatcattttggcgcaggttttgctggtttgttactcctgtcacgcttccagcctgacagaattaaaatcagtcaggaattgattaccaatgttcataaaagcggaccacggcaggcaattattcaggcgatcatgaaatgctgtacatcacttgaaattcaagtctctgctatgggcgtggcaacaccagaagagtggatgtggcttgaatctgcaggaattgagatgtttcagggagatctgttttccaaagctaaattgaatggtatcccttcagttgcgtggccggagaaaaaattgtag

SEQ ID NO: 31466 - DNA, 405 bp, Escherichia coli
atgcttaccacccttatttatcgtagccatatacgtggcgacgaacctgtcaaaaaaattgaagaaatggtttcgatagcaaatcgcaggaacatgcggtctgacgtaacagggatcttactgtttaatggttctcattttttccagcttctggaaggtccggaagaacaggttcaaatgatatatcgggccatatgccaggatccacggcactataatattgttgaactgttgtgcgattacgcgcctgctcgccgttttggcaaagcaggaatggaattatttgatttacgcctgcacgagcgagatgacgttttacaggccgtattcgacaaaggcacatcaaaatttcagctaacttatgatgacagagcgctacaattttttctccggccacgcaactga

SEQ ID NO: 31467 - DNA, 1218 bp, Escherichia coli
atgagcgagttaagttatctggaaaaattgctggatggggttgaagttgagtggagaaatcttggtgatacttcactcttcgaaatagcgaataatggaagaaagccagtaaaagcctctttgcgcattgcaggcgagacgccctattatggtgctaacaacattcaagactatgtggatggatatacccacgatggtgaatatgtcttaattgcagaagatggctcggctagtttagaaaattattcaattcaatatgcaactggtaaattctgggcaaacaaccatgttcatgtcgtacgaggaaaagaaagagttcattctagatttctatatcattatttatgcatcgttaatttccttcccttccttaccgggggaggaagggcaaaattaactaaaggacaattaattgagatacctgtaccaatcccctgcccggataatccggaaaaatcccttgccatccagtctgaaatcgttcggattctggataaatttactgcacttaccgctgagcttaccgctgagcttaacatgcgtaaaaaacagtacaactactatcgcgaccagttgttgagttttaaagagggtgaggttgagtggaagactttgggggaaattgggaattttacatatggatatgcagccaaagccatggactcaggagatgcccgtttcgtgagaattactgacataaataaagacgggaagctatcgaaagaaaacccaatgtacgttgaattaaatgaggaaaatgagaaatataccttagacaaaaatgatttactcatggcaaggactggtgcaacctttggtaaaacaatgatttttgaagaagattatccagcagtatacgctggttttttaataaagttgaacctaaatgaaacgattattaatgccaaatattactggcactttgcacaaagtgattttttttgggaacaggctaataaattagtatctggtggcgggcaaccacagtttaatgctaatgcactgaaacaagtcagagtacctattccatacccatctcaccctcaaaaatctttagacgaacaggggcgtattgtggatattctagataagtttgatgcaatcgcagcttccatcaccgaaggtctcccgcgtgaaatcgagttgcgccagaaacaatacgagtactatcgtgatttactgttcagtttcccaaaacctgaaactgtcagtaattaa

SEQ ID NO: 31468 - DNA, 777 bp, Escherichia coli
  misc_feature (700)..(709): n is a, c, g, or t
atgactcatcaaacacataccattgctgaatccaataactttatcgttcttgataagtacatcaaagctgagccaacaggcgacagctaccagagcgaatcggacctggaacgtgaactgattcaagacctgcggaatcagggctatgaatttatttcggtaaaatcacagtcagcgatgctggccaacgttcgggaacagcttcagagcctcaatggtgtggtgtttaatgacagcgagtggcggcgtttcacggagcagtatctggacaacccgagcgatggcattctggataagacccgtaaaatccatatcgactatatttgcgactttatttttgatgacgagcgacttgagaacatctatttgatagataaaaagaatctcatgcgcaataaggtgcagattatccagcagtttgaacagacgggttctcatgctaaccgttatgacgtcacgatcctggttaatggcttaccactggtacaaatcgaactgaaaaagcgcggcgtggcgattcgtgaggctttcaaccagatacatcgttacagtaaagagagttttaacagcgaaaattccctgtttaagtatctgcaactgtttgtcatttctaacggcaccgatacccgttattttgccaacacaacaaagcgcgataaaaacagttttgacttcaccatgaactgggcgaaatcagacnnnnnnnnnngattaaagacctcaaagattttaccgctacctttttccagaaacatactctgcttaatgttctggtga

SEQ ID NO: 31469 - DNA, 366 bp, Escherichia coli; identical to SEQ ID NO: 25367

SEQ ID NO: 31470 - DNA, 2598 bp, Escherichia coli
atgacagtgaaatactacgccattctgactaatcagggcgcggcacgactggctaacgcgacgatgctcggcagtaagctgaatctgacgcaaatggccgttggtgatgcaaatggtgtgttaccaacaccagaccctgcacaaacaaaactgattaaccagaaacgcattgcaccgctgaatcttctgagtgttgaccctaacaatcagagccagattattgcggagcaaatcatccctgaaaacgagggaggattctggatccgtgagattggtctttatgatgatgaaggtgtactcattgcggtggcaaactgcccggaaacgtacaaaccgcagttgcaggaaggcagtggacgcacccagactatccgaatgattctggttgtcacgaacaccgaagccatcacgctgaaaatcgacccgtctgtggttctggcaacccgcaaatatgtggatgataaaatatcagagcacgaacagtcacgacgtcacccggacgcctcgctgaccgtaaaaggttttactcagttaagcagtgcaattaacagtgaatcagaaacactggccgcaacaccgaaagcggttaaggctgcatatgacctggctaacgggaaatataccgcccagaacgccaccactacacaaaaagggattgttcagctcagtagcgccacgaacagcacgtctgaaacgctggcagcgacaccaaaagctgtcaaggtggtaatggatgaaacgaacaagaaagcaccattaaacagcccggcactgaccggaacgccaacaacaccaacagcgccacaggggactaataatgcccagatcgcaagcacggcttacgttatggccgcgattgccgcacttgtagattcgtcacctgatgcactgaacacgctgaacgaactggctgcggcgctgggcaatgaccctaattttgcaaccaccgtgattgacgcgcttgcgggtaagcaaccgaaggatgccaccctgacggcgctggcggagcttgctacatcagcagataaactcccttattttactggggcaaatcgtgccgcattaactgcattaacaagtgttggacgtgaaattattagtaagaccagtgctgaggatgttctagattaccttcgattaacggaaataattgataaatttcactcgcagatcacaacctgcgaacgcaacagccgggtggaaaatttttacacactggcggaaacctgcacagcggaacttttatcgctgaatgcccctgatgtgtacaacaaatccgttacgctgacggtaaatgaagagctgacaacggactataccggtccggtcacaggtcagtgcagtatcggtgatccgcagagctacaccattgcgctgtgtgccagcacaactctggaatatcagttttcctctgtagtattagagagtgacggcacgttcagtttcgccagaagctggccgggggccaagtcttttaaactgtatcgtacatcaaataacggtctggtaactgtctgggaagacccgctgtgtatccgctcttaccgggtgccatcggatgccggagacgaaacggtaagggtgatgaaagaccgtacgtacacttacgaccaggctgtgtcggccattgccctgatggcgcaggggcacagtcaggttgagcgttttgttcgcgggttgtgtgcgattgtgggcagcggaggcagtgagggaagcgtgcctttttttgtgaaccgtatgtcagcacaaacatcatcgcagtattaccggacgggaaacgcagcgtgggtggcgtatgcgctggcgtattatctgctgaaatatccggacggtgaaatggccgttgttgcccgggataaactgatgcagtgcgcagaatggattgaaatgttcagggtcacagatggcagtgatgttcgctctggtttgtatacatccggtagcggacagtatctgaatggtgtgttttatccggattttgacgcagactggtgcacgtcagaacatcagttcgacctgtggtttttgtttgatctgatgggacggttgggcttcaccggctatgctgaaaaagcgaaagccctggcggatgccattatggaaaaactgtgggtggaggacgaaggacgattttatgccgggatgcggactaccggggtggacaaggcctcaccgctggactgcgcgagctggggagggctgtttgtggccaatatagatatggaaaaagcccggcggtgttttacttacctgggcagactctggtacgccacgcacgatgcgacagggtacacgccttatcatccggaatatggctacccgaataaacagcgtggagtctgggtggagggcagtgcaggcgtggcattgctggcccgcagactgggagatgataccaccgcgatggatattctggcgaggctggcaccactgcgcacacgctacggttatattgattcgtgtgactaccccgataatgatgatatgccaccgtggccgtcctcctgtaatacagcctggatgatactggcatgcgatccgcaggggttctggaatgttaactctcctgtgctgcctggacgttattataaatactga

SEQ ID NO: 31471 - DNA, 738 bp, Escherichia coli
atgcactccgataattatctcttcctggataaaatcacatcatcatattttattaaagctgatattttattcagaacaattatatttcaaaacattgccatctctcacgccaatgaggaaactaaccctcagctttatgaggcttatacaaatcttgaatgctttctggaaaaacattcacctgaaatctcagataaaggaatacggcatgatttaataacaaaacatatgccatcattgtgctttagttcgcttgtttcagcatttgaagattacattattgaaatcatgaagttgaccttcaggatcaatccagaaaaactaaataaaattaagtgtgattatggggtgtttaagtcattatctgaagatgaactttttgactatctagtcaacgaaggagtcgcgagtctcacatttggatcacccaaagaatacatcaataaattatgcaaactcttatgcttagacaaaaagaaaatagaacatctcttaaaacaatacattgaaattaaagcaagacgagacacaggagtccataataattgggtgaaggaccaaagatatgaaaaaaaattattagaggcaggaatatcctctgaagaaaaagaatacctcatccctgacttagattattttagatattcatttaatttgtgcggcaagcttgtaaaattaataagcaataatttttcgacacaaatattgaaagagcaaaaattatttgacaatgaatga

SEQ ID NO: 31472 - DNA, 282 bp, Escherichia coli
atgacgctttatagcgggatgaacaataccagcggcaaagtcattactgatattgaccatctgcgccagtcggtgcgggacattctgctgacaccgcagggtagccgtattgcccgtcgtgaatatggttccctgctgtcggcactgatagaccagccacaaaatccagcattacgcctgcaggtcatgtcggcagtgtatgtggcgctgagcgggcagcgtaataacggtgtgcctgtttccctttccgtatcaacaggagcagagaatggcagtgattga

SEQ ID NO: 31473 - DNA, 276 bp, Escherichia coli
gtgcttgaatcgaaagttgcaaagcttgagtctgatgtgtcctatatccgacgtgacgttgatgagcttaagacagatgtcaaatctatcgacagaaacatgatcgctgttctggagcgactcgattcaataaaagattcactagccaaaaaaccctccatcgatgctgtcgatagaaaggtttcagacgcaaagcttgcggtattgcttggtgttccagcaatcatcgctgcaggaacaggtctttataagctatcaatgtacttttttctttag

SEQ ID NO: 31474 - DNA, 270 bp, Escherichia coli
atgagtgataaaaaacttataaaaaaatcaaataactgtgtagatgcatatgctgatgcatttggatattcatcttttggggaagatgacgatcgcttaggctccatatctttctttcagcatgttacagaatggggcgctgatggtagtaatgacactgaaaacgtaaagtacaacattgcaacaattcgcatgacggaagatttaatgcttaaactcgctgactttattcgcgatcagcatgatagagctaaaaccaataagtcataa

SEQ ID NO: 31475 - DNA, 492 bp, Escherichia coli
atgttcaaatcgaccctggcggcgatggctgctgttttcgctctttctgctctttctcccgcagcaatggcagcgaaaggggacccgcacgtattgttgacaacctcagctggtaacatcgaactggagctggataaacaaaaagcgccagtgtctgtgcaaaactttgtcgattatgtgaacagtggcttttataacaacacgacctttcaccgcgtcattcctggctttatgattcagggcggcggtttcaccgagcagatgcagcagaaaaaaccaaacccgccaatcaaaaatgaagctgataacggcctgcgcaacacgcgtggcaccatcgcgatggcgcgtaccgctgacaaagacagcgccaccagccagttctttatcaacgttgccgataagatttcccaggtgccgactcatgacgttggtccgtaccagaatgtgccgtcaaaaccggtagttatcctttccgctaaagtcctgccgtaa

SEQ ID NO: 31476 - DNA, 660 bp, Escherichia coli
atggacaacaattaccattcagaggcggaaaataaattctctgaatacttattatcactaggatataccaaagattctatattatacgaaccagcatttttctccaacgatggcaaaaacacatatagaccagactttgcaattatagatccagaaaagaaagaatatcttgctattattgaaataaagtcagacagatttgcacatagcgaaaacactctaaatcaattaaaaagatacaaacaagcaattggaaatgaaaaaatcccacttttcttggtgaccgtatcctccctgcctaataacccattgccattttcactgtattcagtcagtgattcgggtgaattagttaaatctgatttcaatcttttcccaacttttcgagcccttaccgcagagcagtcagcagttaggaaaaatgatattcggcagaaaaaatctcaaacgatggatatttttcaacgagttacttggtctcttgctgtcgccttattacttatagtaattgcagatatacgatttaattttttaaccactgagagaatggcactattaggggcttgtgttgcgctcatagtaatcccatttgcacaaaaatttaaagggttgggcattgaatgggaaaaagttaagaaccccaatagcgaagagccgtaa

SEQ ID NO: 31477 - DNA, 2334 bp, Escherichia coli
atgaaaatgaacgtaacagaaacggtaaaacaggcgtgcggccactggccgcgcattcttccggcgctgggtgtgaaggtgattaaaaaccgccatcaggcctgtccggtgtgtggcggctctgaccgttttcgctttgacgataaagaagggcgcgggacgtggttctgcaatcagtgcggcgcgggtgacgggcttaagctggtagaaaaagtgtttggcgtgaccccgtcagaagccgccgggaaggtgaacgccgtgaccggcaatctgtcgccggttgccccggaagtgatggcagccgcagaggctgaaaccgatgccgaccgcaaagcggcggccgcgctggccgtcagactgctggagaaaacgcgcccggccaccgacaacgcctacctcacccgcaaggggttccccgaccgggaatgtccggtactgacagtcatgcataaaaccggcggcgtgacgttccgcgccggggatgtggttgtcccgctgtatgaggataccggcgcactggttaaccttcagcttattaatgctgacggtctcaaacgcaccctgaaaggcggtcaggtcaaagggacatgtcatgtcatcggaggaaaaaaacaggcaggaaaacgcctgtggattgcggagggttatgcgacggcactcaccgtacatcacctgaccagcgaaaccgtcatggtggcgctgtcctccgtgaacctcttttctctggcgagccttgcccgtcagaaacacccggcctgtcagattgtcctcgccgccgaccgtgaccttaacggcgccggccagacaaaagccgctgcggccgcagacgcctgtgagggtgttgttgccctgccgccggtgttcggtgactggaatgatgcgttcgttcagaaaggcgaagaggcgacgcggaaagcgatttatgacgccatccggccactggctgacagtcctttcactaccatgagcgaggcggaatttaccgccatgagcaccagtgaaaaggcaatgcgggtgcatgaacattacggcgaagcgctggccgtggacgcaaatggccagctcctgtcccgctatgaggccggtatatggaaaatcattccgccatcggattttgcccgcgacgtggccgggttatttcagcgtctgcgcgcaccgttctcgtcggggaaaattgcctcagtggtggagaccctgaaactgattattccgcagcaggacgcaccggcgcgccgtctgattggttttcgtaacggcgtactcgataccgctaccggtactttcagcccgcatcataaatcgcactggctgcgcacactctgtgatgtcgattttaccccaccggtggagggcgaaacgctggaaacccatgcgccggatttctggcgctggctcgaccgtgccgccggtggccgaccggaaaaacgcgacgtgatacttgccgccctgtttatggtactggcgaaccgctacgactggcagctctttctcgaagtgaccgggccgggtggcagcgggaaaagtattctggccgaaattgcgaccctgctcgccggggaagataacgccacatcggccaccatcgaaacgctggaatcaccgcgtgaacgcgctgcgctgattggcttctcgctgatacgcctgcctgaccaggaaaaatggagtggtgacggggcaggactcaaggccatcaccggcggggatgcggtctccgttgacccgaaatacaaggatgcgtactccacccatattccagcggtgattctggccgtgaacaataacccgatgcgctttaccgaccgtagcggcggtgtctcacggcgccgggtgattctgcatttcccggaacagattgccccggaggaacgtgacccgcagcttaagaataaaatcgcccgtgagctggcggtgattgttcggcagcttatgcagaagttcagcgacccgatgaccgcccgcgccctgctccagtcacagcagaactcggacgaggcgctcagtattaaacgcgatgctgacccgacatttgatttttgcggctatctggaagcactgccggagcctgagggaatgtatattggcaatgccaacatcattccgcgtcagccgcgcctgtatctgtatcatgcctatctggcgtatatggaggcccacggctacaggaacaccctgagcctcaccatgttcggtaaggggctgccagctatgctgaaagagtacgggctaagttatgagaagcgccgaaaaaatcagggcatacaaaccaatctaacactaagagaggaaagcaacgccgactggctgccgaaatgtgatgaccctgtagcaaaataa

SEQ ID NO: 31478 - DNA, 738 bp, Escherichia coli
atgactcagaccgctgttattcccgactaccttaaacctgcaatggaacgccttgagactgcccgctcggcgcatctcgtcaatgccagccgtatggatgaaaccacgacggccatcagccaggtgcaaacgcaaaaaaaggaactggagcaggaaaacggcaatgattccggcgcatggcgcgccgcctttcgtgccggtggtgctgtcattaccgacgagctgaaacaacgccatctggcgcgcgtggcacggcgggaactggcgcaggaatgtgacagcatgaacgaggtactgtcttttgagctggacaggctcaaaggagcctgtgaccgcacggccagagcataccgtcaggcacatcacggcgtcctcagtcagtatgcagagcatgaacttgatgctgccctgcgtgaaagctgcagtgccctcatcagagcaatgaaactcaacatactggttctgaataatccgcttgctaatacgaccgggcatcagggatatatcgaaccggaaaaagttgtaatgcagcaggtgaaagcgtggcttgaacagaccgtaaagggctgcaatatccgtctgaccgatgaaccggtgctgtttaaaacagggctgtcggcttccacactgccgcatatggaacatgacgttgcgaccatgcccggtcagcgaaaagtctggcaggaaaaaatgcgggaacgtgaagctgacctgaaagcacgggggttattgtcatga

SEQ ID NO: 31479 - DNA, 1986 bp, Escherichia coli
atggcagagaaatcatttaatgtagaagtacagatggattatttagataaggtttctaaatcttctgcattacaagcaatcgctgagttggtatggaatgccttagatgctgatgctgaaaatgtatatgttgatttgacagagtctgaattaggactctcgcatatatttatcagggatgatggtaatggtattccctatgagaatgcagaaaaattatttagttcactgggcggatcatggaaaaaagacaaggttttatcagaaagaaaatctcgttttttacacggaaaagaagggcagggacgttttaaggcattctcaataggtcgatatattgagtgggatactacttatttacttgatgatgtatattatgaatataaaataaaaggaatagctgataataagaaaaagatttcagtttctgataaggtagtatcaagtgaagttaaatcaggaacagttgtttctatattggaattggtgaaaaacttcacctctttgacacctcaaaaactatctgagtttctttccactacacttgctttatatcttagtaaatacccatccgtaaaagtatttgtaaatcgagaacaaatcgatccaacagcacagattttatttgatacaagctataaattagatgatgtagtttattgtgatgaattacattcatatgagttacaagttattgaatggaagtcagctaaagaaaatgagatttttttatgcgacaaagaaggttttcccttaataagttatgagaagaaaattagagggactggtacatattcttattctgtttatttgaagtctacacatttgaccaaactttcccatgagggtactttgtcgctcatggatttagagccttctttaagccctgtattaaataaagtcgaaggtttgataaaggaacacttccggaaaagagatcatgaaaagtcaagggagttaattgataaatggaaaaatgaaggtgtttatccgtatgttggtaaggccgaaaatattgttgaggatgctgaaagaaaagtattcgatattatggccatcaatgttataaaatacataccacaatttgataatggcgaccttaaacttaagaaatttcagtttaaattactcaagcatattgttgggagttgccctgatgacttgagaactatattagaggaggttctctcgcttcctaaggaaaaacaagctgaattggctgagatattaagggatgcctcattgtcagctgttattagtgtttccaaaataattactgatagattgaagttcatatctgggcttgagaatgtattatttcatccgaatacaagaaaagtattcaaagagagaagtcagcttcataaaataatggcggataatacatggttttttggtgagtcttttacattgagtgtcaatgataagtcactaactgaagtattaaaagtacatttggaaaagcaagggattgatattccagttgatgagaaagtaactaggatagatggtagtgtaggtattgttgatttaatgcttactagaagtataggcaaaaattacccagatgagcgtgagcatattattatcgaattaaaggcacctaaagtaaatataggtcaatcagaaatagaacaggttaaatcctatgcgtatgcagttgctgaagacgcaagatttaatggtttaaaaacaaagtggaacttctgggttatatcgaatgagctcacaacttatgctctcagagaattaaaacaaaaaaaccttcctgaaggtgcaatatatcaagctgaagaaatgactatttggataaaaacttggtcccaacttattcaagagaacaaacatagattgggttttctacagaatcagcttaatatttcgtatgaccgtgaagatggactacagttcttaaagcaaaagtatgctgagtacactgagggcgttgtatttgaaaatgaatcacaggatgagtatatagattaa

SEQ ID NO: 31480 - DNA, 1374 bp, Escherichia coli
atgagttccgtacttgaaactgataaatcatccgcatccgattcactgcctttaatacaacggatcagctatggttcgctggatgttgcaggtaatctgctctactgttttggctccacctacattctctatttctacactgacgtagcgggcataagccttgccgtagctggcatcatcctgctactggcgcgtattgtagacggtatcgatgccccggtatgggggattattattgataaaacgcattcccgctacggtaaatgtcggccgtggtttttatggttgccattaccttttgctgtatttagcgcactctcattctggtcgccagatatcagtatgacaggtaaaactatatattcagcaatatcgtacatgttagccagcattctttttaccggtttaaacacgccgctaagcgcaatattacctttgatgacgttatcaccaaaagaacggttggtattaaactcttaccggatgaccggcgggcaaattggcgtgttattaatgaatgcgacggcgctaccgttagtggcttttcttggaaacggtaatgataaggcaggatttatttatactgctatcgtcttttccgtaatctcctgtgcgctaacgctatttgccttcaaaaatattcgagaactggataccgacaaaatacagcaggaaccacgtctgccgatgaaaaagagcttttcggcaatgaaaggcaactggccgtggatcctgatggtgctggcaaatctcatcttctggattgccttacagcagcgcaacacaaccattgtttactatttaacctacaacctggatcgcaaagatttagttcccttgatcaacagcctcgccaccattcagattttgtttatcatcgcaattccgtttttcagccgttacctctccaaaacctggatttggatcaccggcctgctggtcgccatgttcggcggaggactgatgtggctggctggagacaatattcctttgatgattgccgcctggatgctggcgaatattggcagtggcattgcctgctctatgcccttcgccatgcttggtttcgcggttgattttggtcgctggaaaacagggattaaagctaccggcattctaatcgccttcggcagtaccttctgcatcaagatgggcagtggtatcggcaccgccttcgccgcctggattatgaacagctttggctatattcccaaccagccacaaactgccgccggtctggacggtattagctgggcgtttatctgggtgccagccgtgctctttgcactcgccgccattccactgctcttctttcgtaaatatgaagcgatggaagagtgcatccaacacgatttgcaagttcataacccttaa

SEQ ID NO: 31481 - DNA, 621 bp, Escherichia coli
atggctatcaaatcacctcccggacttattcctttatcacacttatcgggtgaggaactcctggcccacctgcgctttaaccgggttaccgatgaaaaaggacgttatctgccttttgatgagttgcagtaccgcatcaaaaaaggagaaaacgtcgatgtggcgtggacgcttacccgtctggcgcgcaacgcggcgatccaacgaattaattattgcaatgaagcgggtgaacaggccggattcaacattaccccggtgattgcagaagcgtgcgagcttgtcgacaaacgtgctaccgcgctggcgctgaaagatcagactgaacggttacgcggggccggagccgagttaaggcagttacgcctggaagagccgatcaccagctcccagctggagggtgcgaatactacaacgctggtggcgagaaaaatgctggaaacagggcggtcgccacgcactgaagacgagcatatgattgcgggaaatgcccggctgatggcggaaattccgcacttactcgcagaacccttattcgccagttacatgccattggtatgggtggaatcaatgacgcgaaatatcgtccgggagaatttcgtgaaacagatgatgttgtga

SEQ ID NO: 31482 - DNA, 456 bp, Escherichia coli
atgcacctccgcttcggcgaaactgaatcagcctttgattacatgatggctacccgagagtatcttgaacaacatggcaaaccacttgcgttttacagcgataagcacggcattttcagggtaaataagggtggctccactacgaccggagtaacccagtttggccgtatgctttctgaactggggatcgagttgatttgtgccaacagtccacaggctaaaggccatgtggagcaagcaaatcagacacttcaggaccggcttatcaaggagatgcgtctcgagggaatcagcagtatcgaagcagccaatgcttggctggataccttcatcgctgacttcaatcgtcgcttcgcaagaccagaaaaataccccaaagatttgaggctgaaatcaacgaagagctcgatgatatttttgcctggcaggaacagcgtaagctgtctaaaacgctga

SEQ ID NO: 31483 - DNA, 519 bp, Escherichia coli
atgcttgtgactatgttagataaagagctcagccggatcaacgtcattcagtcagttgtcgaaaagcgtatgcgccgtcgtgatgctgcgcaccaacttgctctgaccgaacgtcagacgcaacgcctgatgaaccgctttcgtgaatcaggtgccgctggcctggtaaaccttcgacgtggacgccctggtaatcacagactccctgagtcactgaagctgcgtgtactttctttacttcacgatcactacagcgactttggaccaacgcttgccgcagaaaaattgcgcgaacgccataacatcacggtgtctgttgaaacgctcagaaaatggatgactgccgatggactctgggttccatacacacgtcacagaccccgtgttcatcaacccagataccggcgtgactgcctcggagaatttgttcagattgatggttctccacatgactggtttgaaggacgcgccccaaatgctgcctgcttgtcttcattgatgatgctactagctgcctga

SEQ ID NO: 31484 - DNA, 1437 bp, Escherichia coli
atggcgcagtcgaaactctatccagttgtgatggcaggtggctccggtagccgcttatggccgctttcccgcgtactttaccccaagcagtttttatgcctgaaaggcgatctcaccatgctgcaaaccaccatctgccgcctgaacggcgtggagtgcgaaagcccggtggtgatttgcaatgagcagcaccgctttattgtcgcggaacagctgcgtcaactgaacaaactcaccgagaacattattctcgaaccggcagggcgtaacaccgcaccggccattgcgctggcggcgctggcggcaaaacgtcatagcccggagaacgacccattaatgctggtgctggcggcggatcatgtgattgccgacgaagacgcgttccgtgccgccgtgcgtaatgccatgccgtatgccgaagcgggcaagctggtgaccttcggcattgtgccggatctacctgaaaccggatatggctatattcgtcgcggtgaagtgtcggcgggtgagcaggatacggtggcctttgaagtggcgcagtttgtcgaaaaaccgaatctggaaaccgcgcaggcctatgtggcaagcggcgaatattactggaacagcggtatgttcctgttccgtgccggacgctatctcgaagaactgaaaaagtatcgtccggatattctcgatgcctgtgaaaaagcgatgagcgccgtcgatccggatctcgattttattcgtgtggatgaagaggcgtttctcgcctgtccggaagagtcggtagattacgcggtcatggaacgcacggcagatgccgttgtggtgccgatggatgcgggctggagcgatgtcggttcctggtcttcattatgggagatcagcgcccacaccgccgagggcaacgtttgccacggcgatgtgattaatcacaaaactgaaaacagctatgtgtatgccgaatctggcctggtcaccaccgtcggggtgaaagatctggtggtggtgcagaccaaagatgcggtgctgattgccgaccgtaatgcggtgcaggatgtgaaaaaagtggtcgagcagatcaaagccgacggtcgccatgagcatcgggtgcatcgcgaagtgtatcgtccgtggggcaaatatgactctatcgacgcgggcgaccgctaccaggtgaaacgcatcacagtgaaaccgggcgagggcttgtcggtacagatgcatcatcaccgcgcggaacactgggtggttgtcgcgggaacggcaaaagtcactatcgacggtgatatcaaactgcttggtgaaaacgagtccatttatattccgctgggggcgacgcattgcctggaaaacccggggaaaattccgctcgatttaattgaagtgcgctccggctcttatctcgaagaggatgatgtggtgcgcttcgcggatcgctacggacgggtgtaa

SEQ ID NO: 31485 - DNA, 1143 bp, Escherichia coli
atgaagatagttatctcccccgactcctttaaagaatgccttcccgcatggaaagtcgccgaagcgctggcaaccggctggcgcaaggtcctgcctggcagccaactggtgtgtttgcccgtggctgacggcggcgaaggcacgctcgaaacactcattcatgcgactgacggtacgttttacactaaaacagtcaccggaccgcttggcgaatcaatacatgcgcaatacggtattttaggcaaccaaaccaccgcagtgatagaactggcacaagcttcagggctggaactggtttctcctgtccagcgttctcccctttatacgacgtcgtttggcactggcgaacttattctcgccgccctggaacacaatattgataccgttattctatgcctgggtggcagtgctacaaatgatggcggtattgggttgatgtcggcacttggcgcatcgtttacagacgccgaagggctatcagtctctgttaatgggatggggctggcggcaattcaccacattgacttacagcacctcgatccacgattgaaaaatgtgaaatttattgcagcctgtgatgtcaccaacccactaaccggcgataacggcgcgacccgggtttttgctcaacaaaaaggggccagtgctgacgaccttgagcaactggaacagggaatgaaaaactatgcccgttgcatctaccgttgttgtggtaaagaagtcgatacgatacccggttccggggcggctggcggcgttggcgcggccttgatggcttttctcgatgctcgcttacaaccgggtatttcgctcgtgctggaagcgattcaatatacccaacatttaaaatacgcagcattggccattgtcggtgaagggaaattagatagtcagagcctgaatggcaaagcgcccgtaggcgcagccaaagttgcccagatgatgggcgttccggttatcgcaattgccgggtatatcgatgatcaacttgatctgaatgagttacgccagtgtggaatagaagcctgtttttctgtcgtcaacggcccttgcaatttaccgaccgcgctgagtcagggagaaaataatttaattcgtcttggagaaaatctggcgggatattttcgtgcgatcctgagttaa

SEQ ID NO: 31486 - DNA, 264 bp, Escherichia coli
atgaaaggtttcgtattattaggtgataaaacaactcatggcggaacagtcatttccgcatcatcaacgatgactgtcaatggcaaaccggttgcgctcattggcgataaagttagctgtcctgtaaaagggcatggtgtcaacgcgatcattgaaggtgcggcccactggatgtcggacggtaagttagttgtggttgatggttgtggctgtgaatgtggttgtaaagttatagcaggaatgcccgatatgtccacgaattag

SEQ ID NO: 31487 - DNA, 1167 bp, Escherichia coli
atgggatggaaatacaaagaaataatcgttccagcaaaacctcaaaaaccatcctttatactttacggtatttttcttattactgccgttggttctggcgtggcattatttatatttcatgcggcaaatctattcccgctttttcaaacgtggaatatctggcttttgtcatgtctgccggtaatgttttttttactcgctttcagtttgcggtgttacatttacggtataaaactaagacaatgggatatattgaatcaggagactgttcgtataaaaaacgaatgggaacaatgggccatgcgctatatcgccgtagtgggagggtgtgttttatttcccgataagataacagcttcttttctttttaatcattctgaaagcgtggaatctcagtggggtctggcaaaacgtatagattatatgccaaaatgtttcccccttacggaacaggctcttcattccctgctatatggcataaaaaatgcgatagccagacttccctccgacgcaaaactgcttatcaccttgttaacggatgcctatgatgggcaatcggaactgattacgtctttattgtctgataaatggaaaattatttttccagataaacaccttcctgacgtagttctggttactgaaaatcatgtttgcgatatgttcgaacaccgtatgatattggctgaagaatattttgaactgctgctggtgatacagttgaatggtgacggacgatattcagatggtctggcggctcttctattgggatcagatgatatgatatgtaaatataaaacacattcagtttcccggttgttgcgcccaatgccactggataaagagaatgttgaacatgatttttcattattcttcaatatacaacttccttcccgcaaggcaaaggttatcatcggtgacagtaaagatgcactccatcttttaccctctgttttttctgtggggaatgaatgtggaatccgatgtaatgcggaaagatcgatatttttggaaatgttttccggtcttccgggaccattttctgactggcttggtatcgcgtttgctgtcgatgtttctgactttatttcctcgccagtcatgattatttcaaattccggggaatgggttaataccgttattccagaggcgaaaacgaaaattttataa

SEQ ID NO: 31488 - DNA, 885 bp, Escherichia coli
atgatacatgacataaaatggttctcaagtattcctctgtttctgctgttatctggttgtgataataagcaggaagaattaaaactggcaagtgaacaactgacggacatggtatttgttgaaggcgggagtttcatgatgggtgattttggcccgacaatgggggaacgcttacctttcagtccagagatagatgatgaccatctgcacaaggtaacgcttgataattttagcatgtctaaatatcgggtgacatggggacaatttaaccattatctggagttgcagggaaaaccaagaacaaaaatatatatgtggtacaaatcactcggcgatgagtattctttttcaaaatactccggtgacacctaccctgctacggttctctggcaggaagccaaggattattgcctgtgggtgggtaacacgactggccggaaggtggatttacccactgaggcgcagtgggaatatgctgcacgcagtcgtggtcagctttttattatggcgaacaaggataacgtctggcataaggacgatagtgcctggagtgacgaggaaaatcggaaagacaagagttttgcaggaagtatcgagcctgttggaagttaccctcctaaccctctgggacttttcgatatgatgggtaacggaattgactggataaatgactggtatgatgcagattattatcagcattcaccagagaataatccaagagggccggaaaaaagagatgaaaaagttatcagaggttcttttggtagctcatactggagtaatctatctatttctcgcggaaagcggaatatgaatgggaaaaaaggcgaggcgatcattggtgatggatttcgctgcgtggttaatgagctgaatccgttatga

SEQ ID NO: 31489 - DNA, 897 bp, Escherichia coli
atgataacgcttatagataatatccgcaggattttactattcggcatggtgtttctgctgttatctggttgtgataataagcaggaagaattaaaactggcaaatgaacaactgacggacatggtatttgttgaaggcgggagtttcatgatgggcgattttggcccgacaatgggggaacgcttacctttcagtccagagatagatgatgaccatctgcacaaggtaacgcttgataattttagcatgtctaaatatcgggtgacgtggggacaatttaatcgctatctggcgctacagggaaaatctaaaacaaaagcgtatataaggctcaagtcactcgataagaaagactcttattctaaatattctggtgacacctatcctgctgcggttctctggcaggaggcaaaagactattgccagtgggtgggtaaaacgactggccggaaggtggatttacccactgaggctcagtgggaatatgctgcacgtagccgggggcaactttttattatggcgaacaaggataactactggcataaggacgatagcgcctggagtgacgaggtggatcggaaggacaagagttttgcaggaagtattgaaccagtcgggagttacccgcccaatccgctcggattgtacgacatgatgggaaacggttttgactggataaatgactggtatgacgcagattattataaaatttctccagaagataaccctacaggcccggtcaaaggagataaaaaggtgttaaggggatctggtggtgcatcctactggagtaatctggttattttacgttttagtgataaaggaaatgggaaggaaggaagggccggtattggttatggatttcgctgcgtgcttaatgagcctaagccattatga

SEQ ID NO: 31490 - DNA, 2190 bp, Escherichia coli
atggcagaaggacaggcaaatacaacaacgaaagcgaatagcggcgggaaggaagtaaaagggaaaggtgaaccttgtttatatttccatcccgacagtgtggttgtgctttttgtagaagcagttgatgcgctgaaactggaacaagagcacgagcaactcaatgcactagtggaaaataatattaaagccagacttgaacttgaacaggtgaccggacaatgcgtaaaggatacctcatcaacggagtacagtaacgagcaggtattattgccactttatcaaaaagtagaaaaagccagtgaaaatttacgcaataagatttgtaacctgtcgccgctggaagaaaataaaacaccacttctatccgttaatgcaaagaaaaacgcaatcggcattactgaactgattcggataacgaatggttataaagggtataaatatacttacgtaacctcagacaaaattggaaaccatattcgccgctatgaacttaatcaggatgagaaaaaaagtggtagtaaagactttgttaaaacagtgacagagaccgatgaaaatggagtaacacgaacacgtgaagccatcgatgaagagaaaatccaatctcagttgttaaagctcaagccgttgttaaaactatgggaatggaaattagtggaagaaaccacgggtgtatgggggcagtgggcaaaagattttaataatagtctgaaaacgtcaccctataaaggcgagcaatttggatttgattctcagtcgcaattaatgcggtgggcctacggagcaacagcgcgactggatttagcgccactggaagtaagtagtaaaggtgttaaaagtctgggagatgtgagtggcaaggcttctttttatgcgagttttgcactggctgagtcacgcacaaaaggaacattatatttaccagacataaacggctggaaaatagaattcccacacaaaaatggcggaatgggaacattaggaacgtttctttttgaattgacgctaacgctgtccgggagcgtcggagccagcattggtattgaagtcggtgccaatatgaagggcgacagtattaaaggtataccggggaaagccgctgacaatggcgaaggtgcaccgggtcgccgcaaaatcaatattgcgaaagcgctggatgacagcgatgttaaagcggaattaagcgtgtttgttggcgctgagagtggtgcaaatgtcgatggcgcactgaaatggaaaaaccctgaaaaatctaacgacttcaaacaactggcgaaaattggtgtagggttggctgcgcaggcgggggcgggattttcggcattactggcctttagctacaaagatgggaaaatcaggtgtcatgtcaaagcaggattatgctggggtaaaggtgcaaaaggtagcacttcattggaagttgatatcaaggcgatttacgaggagtttgttccctgcctggcgtatatgctgaggaatatggactatgccaaactccacgagataatgaaggacgaggattactatgcattttgttcactgacgttgttggcgctgggaactgggggattacctgcggctggagctgtcgtcttggctctaacagccaaaacattaattgatgacctggttgatgcctggaacgacaaagagaggcgtgttgaaatgatgcaggcaattaacagtagcaatggagacaaactgaaatacgccctgccggaagcccgcggttcggcgattgccgccatgatggaggccaacttctgggacagagtaagccccgccagtaatgaaaagcaaccctgcgaggggccgggcggcactatgagcgcccgcaagctggctattttaaacgtgctgaggtgggtgcagtcccagcgggattttgaaaatgccatgcagcatctgaacaaaagaccacaggcatcagcagataactggaaaactaaccgcgatatcgtgtcaagatttctggcagagggtgaaggaacaaagatttatccctacatcggtgcagttgaatccagccattatgcggaaaaattagatctaatttaccagtcattacccgttaccgcagatattcagcctaatatgccgctggaacctgttaacgcgttttatattagtggttgcgagaaactggtttaccagcaacatggtggtgatggggggatgtacgcatga

SEQ ID NO: 31491 - DNA, 1521 bp, Escherichia coli
gtgaggaatgcgctgaaacagacggttttgttatggactctgttgttgctgctgactacctggctgggtttctttgctgtatctgcggtcgtgaagtatgccgtggtagtgattcttgtcgccgtcacagcggcggtgatggcgtactggcataagaaaaagggacaggtcgtagcggacgacgtatggccgtcatcgctgccgccggaaacctaccgacagccggcagtgctggtctgtggtgatatgtcggcgcacctgttcactgacagcccggtccgccaggtttcagaagggctgtatctgcctgtttctgatgaagaacagcttgtggcgcgggtggagcgattgctgacccttcgcccggcgtgggcatcgcagcttgccgtggcgtataccatcatgcccggcatacaccgggatgtggcggttctggccggacggctgcgacggttcgctcacagtatggcgatagtgcgtcgccgggcgggcgtaaacgtaccctggcttctctggagcgggctgtccggctcgccgttgccggagagagcgaattcaccgtggtttatctgtaccggcggcgaagttcaggtagcaacatccgcagagaccaccatgcccgcgcagtggattgcacaatccggcgcacaggaacgcagtcagcgactctgttacctgctgaaagccgaaagcctgatgcagtggctggatctgaatgtgctggcggaactgaacggcccggaggcgaaatgtccaccactggcgatgaccgttgggctggtcccctcgttgcctgcggtggataacaacctgtggcagttgtggatcaccgccagaaccggcctgacgccggatatcgcggacaccggcacagacgatgcgctgccattcccggatgccctgttacggcggttgccgcgtcagtcgggctttaccccgctgcgacgggcctgcgtgaccatgctgggcgtcaccaccgtggcgggtatcgccgcgctgtgcctgtcagccacggcaaatcgccagttattacggcaggtcggtgacgatctgcaccggttttatgccgtcccggcggaagaatttatcaccaaagcccgtcacctgtcggtgctgaaagacgatgcggtcatgctcgatgggtattaccgggaaggagaaccactacgtctcggtctggggttataccccggtgaacgcatccgccagccggtattacgcgccattcgcgactggcatccgcctgagcaaaaaatggaagtgacggcttcgcttccggttcagaccgtgcgtcttgacagtatgtcgctgtttgacgtcggacaggcccgcctgaaagacggctcgacaaaagtgctggtggatgcgctggtgaacatccgggcaaaaccgggctggctgatcctcgtggccggatataccgatgccaccggcgatgaaaaaagcaatcagcagttatcgctgcggcgtgtcgaaatcagtcttgttccgcgttctgacgcctgtcaggacgtgaaataa

SEQ ID NO: 31492 - DNA, 1404 bp, Escherichia coli
atgagagaaaaacccagtttttatgtcgcgcttacaccgatcatttttatgatgatcgtgttggttgttggcatcggtgttatgggctggcctgccagcgtctgtttattaatttcagcggcgttttcctgcattattgcaatggctaagctgaaatatacctgggatgaaatccaggggtttattatcgataagatttcggcggtgatggcaccggtacttatcgttattttcgttggctttatggtcgcgacatggagctatgcaggtacactgccgatgctggtttattacggtatgttactggttgcgcccgcatggctttatgccatagcgttttttctgaacgcagtattgtcctatgtttccggggcatcatggggatctgtcgcttctattggtgttgcattaatgggcatcggttccggcttacatgccgatcttccaattctggcggcagccattgttaccggggcttattttggtgacaaactttcaccgttaagtgataccaccaacctgacttcagcggtaaccaaaactaaactttatgatctgattaaatatttactctggacgaccatcccatcaacgattattagcctgctgttttttacctggctgggaatgattcatacttctacgggctctatttcaccagaaagcatgcagatgctggtacagctcaaagagttatataagtttggtctgttaccgctactgcctatgcttattgttctgtgctttacctttttgcgtttgcctacagtaccggcattattaagcagtgcgttcgtggccgtattggttggatggctgtatcaaggtttcccgctggccgaaggtattaaggccacaatgagtggtttccgtctgacgatgatcactgattcaacgacgctgttaccttctgtgaaagaactgcttgaacaaggtggtcttaataaccagggcggattcctgtcatttattatctgcgccatgatgtttgctggcatcctgacgggaacaggaatgatggatgtcacattacaaagtgcggcaaacaaaataaaaagtgcctttggcgctattctggcaagcggtgttttagcgatcatcattaacttacttaccggttctgatggtttgaataagattgttatttccgaattgatgatgaagaaattcgaagatcttaatttatcaccgttagtcttagcccgaacgctggaagattttggcaccatgagcgcgccaattattccgtggtcagctgccggattgtatatggcgacaacactaggcgtgccgacgtttagttacttgccgtactgtgtattctgtttctgctcgatgatatttgcgttgatctatgcttctacaggtttccgtttactgcgcttcaacgaagcaaaggcctga

SEQ ID NO: 31493 - DNA, 1371 bp, Escherichia coli
atggaattttatctggaacccgctcgtaatatacctgtactggcaaccacggaagtgttagttgttggtggtggtccatcgggtattgccgcagcaatgagtgccgctcgtgaaggcgcagctactatgctgattgaacgtttcggttgttttggcggaatgatgacaacggctggcgttgagtcaattgcctggtggcgtcatgaaaatacggtagagtcaggtggactggcacgcgaaatagaagaaacggcaaaatcaatgggggcgtccagccctgagccgcaatcgaatagtcaggctattaacgccgagcgtttcaaactggttgcggatgcaatgcttgaacaggcaggtgtgcgccgcgtactacacattaccgccgttgatgttatcaagcagggcaataatttactcggcgtaataacagagagtaaatctggtcgtcaggctattttggcaaatgtcattattgactgtactggcgatgctgatattgcatggtttgccggagcaccatttattaagcgtgaacgcgaagagctaatgtgtatgacaaccgtttttagttgcgcaaatataaataaaaacgcgttcatgcaaaatattaagagcacgcaacctaaatatggagactggggggcggatgaagaaaataaaaattggtcttatgatgttcatgaatcttgtcgcgatatgtttagcccttatctgggcaaagtctttgcgaaaggaaaatcggcagggattattcctgaagatgtgacgttaggtggttcctggagtacggtcaccgagtatggtgatgcgaattacttgaacgttgtcagcatccctgccgttgattgtacagatgtttttgacctgacgcgtgccgaaatagagggccgcaaacaagccatgcaggcgatagaagcgttgcgtcaattccagccaggatttgaacaggcacaattaaaaaatttcggtatgacggtgggaacaagagaatcaagacatattattgggagagctcagcttacggaaaatgatatttgtaatgagggacgtcatgcggattcaataggggtattccctgagtttatagatggaaatggtcatcttaaattacctcttgaagcgaactattttcaaatcccttatggcgtaatgattccgcagcaagttgaaaacctgttggtttgcggacgggcaatcgatgcagataatttcgcctatgcgacaatccgtaatatggggtgttgtattgtcactggagaaggtgcagggactgccgctgctattgccattaaaaataacactaccgtttcacaggtagatattcagacggtacaggaacgcttacagcaaaatggcgtaaaagtcttttaa

SEQ ID NO: 31494 - DNA, 168 bp, Escherichia coli
atggttatcttgaacaaattcaactttgcggcctacagcttcctcaaaaatcttctggttaaagctctcaaaaaagaaaccacgctcatcaccaaaaactttcggttcaaaaatcagtacatctggaatttctgttttaattacattcattttattaataacctttaa

SEQ ID NO: 31495 - DNA, 351 bp, Escherichia coli
atgattacgcttttccgtttactggcgattctttgccttttttataacgtttcagtttatgctgtaaattgctatcaggatcaaagaggtggtaatacacaaatacgtggtactttaccttccttcagaattccagaaaacgcccagccgggacaaaaaatttgggaaagcgatgacgttaatgttacggtatattgtgataacgcgacaggatggagagctgatgatcccgcagaaaatatttatgcctggattaaaatgccggctataaatagtgcagacattttgaataacccatacctgacattcggtgtaacctataatggtgtggactatgaagatagcatgtag

SEQ ID NO: 31496 - DNA, 462 bp, Escherichia coli
atgcttttatccggattggatctatcgcgatggtgcgagtaccacttgatgcaatggagcctgtcgaggcagatgacgagtaacagagctcggtatctcaatcaggacctgattgtcctggttcgatgccgaaaaccagtgatttttcgtgttggtatctgtgttggtataggatggtgttgtttattattaacaattttaaatcatgaagttaaatcgcatgttcgagtccggccttaccacaccgtatgcaaatcgagtcgctcaagagcggctttttttgtgtctgaaatcacccatatccgtgcagtatataggcctgccagaaaagcagttcagtattcttcattttgtagtcgatggtcccaagtttgctctggctggaagctgcatcgtccacattacgtgggcagggtggtttcgctatgctacttgaacgttttgaccatgtggctcaggtag

SEQ ID NO: 31497 - DNA, 2280 bp, Escherichia coli
atgaagaaaaaaattgaatcctaccagggagctgccggtggttggggtgctgttaaatccgtagcgaatgcagtacgtaagcagatggatatacgccaggatgttattgccatgtttgacatgaataagccagagggctttgactgtccgggatgtgcatggccagatcctaagcacagtgcgtcattcgacatttgtgaaaacggcgcaaaagcaatcgcctgggaagtcacggataagcaggtaaatgcctctttctttgctgagaatacggttcaatcattacttacctggggagatcacgagcttgaggctgcgggacgtctcactcagcctttgaaatatgatgacgtcagcgactgttacaagccattaagctggcaacaagctttcgacgaaattggcgctcgccttcaaagctatagtgatcccaatcaggttgaattctatacttcggggcgcacttccaatgaagctgcctttctttatcagctttttgcccgtgaatacgggagcaataactttcccgactgctccaacatgtgccatgaaccgaccagtgtgggattggcagcgagtatcggtgtgggtaaagggaccgtgttgctggaagactttgagaaatgcgatttagtcatttgcattgggcataaccctggtacaaaccaccctcgcatgctgacttcgttgcgcgctttagtgaaacggggagcgaaaatgatcgctatcaaccctctacaggaacgtggcctggagcgatttaccgcaccgcaaaacccgtttgaaatgctgacgaactctgagactcagttggccagtgcctactataacgtgcgcattggtggcgatatggcgttgctcaaggggatgatgcgcctgttaattgagcgcgatgatgctgcaagcgccgcaggtcggccctcattgctggatgacgaatttattcaaacgcataccgtcggctttgacgagctacgccgtgacgtgctcaattccgagtggaaagatatcgaacgtatttctggactaagtcagacacaaatcgccgaacttgctgatgcatatgccgctgccgaacgaaccattatctgttacggaatggggatcactcagcacgaacatggtacccagaacgtacagcaactggtcaatctgctgttgatgaaaggtaacattggcaagcctggtgcgggtatctgcccactacgaggtcactctaatgtacagggcgaccgaaccgtcggtatcaccgagaaaccgtctgcagagtttctggctcgcctgggtgagcgctatggcttcaccccacctcatgcacctggacatgctgcaatagccagcatgcaagctatatgtacggggcaagctcgagcattgatctgcatggggggcaactttgcactggcaatgccagatcgggaagcgagcgctgtaccgttaacgcaattagatctggcggtacacgtagccactaagcttaaccgctctcatctgctgaccgcacggcatagctatattctgccggttctgggacgtagcgagattgacatgcaaaaaagcggtgcgcaggcggtaaccgttgaggattcaatgtcgatgattcatgcctcgcgtggtgtgttaaaacccgccggtgtaatgctgaaatcagagtgtgcagtggtcgcgggaatcgcgcaggcagcactaccccagagcgtggtagcctgggagtatctggtggaagattatgatcgcattcgcaatgacattgaagctgtgctgccagagtttgccgactataaccagcgcatccgtcatcctggtggttttcacctgataaacgcagctgctgaaaggcgctggatgacgccgtcaggtaaggctaatttcattaccagcaaagggctgttagaagatccttcttcagcgtttaacagtaagctggtcatggcgacagtacgcagccacgatcagtacaacacgacgatttatggtatggatgatcgctatcgaggtgtattcggtcaacgagatgtggtctttatgagtgctaaacaagctaaaatttgccgtgtaaaaaacggcgaaagagttaatcttattgcactcacgccagacggtaaacgtagctcacgccgcatggatagattaaaagtggtcatttaccctatggctgaccgctcactggtgacctatttcccagaatcgaatcacatgctaacacttgataaccacgatccattaagtggcattcctggctataaaagtattccggttgaattagaaccatcaaattaa

SEQ ID NO: 31498 - DNA, 528 bp, Escherichia coli
atgaataaagttattattgcaaccatgcttgcttctactgtttcatttggcgttaatgctgctaatcagggacagggcgttattaactttaaaggtacagtaattgatgctccttgtggtattgcacaagaatcagcagatcagacaattgattttggtcagatctcaaaagctcatttgaacaacaacggtatctcagtcaagaaagatctgaatattaaactggtgaattgtgaccttaccgaacagaaaaaaacagtaagtgttactttctccggtacgtctgttaatggtcatcctgacgaacttggaactaccggtgataccggtaccgccgttgtggtctctgcttcagatggttctatggttaaatttgatggtgcaacaccaagcaattcaactcagttacaagaaggcgataacacgctgaaatattctacttgggttaaaaaatccagcgctgcaactgcagaagtcaaagagggaaacttcactgctgtttctcattttaatctgagttatcagtaa

SEQ ID NO: 31499 - DNA, 825 bp, Escherichia coli
atgtttttatttgagcctcataaatacttatcagaattgaggaaatatcagcctgatatttacaatgcctgtgtcgatgcatttaaatatgatctaatcgataacgacttcattcgcgttgatccactatcattttcccaaagtcctagcttatcagttgattatgcagtaatggaaaagacatcagatgcagttgtagtacctatgaatgctgaatggagcgatgttggttcttgggctgcattatgggaaataagcaacaaagatgatgatggtaatgttttgcatggagatgtaattagtttgtcgaccaagaatagttacatatactcagaatctgagttggtaacaactattggtattgaaaatttggctattgttcagacaaaggatgctattttggtttcgaatcttgcatctactcaagatgtaaaaaaattagttgagatattgcagttaaatggtcgtactgagcattatgttcaccaagaaagatataggccttgggggaaatcagatacaatagatacgggggattcttatcaagttaaaatgctaacaataatgccacgtgaaaatttatcaatgcaggtacattacaaacgcgccgagcattgggttgtactttctggttgtgctaagatagtcattgatggttttgaaagtattttaaatgaaaatgagtctgtgcatattcctgtaggtgtaaaacattatttagaaaatattggtgatacgcctctcagagttattgagatacgttctggttcttatttagaagaagatgatattatcaggttttctgacaatgatggatatgtttaa

SEQ ID NO: 31500 - DNA, 681 bp, Escherichia coli
atgagtaagaagattccagttacacaaccatttcttcctgagttatcggagtttataccattcctagagaaaatatgggaaaataaatggttgacaaataatggtccatttcaccaacaacttgaaagagaattatgtgaatttcttaacgttaaacatatatctttatttacaaatgcgacaattgctcttgtaacagcacttcaagccctaagagtgaaaggtgaagtgattacaactccatattcatttgttgcaacctcacattctatattatggaacaatcttacgccagtatttgtcgatattaaagaagggggatttaatattgatcctaaaaaaatagaagaggccattactccaaatacaacagctattatgcctgttcattgttatggttatccatgcgaagtcaatgaaattcaaaggattgctgataattatggactaaaagtaatatacgatgcagctcatgcttttgggattaattatggggatgaaagtattttaaattttggcgatctttcaattttaagctttcatgcaacaaaagtttttaacacatttgaggggggagcgataatatgtcctgatctaaaaacaaaagagagaatagatagattgaaaaattttgggtttgtagatgagttaacagtgactgcagctggaataaatatataa

SEQ ID NO: 31501 - DNA, 279 bp, Escherichia coli
atgactaatccaacggttccatctacgtttaccaatgttgtttcaaaacctgtaattcttgagaagcatgttattgtaggctgtggagcagttatcttaccgggagtacttatccaagaaggtgctgcaattgcagcactttcacttgttaaaaaatcgtgtgaacctttttatatctatcatggtaaccctgcaaaaaaattttttgcgagaaaaaaagtaataaagaatcttgagagaaaccttgaagaatttgataatttaaaatgtcaaaaataa

SEQ ID NO: 31502 - DNA, 237 bp, Escherichia coli
atgtataatctggctatttcactatctgataactcctctatgcatttaatctctccaccgtttctgataaatctctggacttcatttcgtcgtgttttttcaaatttcgtggaaaattcttcttttattatgcagttttgcttttttctggctatactccatgttgcatttattatgttaggtttatttatcatggataatttattcgttttgtccggaaaaaagcatttcgtatga

SEQ ID NO: 31503 - DNA, 237 bp, Escherichia coli
atggaactatttgtcatctcttcaaaaattcctctgtgtaaacgcattaaactggtcatctcactttttaaaggtgttatgaccatcctctgtggttacaactggtcgcttaagttcatacctgccgagaaagcacaggttgatggattaagctttgacgtctatcaggacgatgttacatcgcaagatgtgcttatcgtcctagttgataataaacgaactatgttgcctgaataa

SEQ ID NO: 31504 - DNA, 1332 bp, Escherichia coli
atgaacaataacagtcagaaagctttgagtaagaagaaaaccaagaaaaccaaaaagaagtcgcttacccctgaacaaaaagcattgcaagcagaacaagcagcaaaaaaagcgcaaattatagagaataggcgctctattacagctcatgctattaacctttttcagcaatatacagcactccgtaaaaaaggattagatagttccactgctactttgcaagcttatgctgattatgaaaaagtacatggacataaattccttagttctatctctatgtggacaaaaatcaaaactgaagcagggattcggatctatgatcgtgagagacaagatagtcgtaaatcgcttaatcttgctaagatcccaacccgtttagaggctaagcgtagtgtactgacacagaatcaaaagaaagtacataaccagaatgcaaatacattacgcttaatcggtggcaaaaagctacctgtaacatctatggggcttattgtatgtcctgtctgcgagatacatataaaagatagtgctatagagtggcatttacgacacaaccacgtagatcatatagataacccgtttactaaccctatagtagctccggttgatactttagaagaggctgtagaaatacgagacctactaattggtgataaaacacttccgattaaatctagtactattaatatggggagtgacaagaaagataaacgttattttaataagcaagtttatcaaacggcattgctaacaatgacacaatcagaagcgtggaaactcgcgactgatgaagaatctagtatgacttttttaagcaatcagtacataagtccattaacatcaccggaacccaataatgaaatatctcttatcatggatggaacagctatagccattaatgaaggtctaactaatcctttaaaagccgcaaacgatacctgtgctacaggacgaacagtcgaggttactcataaagtccgtcatgctggagatcaagctgatttcaaacgccgtgtttgggataacttcaatggcagatgtgctattactggctatccattgccagaggggatattggaagccgcacatattgaagcaataacagaagcggcaaataataacacatctaatggcctgttacttgaagtaagtttgcaccgaatgtttgataaaggattgatggggattaatccagaggacttaacggttcatttctctattaattgtatccacaaaactatgtttgagggtaaaactctacaaccacatcatgtagaacttgatgctgacaagttgatgacaaaatggaaaaagttcaatgataagcgttaa

SEQ ID NO: 31505 - DNA, 420 bp, Escherichia coli
atggtgacgcttgatactgtttattggaaatttggttatgcttcggaagcagctcaattactggagactgagttgataaatattatcactgagtatgatatgagtcaggggaaagatatacagtcgctgaaaaaacagtttttagaaatggataaatacacgctgggtagattgaattacgcactgaagtctaggatggtggaggatgctgatacactggagcgtgtgtctgatgctcttaaagccagaaactacttagcacatgacttttatcgcaaacatgctgaaggtaaattcactccggaaggaaggcagagaatgcttgccgacttaaatagtgtacatcacataatttttgaggcttaccgcaaggttctgcaactaagcgacattgaaattcctcctttagagcatgattaa

SEQ ID NO: 31506 - DNA, 921 bp, Escherichia coli
atgtatatgaatggcagaatggaaatgtaccgttatacaccagagagtttgaaacgagcattagtaatatttagagattgtgtgagtacgcaaccgcaaaataccttgccctactgttgcctggcggaatgccatatatcattagccctccttggactcagtgaacaaaaacaagcaataactacggcagtaacctccattgaaaaggctctggaaattaacccttcaaattctcaggcattgggtttactgggtttaatcagtgggctaaaagatgaacattcagtgtctaatgtgctatttaagcaagcacatttactcaaacctaattcgccagacgtttattattatcagtctctgctatgttttttgaacggtgacctagcaagagcatttaatttaatagaaaaaagcattgctcttgaacccaataaaatgggcataagcattcttaaattaatgatactttattacacatcccccctcgataacgcgatatcttttgcattaaatcttaacagtcaaaacacctgtaataatccaattattacctctattctggctatgttcatggcactgaaaggacataatgacaaagccaaaagtttattgcttaaacttgagcctgaacatggtcttgattacacctgtgttaactcgctttatacgaagtttctgatctatggcgcatctataaaaaatgacattatgaagttactggcaaatattaacactaacaaaatcaatggtgtgatcttgccgttaatttacactgtttatggtaagaaagaatatgaaaagcgctggcaacaattaattaaagagaatgatttatggtcaaatgttttgcttcatgacccccgtttactcagtgtgaaaaacgaatttaatactattggtgtgatgcgtacttctgcgtaa

SEQ ID NO: 31507 - DNA, 750 bp, Escherichia coli
atggttctggcctggtatattacactaccaacgcttgttgccttacttgcgccagctaaagggcgatttaacgttactgccaagggcgggttaataaaaaataaatttgttgactggcgaatctcatatccttatcttatttttgctattttaaatttaattggactaataataggtgttattaatatttatagattgcaaggtcatcttgttatattaaatttattttgtttgatttggttgatttataatacaattattattggcgcaaccctggcagtctctattgaacaaaagcaggtccgcttttctcctcggatagatgtttcttttaaaggtgtgataaaactagcagatggacggtgctatccctgttctgttattgatttctccgaaggtggcctgggggttattgttgatcacatctccgatgtaaaagaaatcgaaaaaactcagcatttgtctctttatctgagtgataataaaggggaatgtgatattcctgtaaaagttgttcatgcttacaaaaataaaattggtctgaagattttgccaatgacttatgaacagaatattaattatgtcagagtaacattttcacgtgattcattatggcaagagtggaatgataaaattaagcaagataatatactaaagagcttttttgacgtatgtatcatctctcttaaagggtattacaatatgattttttatattctgcggacactaaaaaatagtcgtgagaattag

SEQ ID NO: 31508 - DNA, 1341 bp, Escherichia coli
atgtttaagtataaaaaaaaggcagcagggatctgttttttgtattttttatgtgtctctgtaatgacatgttatctgtatactatttacgttaaagatcgagtcaattcggtaaaggtatcgatcatagatagtgggcttgctatagctaatgtgtctgagtatcggcgcttagtatttaataatgtattttatgggttagatatttctccggaagagttgttaaaaaggatacgcaatagttttgctgactttcaaaaaccagaatatatttatgatctaggtccctatatcattagcgatggtaaatgcgccaaagttacaacggaaggggataacttttgtgacggcatagtttcttctatccgtataagtaacatctttgaaagagggattattagtttaaataataaatattatatttattatgctcatcctatttcgaaacgaacaagtttgatatcagtggtagatcctgaacgttatttggctttgataagaaatcagtcaggtgaacgggaaaatatatatgtctcattttatgatatcaatgataatgaaaagaaaatcgcgggtgatgattttttgattaatgatgctgtatttgagaaatcagcgatcactcttgcttattcttatatcccggaagtaatgtttattgttgcctataaaaaagataagtatatttatatgtgcttgttttttgttttcacatcggcgatttctgcggggttaatatattttcattacattaaattaatgcaaaaaatcataaataagggtaagtcagaaaaagaatctatattatcgaataatcattataatttgcatggaaaaaatctattctttaacgttgaagagattgatgcaattagagaaatatatgattccgggacttacgatgcattgacgcgagcttctgggtgtcgtgtttttgataaaaatatcaggatgctgagtaaggattttggatatttatgcctgtttgatgtagataagtttaaaaccattaatgacaagtttggtcatttatttggtgatgaagtactaataagacttgttaatcttattaaggatgaattacccctcagcaaaggtgaagtttatcgatttggtggcgatgagttcgctattatttatcatgataaagatataaatcaattatcaagaattttgcacagaatagtccatttctcaataggtggattgaattgtagttgcagtattggtgttgccaatactgacgagtgcatgaataacattgaacggttgaaattactggcagatgaacgattatacaaaagtaagcaaaatggaagagcacaggtaacctggtgttaa

SEQ ID NO: 31509 - DNA, 156 bp, Escherichia coli
atgcgttatattgcgtttaaacgtcatcgaattttaattagttttgatgtggtgattgcaggcaaagaaaatcccgccggagaaagcgggaaagagagacagagcgttatagtaatagatcacattttggagttgaggatggctaatcctcgctaa

SEQ ID NO: 31510 - DNA, 168 bp, Escherichia coli
atgttattcattaaagcaaaagtgaagaaagaaaatggtgaggaagtattttcacaggtccggaatgaagtattccccggcgaatcacttaaagtttttgtggaagagttgaagaaaaagcatggcagtaacgccgatttttatttcgatgatattcactatatctaa

SEQ ID NO: 31511 - DNA, 1479 bp, Escherichia coli; identical to SEQ ID NO: 6748

SEQ ID NO: 31512 - DNA, 1527 bp, Escherichia coli
atgaaacttggaactgtggcaggtactaacgacagtataacgactatcgcaacaaatgatatggtgcaagagcatgttactaacttcactaaagaactgtttgggtatattgcaaatggtataggtgatgatatatcaagtattgccaggacaatgctcggtgaagttgtggaaaaaattgatgattggcaaatagaacgtttccaacaatcttttcaagatgacaaaatttcatttaccatagaaacgaatcattcagaaaaatatagtatgctatcgggcatgcgtgcccatattctacgtaggaataatagttatcagtttattgtgacaattaatagtaaaaattacggttgccctcttgatgataccgatattaattggtgcagcattgtttatttacttaataatatgacagtaaatgataatgctaatgatgttgcagttactgagtcgtacaaacccatctgggactggaaaatatcgcaatataatgtatctgatattaaattcgaaacaattataaaaccccagttcgctgacagaatctatttctccaattgttcacccgttgatcccacaagtaccagaccaacctattttggtgataccgatggctcagtcggtgcagttttgtacgcgcttttcgcaacgggacatttgggaattatggctgaaggagtaaattttcttagccagttgcttaatatagaagatgaagttctcaatgttttattaagggaaaacattaatgaggaactagacattaatgttaatacaataatcagtattctgaacagaagagatgttgttttagaaagtattcagccatatttagctattaataaaggcgcagtgacgccatgtacgtttctgggggaccaaaccggcgatcgatttagtaatatctgtggcgatcaatttatcatcgatttgttaaaacgcataatgagtatcaatgaaaattttcatgtattagctggtaatcatgaaacgaattgcaatggtaactatatgcagaacttcacgcgtatgaaaccacttgatgaggatacctacgacgggataaaagattatcctgtatgtttctatgaccccaaatacaaaataatggcaaatcatcatgggataacttttgatgatcagcgaaaacgttacattataggaccgataacagtctctattgatgaaatgaccaatgctctcgatccggtcgaattagcggcaattattaataaaaagcatcatactataattaatggtaaaaagtttaaaactagccgggctatctcttgtcgatcctttaatcgttatttttctgtttcgacagattacagacctaaacttgaagcactattagcatgctcacaaatgttaggtataaatcaagttgttgcacataacggaaatggtgggagagaacgcataggtgaaacggggacagttttaggtcttaacgcccgtgacagtaaacatgctggaagaatgttcagcatgcataattgggtaatgactccaacttattga

SEQ ID NO: 31513 - DNA, 351 bp, Escherichia coli; identical to SEQ ID NO: 3610

SEQ ID NO: 31514 - DNA, 753 bp, Escherichia coli
atgaaaaaaaagacacctctttattttatatcattactactatcgcttacttttattattttttaccaaccctgggtcaatgcattaccgccaactccccgacacgcaagtcctgagcaattagaaaaatcagttcgttatcttacacaaactgtgcatccacgtagtgccgacaatattgataatctgaataggtccgcagagtatataaaagaggtctttgtcagtagcggtgccagagttacctcgcaggacgtccccattacgggtggcccctacaaaaacattgttgctgattatggtcctgccgatggaccgctgattattattggtgcgcactatgactctgccagcagttatgaaaacgatcaattgacctatacgccgggcgcggatgataacgccagtggcgtggcaggattactcgaactggcacgtttgttacagcagcaagcaccgaaaactggcgtgcagctggtcgcctatgcgtcggaagaaccgcccttctttcgtagcgatgaaatggggagcgcggtacatgcagcttcgcttgagcgtccagtgagattaatgatagcgctggagatgattggctattacgactctgcgcctggtagtcaggattacccttacccggcaatgtcctggctttatcccgatcggggagactttattgccgtggtcggcagaatgcaggatatcaacgccgttcgtcaggtaaaagcggcattgttgtcatcccgggattggtaa

SEQ ID NO: 31515 - DNA, 144 bp, Escherichia coli
atgagcagaattatcacctccaccgtgtatacactgcatgagctatcctccaccgcacaggaaaaagcccgcgactggtaccgtcagcatcatgctgacagcaactggtatgaaaacgtgtatgaggacttcagggaggtctga

SEQ ID NO: 31516 - DNA, 351 bp, Escherichia coli
atgacgctggatactggtgttcgcttcttcgataacgcgttgaccctgggcactatcataaaatacacaggcaaggctcgtcgcctgtcgcctgattttgagcaggacgaacataccggcgcaataatcaaacaggatttgccgcagatcccaacgattatcgatctctatggtacttacgagtacaaccgcaacctgacactgaaactttcggtacaaaacctgatgaacagagattattcggaggcgctgaataagctcaacatgatgccaggtcttggtgacgagacccacccagccaattccgcgcgtggcagaacatggatatttggcggggacattcgtttctga

SEQ ID NO: 31517 - DNA, 354 bp, Escherichia coli; identical to SEQ ID NO: 29619

SEQ ID NO: 31518 - DNA, 384 bp, Escherichia coli; identical to SEQ ID NO: 10122

SEQ ID NO: 31519 - DNA, 1029 bp, Escherichia coli
atgggattgtttacgacccgccagttactcggttataccgaacaaaaagttaaattccgtgcgctgtttctggagctgtttttccgccgcacggtgaatttccacaccgaagaggtgatgctggacaaaattaccggaaaaacgccggtggcggcctatgtctccccgatcgttgaaggaaaagtgcttcgccatcgcggtggtgaaacccgcgtgttacgtccgggctacgtcaagcccaaacacgaatttaattaccagcaggcggttgagcgccttcctggtgaagatccggctcagctgaacgacccggcctaccgtcgtctgcgtatcattaccgataacctcaaacaggaagagcacgccattgtccaggtggaagaaatgcaggcggtgaatgccgtgctgtatggcaaatacaccatggaaggggatcagtttgatactgtcgaggtggatttcgggcgctctgaaggaaataacattgagcaggctgacggtaaaaaatggtctgagcaggaccgtgatacgtttgatccgacgcatgatattgacctctactgcgatcaggccagcggccttgtgaatatcgccattatggacggtacggtctggcgtctgctgaatggctttaagctgttccgcgaaaaactggatacccgtcgcggctcaaattcacaactcgaaacggcagtgaaagacctgggggcggtggtgtccttcaaggggtattacggcgatctggccattgtggtggcgaaaacgtcttatgtggcagaggacggtaccgaaaaacgttatctgccggagggcacactggtcctggggaatacggcagcagagggcattcgttgctatggtgccattcaggatgcgcaggcgttgtccgaaggtgtggtggcctcttcccgttatccgaaacactggctgactgtgggcgatccggcccgtgaattcaccatgacgcagtccgcaccgctgatggtgctgccggatccggatgagtttgtggtggtacaggtgaaataa

SEQ ID NO: 31520 - DNA, 510 bp, Escherichia coli
gtggctacgcagactgaagttgccaggcatttaagtctgaccgatcgccagcttcgcagattgcagaaattgccgggtgccccgatatcgaataagcgagggcaactggatctggatgcctggcgcgatttttacatatcgtatctgagaagaagtaaaaacgatgtgcctgatggcgatagcgaagacgactatgaggagaaattgcttattgccagatgggaactgacagcagaacaggctgttacacagcagttaaaaaatgaggtgtcaaaaggaaaacttattgacaccgggttctgtatttttgccctcagcaagctggcaatggcgttatccagtacgcttgattccatccctttatccatgcagcgacagtttcctgatttaacaccgcgccatcttgaccatctgaaaacccttattgcgaagggggcaaatcagtgtgcgcgggcgggggataaattaccggatttactcgatgaatatatcagagcaacaactgaataa

SEQ ID NO: 31521 - DNA, 141 bp, Escherichia coli; identical to SEQ ID NO: 7044

SEQ ID NO: 31522 - DNA, 207 bp, Escherichia coli
atgaataccccagtttcactgatggatgaccagatggtcgacatgtcgtttatcactcaactgaccggcctgaccgataaatggttttacaagctcatcaaggatggtgcctttcctgcccccatcaaactgggccgtagctcccgatggctgaaaagtgaagtggaagcctggttgcaggcacgtattacacagtcccgtccgtaa

SEQ ID NO: 31523 - DNA, 900 bp, Escherichia coli
atgattgatccacttattagaaacttacagagtgatattgcactactccagctttatatcgcgcaacgcaaacaggcaggctttcatgacatggaaagaataattgagtcattgaccatctttatgtttcgcgcgctgaaaatgggtgaactggtaaacatgaatcagattaaagttaattttcccgccattgatttagctgataataaaaacatgatagcagttcaagttactacgaatgcaagtccagcaaaaattaaaaaaactatcgaatcttttgaggaaacaaatgaaataggagagagtctgaaagataaatactctactttatatatttttggtttttgtaaagcctcaagatacctaactccaagttattgtaaaataatcgaccccagctatttcgtgaatgaactttgcgataaagcagatgaagatatggtccaggatatgattgacgccattcgacgccatcatgattatacatcattacatccatggagtgataaagattcactcgaaattatactcaatattattaatcgcaatgcaataaaacatcggatgagttgcgaaggcagtctgtctgatatgctcactggtttaaaagaaattaatgaagtaattacaaaaggaacaattcaacgtaagcaacgttcaaaatcgatatctgacttcaaagatcaaagcatggtgaaatttatgagaggtgtaatggatgatttgtctgttattcaagccatagtgaacaaatctaaagttaaccaaggtgatatggtttatataagccatgaagatatgattaatattgataaattaaaagctaaaatagcaagtgattcatcagagattgcaaggctaaataatattgatataacactaaatgttgttgatttataa

SEQ ID NO: 31524 - DNA, 654 bp, Escherichia coli
ttgaattacaaaataaatggaataaacatacgttcagaaaatgcagcgaaaccgcacactatgccatctaactatctctgtaaacagattgaaagcactaataaaaatggcaatgcccttgattttggatgtggaaaacttagatattcagaacaattagtaaataaatttgaaactgtgacatttttagattccagaagacaactagaaagagtgcaaattatcagaggtgtacaaaccacgattccagattacgtgataaataactataagaatgctaatattgtttcttatgaaaatatagataaaataacaaatcattatgatttcatactttgcgcaaacgtgctttccgcaattccatgtgaatccacaattcacaaagtcctcagtgcgattagagaattattaaagagtgatggtgaagcactgattgtcaatcaatacaaaagttcttatttcaagaggtacgagagcggtattaaacatttgcatgggtatatataccaaaactctcgtaatgctttctactatggtttattagatgtggatactgtaagtaaaatatgctcagataataatttagaaataataaaatcatggagcaaagcaggtagttcatatgtggttgttggtaaacatatacatatttag

SEQ ID NO: 31525 - DNA, 696 bp, Escherichia coli
atgttagaaccaccaaagagttataatgaaatgttgcctatgctccataaggcgacttttattactacatttatattttacctatcattagtcatttatggctacatgccattggttggcattaatgccaagtatatcccccccgttaaagactacgaggaatttattaaatggatattaacctttggcatattaccaattgcatcttcagttttttggtcagtaattagtggagctttagatctacataataatgtagcaaaaattattggaataaggaagatgtgggatagtcatttaattattaaaccattagcaaaaattgcaggcgttacgagaaaattaactactgatgaatctcacaaggtaatgagtaaactgtattacccagaagttaaagagttaaaagacaaacattacgttgaacttttctggaacaaagtttattacttttgggttttctttgaacatacagtaatcgcatttgttactattttaataataagtatcgccaaattaacaaatatattctctgttactggctctttaattaatctttggttgtggattatttctcttgtcgcatttaacttccttattttcatagcatcagttaaaccaagaacagaaagccaagtaagacaaatacctgatagcaaaataaaagaattctttaacaataacaatattttttaa

SEQ ID NO: 31526 - DNA, 2808 bp, Escherichia coli
atggcaaacttttttattcgacgaccgatatttgcatgggtgctggccattattctgatgatggcgggcgcactggcgatcctacaattgcccgtcgctcagtatccaaccattgcaccgcctgcggtttctgtttcagcaaactatccgggcgctgatgcgcagactgtgcaggatacggtgacgcaggttatcgaacagaatatgaacggtatcgataacctgatgtatatgtcctccaccagcgattccgccggtagcgtgacaattacccttaccttccagtccgggaccgatcctgatatcgcgcaagtgcaggtgcagaacaaactccagctcgccacgccgttgctgccgcaggaggttcagcagcaggggatcagtgttgaaaagtccagtagcagctatttgatggtggcgggctttgtctctgataacccaggcaccacacaggacgatatctcggactatgtggcctctaacgttaaagatacgcttagccgtctgaatggcgtcggtgacgtacagcttttcggcgcacagtatgcgatgcgtatctggctggacgccgatctgctaaacaaatataaactgacaccggttgatgtgattaaccagttgaaggtacagaacgatcagatcgctgccggacagttgggcggaacgccagcgttaccagggcaacagttgaacgcctcgattattgctcagacgcggttaaaaaatccggaagaattcggcaaagtgaccttgcgcgtaaacagtgacggctcggtggtacgcctgaaagatgtcgcacgggttgaacttggcggtgaaaactataacgttatcgctcgcatcaacgataaaccggcggcgggcctgggtattaagctggcaaccggcgcgaatgctctcgataccgcgaaagccattaaggcaaaactggcggaattacagccattcttcccgcagggaatgaaggttctctacccttatgacaccacaccattcgtccagctttctattcacgaagtggtaaaaacgctgttcgaagccattatgctggtgttcctggtgatgtatctgttcttgcagaatatgcgagcaacgctgatccccaccattgcggtacccgtggtgttgttagggacgtttgccatcctcgccgcttttggttactccatcaacacactaacgatgttcgggatggtgcttgccatcgggctgctcgtcgatgatgcgatagtggtggtggagaacgtcgagcgcgtgatgatggaggataagctcccgccaaaagaagcgacggaaaaatcgatgtcgcaaattcagggcgcactggtgggtatcgcgatggtgctgtcagcggtatttattccaatggcattcttcggcggttctactggggcaatttaccgccagttctctatcaccatcgtttcggcaatggcgctttctgttctggtggcattgattcttaccccagcgttatgtgcaacactgctcaaacccgtctctgctgagcatcacgaaaataagggcggtttcttcggctggtttaataccaccttcgatcatagcgttaaccactacaccaacagcgtcggcaaaatcctcggttccacaggacgatatttactgatctatgcactaattgttgctggaatggtggtgttgtttttacgtcttccgtcttccttcttacctgaagaggatcagggagtctttctgactatgattcagttacccgctggcgcgacgcaagagcggacgcaaaaagtgttggatcaagtgacggattactatctgaagaacgagaaagcgaacgtagaaagtgtctttacggttaacggctttagcttcagcggccaggcacaaaacgccggtatggccttcgtcagtctgaaaccgtgggaagagcgtagtggtgacgaaaacagtgcggaagcggtaatccatcgtgccaaaatggaattgggcaagatccgcgacggttttgtcattccattcaatatgccagccattgttgaactgggcacggcaacgggtttcgactttgagttaattgatcaggctgggctgggtcacgatgccctgacccaggcccgtaaccagttgcttggcatggcggcgcaacatcctgccagcttagtcagcgtgcgtcctaatggtctggaagacaccgcgcagtttaaactggaagttgaccaggaaaaggcgcaggcattaggtgtttcactttctgacatcaatcagaccatttcaacggcgttgggtgggacttacgttaacgacttcattgaccgtggtcgcgtgaaaaaggtgtatgttcaggcggatgccaaattccgtatgctgccagaagatgtcgataaactttatgtccgcagcgccaacggcgaaatggtgccattctctgcctttaccactgcacattgggtgtatggctctccgcgactggagcgctacaacggtctgccgtcaatggagattcagggggaagccgcgccaggaaccagttccggcgatgccatggcgttgatggaaaacattgcgtcaaaattaccggcgggcattggttatgactggacgggtatgtcatatcaggaacgtttatcgggaaaccaggctcccgctctggtagcaatttcctttgaggttgttttcctgtgccttgctgcactctatgaaagctggtcaattcctgtctcggttatgttggtcgtgccgttagggattgtcggcgtgctactggcggcaacactctttaatcaaaaaaatgacgtctactttatgggtgatgctgccaacttactgatttag

SEQ ID NO: 31527 - DNA, 186 bp, Escherichia coli
atgagtatccagcacgatgatctcgtcaaccccttcggcatgagggtaaacagggtgaatatgcagttcgccaaaacgctgggccagcgcgcgttgctgctgcggcgtaatagcttgatcgcgcagaaacaccacctgatggcgcagcaccgcatggtaaagctgttcaaactgattatcgcttaa

SEQ ID NO: 31528 - DNA, 753 bp, Escherichia coli
ttgagtgcgggacgcctgaataaaaaatctctgggtatcgtgatgttgttatcggttggactgcttttggcgggctgctcgggtagcaaatcatccgatacaggaacgtattccggctccgtttacaccgtgaaacggggggatacgctatatcgtatttcgcgcaccacgggaaccagcgtaaaagagctggcgcgactgaacggcatttcccccccttacaccattgaagttggtcagaaactaaaactgggtggggcgaaaagtagcagtacacgtaaatcaaccgccaaatcaacgaccaaaaccgcatcggttacaccgtcatcagcagtaccgaaatcttcctggccgccagtagggcaacgttgttggttatggccaacgacagggaaagttatcatgccgtattcgacagctgatggcggcaataaagggattgatatctcagctccacggggtacacctatttacgctgcgggtgcaggaaaggtggtgtatgtgggcaaccagctgcgtggctacggtaatctcatcatgattaaacacagtgaagattacattacggcttacgcccataatgacacgatgctggtaaataatgggcaaagcgtgaaggctgggcaaaaaatcgccactatggggagcactgatgcggcatctgttcgcctgcatttccagattcgttaccgtgcaacggcaattgatccgctacgttacttgccgcctcagggcagcaagccaaaatgctga

SEQ ID NO: 31529 - DNA, 2397 bp, Escherichia coli
atggcagtaaagatttcaggtgtactgaaagacggcacaggaaaaccggtacagaactgctcaatccagctgaaagcaaaacgtaacagcaccacggtggtagtgaacacgctggcctcagaaaatccggatgaagccgggcgttacagtatggatgttgagtatggccagtacagcgttatcctgctggttgaaggtttttcgccttcacatgccgggaccatcaccgtgtatgaagattctaagccggggacgctgaatgattttctcggtgccatgacggaagatgatgtccgtccggaggcactgcgccgttttgagctgatggtgaatgaagtggcacgtcatgccggagcgtcatcacagagcgcagcggcggcaaagaaatccgaaactgcagcggcatcatcgaagaacgcggcgaaaacctcagaaacgaatgcagctaatagtgcacaggcggcagcgacctcaaagactgcatcggcaaactccgcgacagcagccaaaaaatcagaaaccaacgcgaaaaatagcgagacagccgcaaagacgagcgaaaccaacgcaaagtccagccagacggcagcgaaaaccagcgaaacgaatgccaaagccagtgaaactgcggcaaaaaacagccaggttgcagcagcccaaagcgagagcgcggcagccggttctgcgacttcagcagctggatcagcaactgctgcggctaacagccagaaagctgcgaagacgagtgaaactaacgcaaagtccagccagacggcagcgaagaccagcgaaacgaatgccaaagccagcgaaactgcggcgaaaaacagtcaggatgcagcagcccaaagcgagagtgctgcagctggttctgcaagcgcggcggctgcttctgccactgcatcagccaacagtcaaaaagcagcaaaaaccagtgaaaccaatgcaaagacaagcgagactgcagcggcgaactcggcgaaagcatcggcagcaagccagacagcagctaaagcaagtgaagacgcagccagagagtatgcaagtcaggcagcagagccgtataaatatgtcttacagccactgcctgatgtgtggataccgtttaacgattcactggatatgattacgggcttttcgccgtcatataaaaaaattgttattggtgatgatgaaataacgatgcctggcgacaaggttgttaagtttaaacgcgcatcaactgccacatatatcaataaatcaggcgtatttagtgttgctaaaattgatgagccacgatttgaaaaagaaggtttattgattgaaggacagcgcactaactattttgttaaatccaatactcccgctgaatggacgagtaccagcaatatcgataaaactaataatggtgttgatgaatttggtttttcatatgccaaaatgcgaacaaaagataatatgacaggacaatcatctgcacttagtctgcatacatgcagtgcatcccgggggattgatgtttgtggcgataataagtattgcactgtttcatgcagggttaaagctcctgatggtcttcgttgtcgtttgcgttttgaaaaatacgatgggtcggtttatacatttttaggagatgcttatttaactttcggaactctgataatagaaaaaactggcggagcagccaatagaatagcagctactgcaactaaagatccggttacagggtggattttctatgaggcaactatagaagctgttgaaggtgaaaccttaattggcgcaatgattcagtatgcgccgaaaaaaggtggtataactgaagcgggagattatatttaccttgcaacaccacaatttgaaaacggcggatgtgcttcatcttttgttattacgacaactgcacccgcaacccgctccagtgatatggtgacgatcccaactgaaaataatatctataatagaccgcttacgtgtcttgtcgaggttaatagaaattggggcgatattcctcctaatgtagcaccgcgtatttttgatttttctggtgtgccacctattgagtcaattacatacgcttttaacacaactgagaaatattacggtcagctttatatgcaaacttataaagcgtcgacaagtacttacgtttctagtgtgtttgctggtcgagctgatgttcgaaaattcattggtggttttaatatttattctgatggtactaaacgagtagtttctaacggtgaggctactaaaactatgaaaacggagtggacgggcgtaaaaacacggacctttattcgaattggaggtcaagccacatcgggaactcgtcatctattcggccatttgagaaatcttcgtctctggcataaagaattaactgatgcgcaaatgggggagagtattaaatga

SEQ ID NO: 31530 - DNA, 1281 bp, Escherichia coli
atgattacgggcttttcgccatcatataaaaaaattgttattggcgacgatgaaataacaatgcctggcgacaagattgtaaagtttaaacgcgcatcgaaagcaacttacattaataaatctggtgtgctgacagaggctgccattgacgagccacgatttgaacgtgatggcctgcttattgaggggcaaagaactaacctgctaatcaattcaacaaatccgactaaatggaacaagtcgtcaaatatgatcttaagtgcatcaggtgtagatgatttcggattccagtacgcaaaatttacattaaaaccagaaatggtagggcaaatttcagcgattaacatagtaaccgtttccggcagtaaaggttttgatgtaacaggcggagaaaagtatgtaaccatatcatgcagggtgcaaagtggcactccaaatttaagatgccgattacgatttgaaaactatgatggttctacctacacattcttaggtgacgcttacttaaatacgacagatttatctattgataagacgggtggtgccgctaatcgcattactgcaagggctgttaaagatgaagcaagcaaatggatcttttttgaggcgacaattaaggcacttgatacagaaaatatgataggtggaatggttcagtatgccccggcaaaaggagtgggcactggcgcggatgattatatttatattgcgacccctcaagttgaaggtggggcatgcgcttcatcgtttattataacaggcgcatcccctgtaacacgcgccagcgatattgtaacggtccccatttctctaaattggtgcaatcccgctattagttcattagcagaagttaataccaattgggatgaatcgccaaacaaagaaggtagcgcacgtattcttaatatttccactacgggagatacaactgaaattgcagatgaaagttatatgtatttggggtatacatctttgggagcacgcgcaatcattacaaatggtaaaggcactaaaatagaatataaaagcgttatagaacgaccagagagaaaaagcattatcggctttagattcacagaaagtcgagaattgtgtgttgtggttaacggtaatattggtgctaaggtagtttctccttataaaaaacacaaatatacaggaggcttcattaatattggtggtcaatcatcatccggcaaccgtcacctatttggacacgttcgaaatctgcgtatttggcacaaggcattgactgatgctcagatgggggagtcaatctaa

SEQ ID NO: 31531 - DNA, 1959 bp, Escherichia coli
atgcaaccagtatctcttgatgtattagtctctgcatcccttccatgggcaaaggaggttattaagaataaaatattacctatcatagaaagtagtgttcgtaattatttaatagatgtacatgcagcacgcttcttgaataaaaatcttgaacgtttcctatcaaatgtgaaagggcaatgctcccttgtgaataccttagcttttcaaaatactccagtagagcttctagatatttatgagccaatgagcatttattacgataatgaaaaaaaaccatacacatgcctaataaaagacaatgcagatttattagataatttcaatcatatattaatcactgactcagcaggaatgggtaagtccaccctaatgaaaagaattgctttagattgcatcgctaataaggaatacattccaatatacattgaattacgacgtgctaaagattatgattttgcgctacaggtgaaacatcaacttggtttaggagaagacatttcagacaactgcctcaaaaaaatcccttttatttatcttttcgatggcatagatgaaatcccacaacaactcaaatccaagatcgtaaatttactaagtacctttgctaataatttctcagaaagcaaaataattataacttctcgtcatgataatttcttatcagaactacatggtttctcaagatttaaaatcaacccattagaaacgaatcaagcgtatgatctattacgtcgatatgatggacgtggccctatttcatctcaattaattaaaggattacgactggagaatggtcataatctaaatgaatttttatccacacctctttatgtttcattattattttgtgcatataaattcaaaccgataataccaagaaaaagagagttattttatagccaagtatttgacgctttgtatgagtctcatgatttaactaaagaacttggttatgttagagaaaaattttctaagctagactccactgacttccatcaggtcttaaggagattaggtttttggtgtttgaaagacggaggtaaaattgagtttacgaaagacgatctgcaaataacattgcaaaatatcatttcaaaaattcccggaatatcaacttcaccatctctttttattcaggacttaattgaaaccgttccattatttgtcaaagaaggcgctattattcgttggtcacacaaatcattaatggaatattttgcagctatgtttatctgtcgtgacacaaaagaacgccaaaaagaaatattaacaaagctatattacagccctgaatccattcgtcacagaaatttattttcactttgtgctgatattgattactcatctttcagatcaagtataataaaatgcttgcttttagacttaaaatcatcttacgaagaattaaaaaatgagaccgcgcaatttaattgcgatactataaaaaccaaggctgaaatatcattagccggcaattcaataatttacctttttgataaagataaagaaaatgagttgctaaatgattttttcaagggtgacttaagagcctttaatgaactaagtgaaaatggctcccacatcattaccaccatcacaggggttgccaaccattggcttgtgatagcacgggaaagcactatcaagtcggatatactaagtattttaaaatcaagaaaacctagttatttccataagacacatcgattcttcaatactgatccagagttggagtcaaatatcatgatggaagtaggaaaacaacccgaagttaaattcaatttaactttagactcacttaaagacataaataaagataaagaaataagactaatcgaatctttattgtcatttgaaaacactccccaaataaagtacgacagtgctttatttgagttagagcaaataaattgtgatgagagcaatggtatcaatcagctacttgatggattttaa

SEQ ID NO: 31532 - DNA, 720 bp, Escherichia coli; identical to SEQ ID NO: 14122

SEQ ID NO: 31533 - DNA, 189 bp, Escherichia coli
atgaaaacgttattaccaaacgttaatacgtctgaaggttgttttgaaattggtgtcactatcagtaacccagtatttactgaagatgccattaacaagagaaaacaagaacgggagctattaaataaaatatgcattgtttcaatgctggctcgtttacgtctgatgccaaaaggatgtgcacaatga

SEQ ID NO: 31534 - DNA, 192 bp, Escherichia coli
atgaattcagcatttgtgcttgttctgacagtttttcttgtttccggagagccagttgatattgcagtcagtgttcacaggacaatgcaggagtgtatgactgcagcaaccgaacagaaaattcccggtaactgttacccggtcgataaagttattcaccaggataatatcgaaatcccggcaggtctttaa

SEQ ID NO: 31535 - DNA, 633 bp, Escherichia coli; identical to SEQ ID NO: 31214

SEQ ID NO: 31536 - DNA, 423 bp, Escherichia coli
atgttcctgaaaacagaatcatttgaacataacggcgtgaccgtcacgctttctgaactgtcagccctgcagcgtattgagcatcttgcctggttgaaagagcaggaaaaaaaggctgaatccagcggcaacctgcaggtgtctgtagaggatcttatcagaggcggggcgtttctggtggcgatgtctctgtggcataaccatccgcagaagacaaagctgccgtccatgaatgaagccattacgcagattgagcaggaagtgcttaccacctggcccacggaggcaattgctcaggctgaaaacgtggtgttacgtctgtccggaatgtctgagtttgtggtgaataatgcccctgaacaggcagatgacgccgggcctgcagagcctgtttctgcgggaaagtgttcgacggtgagctga

SEQ ID NO: 31537 - DNA, 186 bp, Escherichia coli
atgaaaaaccgtaaagccaaaatcatcgttcttcgcgctctgaaaaactgctacccgcgccaatggctgaatgtaagcaatcgacgcatggttctcttcacgctaggtggtgttagccgtgaagggcatcaattcaaaaacagcgcagcacagaatcgctggaagaatcatgcgaggttccaatga

SEQ ID NO: 31538 - DNA, 258 bp, Escherichia coli
gtgccacaaaaagttcgtgccctgaagattggctctatagaacataagccaaacccagatcagtctggtaagactggctcttctagttatggggcaattattcatccggatgataagaaatacgcagcatttgatgttagcgcggaatatatctgtaagcaccgaccaatgtctggaggctattacgttgtctatgaggatggatatgaatcatattctcctgctgaggtatttgagtctggatattcaaaattatag

SEQ ID NO: 31539 - DNA, 180 bp, Escherichia coli
atgacaagcgtcgttgatcttggtaaggagaagaaattcccaattactcaagagctatacgagcggctggaaagcgtcattcatgattacgatggtgaaatcagtttatgcgaggcgattggcacactcgaattgctgaagcagtcactgattgaaggcgcgaaagagtcctcagcctga

SEQ ID NO: 31540 - DNA, 753 bp, Escherichia coli
gtgagcgaaattaattaccaggcactgcgtgaggcggcggaacgtgcaattccagcaatggaacgcctgttaatgttgccagctgatgatgatttgttaagtgaacaggaacttaaagattacggtgtggatattgatgcgctcaacgccttcaaatttctgaccggaccagaaaccgtgctggcgctgctggatgaacgggaaagaaaccagcaatacataaaacgccgcgatcaggagaacgaggatattgcgctaacggtagggaagctgagagttgagcttgaggaagtaaaacaacacgctgaagaattatccgaaaccaaggctgttcgtaaccaatggcggccagatatttgcccaataaccggacgtgcatttttcatgtggattgagcatccaacattgggaaatgtgccgacatatggtggcccattagatagttacaccattccaacaaaggacggtgacggtgagttttcatgtgagcgttacgatcatgattttggcggttgggtagaaagcgaatgtcttgggttatatctgattgatgatagagaacaatgcagggtctacgaactggaggaacgcgttaaggaactggatgctcgggaaatatcgctcccggaacgtagcagcatgcttcatcgaacagattttcacgatgattaccaaacggtaatggcatacaaagtttctgaagtcatcgctgcaatccgcgccgcaggcattcgcatcaaaggaggtgagtaa

SEQ ID NO: 31541 - DNA, 1098 bp, Escherichia coli; identical to SEQ ID NO: 14705

SEQ ID NO: 31542 - DNA, 1359 bp, Escherichia coli
atgaacaaaatttttaaagttatctggaatccggcaacaggcagttacaccgttgccagtgaaacggcaaaaagccgtggcaagaaatccgggcgcagtaagctgttaatttctgccctggttgctgggggaatgttgtcgtcgtttggggtacaggctcaggcaggaagggacaacggtcagggcgtcaattatggccagggaacaggaacaggctgggttgctatcggtgaagatgcaaaagcaaatagttttacagacaccgggggtggctccagcaccgcagtaggttatcactcaactgctgacggaaggtggtcaacagccctcggtgctaagacccattcgcttggcgaagcatcagtggcgttagggattaacactacctcagcaggtgagcgaagcctcgctataggtgcatcggcaacgtcaacgggtggattttcaatcgcacttggtcgttatgcgaactcagtaggtgaattttctattgcacaaggggatcacgcagagactggtgctgatgacgccatcgcatttggacgtgaaagcaaggccttaggaattatgagtatcgccctcggagccacggctaatgcgtcgaaagaatatgcaatggcgctgggtgcaagtagcgccgcatctgcagctaacgcgattgcagtaggccgcaacagtgctgcagctggcgtagacagcctcgcattcggtagactatccgccgccaacgccgcaaacgcgattgctatgggtgcagagagcaaagctgctgaaaatgcgacggcagttggtactaacgcggaggcaaatggacttaatagtatcgcgttgggctccggcagtattgcagatgtcgacaacacgattgctctgggcaatcaaagtcaggcagtagcggctggcgcaattgccatcggtcaagggaataaagctgacggcgcaaatgctatcgcgctgggtaatggtagtattacaggtggtgtaaatgctattgctcttggacaaggcagttatgccggtttagaaaatggcactgcaattggtgctcaagccagtgctcaggggaaaaattcagttgctctgggtgctggttctgtagcgactgacgcggatactgtttctgtgggtaacacaacagctcagcgacaaattgtcaatatggcagcaggtgatatcagcactaccagtactgatgccatcaatggatcacagctttatgctatcagtaagtcagtagcggacaatcttggtggggggggctaccgtcaatgcgcaaggcgtcgttacttccccaaattacaggctgaaaagtggtattttcggcactgttggcgacgccttaacgggcctggacaataa

SEQ ID NO: 31543 - DNA, 738 bp, Escherichia coli
atgacatcagacaatatcgctgaatatgttggtgagaataatcaatttactgagaagcctgtaactgaataccccccggtgatacaggataatacagtgaccactaaagactatctgtacagcaataatattgatactgaccttttagtggttatcggagggcttattgttatattgtttctcatgatgcttatcatgtactttattaattctctcaggcataaggaattaactgaaatactggaaaaaatatcttttcctgaaaaatccgggagcaatttgcttaaaccggaggcggtcagctgtaatttgttgtccctgtgtgtgctggcaccggtactctgtacacccagaaagctggcagaagtctccagggagatcatcgtggcgagtgcgcaggaaattgcatggacgccggggagcagtcgtattgatggccaccaggcggagaatatcacctgggcgatttcatcgcagtctcctgccgataagtatgatctcatcaataaaacctcccgtgtttctcctgacagtggccgtttttatgaaccggacacagttctggatcaccgtgaacgggtacgcctttttattcagatccagtttccgcacgggagtgactggtctgaagtattgcgactgactgacattgttacagagaaggtctcttccggcagggctgcaggcgggtatcaccaccggcatacagggtacacctggtctgtttctgtgaattaa

SEQ ID NO: 31544 - DNA, 207 bp, Escherichia coli
atgacgcgacaggaagaacttgccgctgcccgtgcggcactgcatgacctgatgacaggtaaacgggtggcaacggtacagaaagacggacggcgagtggagtttacggccacttccgtgtctgacctgaaaaaatacattgcggagctggaagtgcagaccggcatgacacagcgacgcaggggacctgcaggattttatgtatga

SEQ ID NO: 31545 - DNA, 651 bp, Escherichia coli
atgcatcatcaagtgccagtagtgcagcttcctcggcaacggcggcaggaaattccgcgaaggcggcaaaaacgtccgagacgaacgctaagtcttctgaaacagcagcgggacagagcgcctcagctgcggcaggttcaaaaacagcggctgcattatctgccagtgccgcgtcaacaagtgccgggcaggcctcagccagtgccaccgccgccggaaaatcggcagaaagcgccgcatcatccgcttcaacagccacaacgaaggctggcaaagccactgagcaagccactgcagcagcgaggtctgcttctgcagcaaaaacctctgaaacaaatgcaaagacttcagcagacaatgctgcttcctctaaggcggcagccgcatcgtcagccagttcagcggcgtcatcggcatcatctgcgtctgcttcaaaagatgaggcgaccagacaagcgtcagcagcgaaaggtagtgccacgacagcaacaacgaaagcatcagaggcggcaggcagtgcgacggctgcatctcagagcaaagttgctgctgaatccgcggcaacgcgcgccgagacagcagcaaaacgggcagaggatattgcatccgccgtggcgctggaggatgcgagcacgacgaaaaaggggatag

SEQ ID NO: 31546 - DNA, 177 bp, Escherichia coli; identical to SEQ ID NO: 26476

SEQ ID NO: 31547 - DNA, 468 bp, Escherichia coli; identical to SEQ ID NO: 7045

SEQ ID NO: 31548 - DNA, 183 bp, Escherichia coli
atggtcgctgtggatgcagaagtggctgccgatttttgtgatgctgcggcattcgtttctgacgttttcgcggcactggcgctggtagctgccgcgctttttgatgactctgcagcagcagcactttttgctgcttcacgggtctttgtcgatgccgttcctgcgctggaagacgctgactga

SEQ ID NO: 31549 - DNA, 279 bp, Escherichia coli
atgattggtaagtttggtgcggccaaagaccagtggttcagttccttcctgctgcaggtggaaaaccattcctcctggcaccgtctgtttgtggacccgttaagccgcgccatgtacagctctgacggcccggattttgagtttgtgcagcagaaacgcagggagggcctgagtattcatgaggcggtgtggcagctggcgtggaagaagtcagggccggagatggcttcgctggaagcctggctggaagaacatgagaaatacaggagtgttgcatga

SEQ ID NO: 31550 - DNA, 435 bp, Escherichia coli; identical to SEQ ID NO: 5759

SEQ ID NO: 31551 - DNA, 462 bp, Escherichia coli
atggcagaaaaagcccgtcttgcagccctgttaccggagggatggtcacgggatatgacgacgttcctgtcactcagccaggaggtactgttatcccagctcagtttctgcaccgcgtgcagcatccacggcgttcagacccgcgagcatggtcacacgtcacgcagtccgctggactcgctggagagcgctatcggattccacatgcgcgactggtggcagccgacgaaagcaaacttcttcggacacctgcaaaagccgcagattatcgatgccctgaatgatgccggactgtccggtgctgcgcgggacgcggagaaaatgaagaaaggcgatgccgctgaacatgcagagttccacatgaaagacaaccgctgggtgcctggctggatgtgtacaccacgtccacaggcagagacggaaaccacggagtaccgtgacgaccaggcagaagccgcctga

SEQ ID NO: 31552 - DNA, 456 bp, Escherichia coli
atggcagaaaaagcccgtcttgctgccctgttaccggagggatggtcacgggacatgacgacattcctgtcactcagtcaggaggtgctgttatccctgctcagtttctgcaccgcatgcagccttaacggtgtccagacccgtgagtatggtcacacgtcacgcagtccgctggacacgctggagagcgccatcggctttcacatgcgcgactggtggcagccgacgaaagcaaactttttcggacacctgaaaaagccgcagattatcgcagccctgaatgaggcaggactatccggtgccgcacgggacgcggagaagatgaagaaaggcgatgcggctgaacatgcagagcaccatatgaaagacaaccgctgggtgcctggctggatgtgtgcaccacgcccacagacggatgccactgaacgcaccgataacctggctgatgccgcctga

SEQ ID NO: 31553 - DNA, 216 bp, Escherichia coli; identical to SEQ ID NO: 5123

SEQ ID NO: 31554 - DNA, 357 bp, Escherichia coli
atgtatcccaaactggcaaaagcctaccccaccaataaattaccggatttacgcggtgaatttattcgtggctgggatgacggacgtggagtggatgccgggcgacaattattatcttcacagggggatgcaataagaaatattgagggattcgcagatggcgggatcggtatgtcttttgatgcaatcagaggggctttttacgatgcaggaacacgatcagcgagaatgccgaataacacaactactatagacaaaaccgatgaccttggattcgacgcctctcgtgtcgtgccaacagctaatgaaaaccgtcctcgtaatattgcctttaattatatcgtaagggcggcataa

SEQ ID NO: 31555 - DNA, 351 bp, Escherichia coli
atgattcaaaactatgaactgattgtgaaagggatccgcaattttgagaataaagttacggtaactttagcgttacgggacaaaaaacgctttgacggtgaaatttttgacctggacatctcgctggaccgtgttgaaggtgccgcgctggggttttatgaggcagcagccagaaggagcatcagacaggtcttcctggatgttgctgccgggttatgtgaaggggatgagcagtcgccggaaaagcgccccgtaattttagaggcgcagaatgtgtggataacctacaaaggaaagctaccaggaagaattactggttctctgaagactcctccggaatcacaaccttaa

SEQ ID NO: 31556 - DNA, 519 bp, Escherichia coli; identical to SEQ ID NO: 23512

SEQ ID NO: 31557 - DNA, 1041 bp, Escherichia coli
  misc_feature (907)..(916): n is a, c, g, or t
atggattcttgtcataaaattgattatgggttatacgccctggagattttagcccaataccataacgtctctgttaacccggaagaaattaaacatagatttgacacagacgggactggtctgggattaacgtcatggttgcttgctgcgaaatctttagaactaaaggtaaaacaggtaaaaaaaacaattgaccgattaaactttatttctttgcccgcattagtctggagagaggatggacgtcattttattctgactaaagtcagtaaagaagcaaacagatatcttatttttgatctggagcaacgaaatccccgtgttctcgaacagtctgagtttgaggcgttatatcaggggcatattattcttattgcttcccgttcttctgttaccgggaaactggcaaaatttgactttacctggtttatccctgccattataaaatacagaaaaatatttattgaaacccttgttgtatctgtttttttacaattatttgcattaataaccccccttttttttcaggtggttatggacaaagtattagtacacagggggttttcaacccttaatgttattactgtcgcattatctgttgtggtggtgtttgagattatactcagcggtttaagaacttacatttttgcacatagtacaagtcggattgatgttgagttgggtgccaaactcttccggcatttactggcgctaccgatctcttattttgagagtcgtcgtgttggtgatactgttgccagggtaagagaattagaccagatccgtaattttctgacaggacaggcattaacatctgttctggacttattattttcattcatattttttgcggtaatgtggtattacagcccaaagcttactctggtgatcttattttcgctgcccnnnnnnnnnnctgttatgctgcatggtctgtttttattagccccattttgcgacgtcgccttgatgataagttttcacggaatgcggataatcaatctttcctggtggaatcagtcacggcgattaacactataa

SEQ ID NO: 31558 - DNA, 303 bp, Escherichia coli; identical to SEQ ID NO: 21911

SEQ ID NO: 31559 - DNA, 201 bp, Escherichia coli; identical to SEQ ID NO: 7085

SEQ ID NO: 31560 - DNA, 141 bp, Escherichia coli; identical to SEQ ID NO: 7328

SEQ ID NO: 31561 - DNA, 648 bp, Escherichia coli
atgattaaacaaactattgtcgcattgattttgagtgtgggggcgtcatcggtcttcgcggcgggaaccgtcaaggtattcagcaatggcagcagtgaggccaaaacgctgacgggtgcagagcatttaatcgatctggtaggccaaccacggctggcagaactggctgcagattccagcgccgacgatgccgccgcgattaacgccttacgccagcaaattcaggcgttgaaggtgacgggcaggcaaaaaatcaatcttgatcctgatatcgtccgcgttgccgaacgcggtaacccgccgttgcagggcaactacacgctgtgggtcggaacgccgccgtccacggtcacgttgttcgggcttatcagtcgtcctggcaagcagtcattcactccaggtcgcgacgtggcgagctatctctctgaccagagcctgctcagcggtgcggatcgcagctacgcgtgggtggtttacccgtccggacgcacgcaaaaagcgccggtggcttattggaacaagcgtcacgtagagccgatgcccggcagcattatttatgttggcctcgcggactccgtctggagtgagacacctgatgcccttaacgccgacattcttcagactctgacgcagcggataccccaataa

SEQ ID NO: 31562 - DNA, 1002 bp, Escherichia coli; identical to SEQ ID NO: 4952

SEQ ID NO: 31563 - DNA, 432 bp, Escherichia coli; identical to SEQ ID NO: 9330

SEQ ID NO: 31564 - DNA, 318 bp, Escherichia coli; identical to SEQ ID NO: 10871

SEQ ID NO: 31565 - DNA, 219 bp, Escherichia coli
atgttctggaaccctgaagtaataacgacgaccggaaaatcgcttcgcatcactcaaattaaatttaacataatatacattatgcgcaccaatggtaaggatggcagaatctggcgggaatcgttgacactggccgtcaactggctactatcgacagtgattcaaaatcatccgtttctccaaacgaatcagaatcaaatgtctgtcagcagtaagtga

SEQ ID NO: 31566 - DNA, 1341 bp, Escherichia coli; identical to SEQ ID NO: 22964

SEQ ID NO: 31567 - DNA, 303 bp, Escherichia coli
atgtcgcatgattttatgattgagagaagtaaagataaaaaaacagcatttttctttggatttgctgatggtgtattttataaatatttccattgtgaaaactttaataaccatttttctggcagcaatgaaggaaaaataataagtaaaaaaggagcggaaaacgcattgagtaaaatacttaatagtgaagaaataaaaaaatatccagatcctgataggatagaagatattaaaaatttttataactttgttgttttgaaatcaaaagaagaagataagttttatattcatttcagttaa

SEQ ID NO: 31568 - DNA, 390 bp, Escherichia coli
atggcagaagaaagaagaagaggaaggataaaacttccagaagaagagttaagaagtaaacaggttatttttagagttaaccaaagagaatttgaaaaactaaacttattagcagaagaggctggccttgaaagaggccactttatgagagaagttttattgagttctaaaccaaaaaaaagaaaaaataatatcccagaagtaaatcaggatttatatagaaaactatcaggcttatctaacaatctcaatcaagcagttaagaaactacaccagaatgaagatttagataagatcggggcaagtgatattaacttttatattagaaatataaaaaaatatttaatcggaatatatgaggatttggaaaatgaagggaaaaataaataa

SEQ ID NO: 31569 - DNA, 2340 bp, Escherichia coli
atgaagggaaaaataaataaaagaggttcaagttttcgaggctgtttaaattatgttttagataaaaacgataagacagaaaaaaaaccggagatcgttgcttctaatatgtcctccacaactataagcggtttaagtaaagagtttggagtaatgcgagagagcaggtcagacataaccaaaccagtgtggcatgcaagtttaagtttaagcccagaagaggcaaggctttcagcagataagtggcaagagatagcagaagactatctaacaaaaatgggagttgatactggcaagcatcagtgggtagcagtaagacataacgacacagataaagatcatatacacattattttgaatagggtagggctagacggttcggtatggcttggtcaaaacgatgtctataagagcattgaaacttgtcaagagttagaactaaaacacaatttaaaaaggacaaaaggattagtaaaaggagaaaaagcagaagagaaagcattaagtaaaaatgaaatagaaatggcaataagaactggaaatataccacctaaaaaaatacttcaagacactataaaatcagcattaaaagataaaccagactttactgattttataaatagattagaaactgcaggcatttctatttatccaaatattgccagcaatggaacaataagcggaatatcatttggtgttaatgatattacatttaaaggctcaggattaggaaagaaatatagttggttatcaattaagaaaggagttaaatatgacgaagatagacacaataaactcattagagaaatcaaagcaacaaacgatagtagaaacaatgatgagactggaacagaacttggatcagttcaaggaagttttagaaatacagaacaacgagagaatggatcagttagcattcaaaatagaaccgttagccatagcaatggagaaaatgacgcaagagaatataacagcaatcaacaatctaatatcgaacacagaaaaatcaatggagatattagggaacataagacagaggagcaaagagaactcgaaagagttaagtcaagaaatcaggacagcaagattatcaatacagaacacagaagagaaaatgaagaaaacaacaagaggcatattgtcaaaattgtcagtgatagttttaataagttctcttctttcgtcgggtcttacagtcgtatcatttcattatctggagaaagacaaacaaccaacgataaatctagactcaagagcagtagctgggataatattgcaacaaatgagaaggaggtaaaaatgacaccacaggaaagaaaaaaacaggcttggcaatcacagcataaagcattgcaggctgagtattatagaataactttaaaaggtagagggaacaaagacggcataacaataaatcttggtaaaaaagataatcaagaagtattttttacagcaaaagacgttgaggaaaaaataccaacactgagccgtcagaacatgctgggctttgatatttatataacacctattgatactaaaaataattatttagttgttgacgatctaacagaggaaaacttgaaagaaataaaaggattttatacaagcccaacattagttcagcagagtagtgaaaataattttcaggctatttataaactgccaaaggacgttgctgatcagcaaacggctaataaaatagtttcttatctaaataaaaaatatggtgatccgaagttttcaggagccgttcacccgttccgtatggctggattttcaaataaaaaagcaggtaaaaataatgctttcacaacgataagagaagtaaataaaggtttagatatgaatttggtagagtttgtggaagatttaaacaagcaacaatcacaagcaaaagataatgacttgttagatagatttgatagacaaacgcttgataattctgcgatagcaaaagactatcagacggaaatcaggcagattagaggtttagtagtcagcaaaggctgggaaatcgatatgagcaggatagattttaatgcttgtaaaggattgtttaaaaagggttatcagacagaagagattgaggaagttcttgcacagcatagcccaaacattgagcacagaaaacacaacatacaagactatacagatagaaccgtaagaaatgcttggaacagtttagacgatacaggcaaagaacagcacagaacagccctagaacgtcgtataaaggccgataagccaacggaggtaccaatggataatgacaacacaaaaacggctcagaatgcgtttgaggcggaaaacagaagggaaagcatatatgttattaagtga

SEQ ID NO: 31570 - DNA, 1131 bp, Escherichia coli
atggaaaacaataaaacacaaaaacctaaaaatcaaattttaagcactggacaggcaaccagttttgaggacgagttgattgctatgggtgcggaaatcattcctatgccttccagttcagcacccataccagaggaaccaatagagtttgaaggcgttaaggtgaacggtatggctcaatcagttttatcagcagaaaaacccattgaatggctgtttactgactttatcgagacaggagagcagatcattattgcgggtgcacccaagacaggaaaaagcctgttagcggctcagttaggacttgcattagcttctggcggtgagttccttggctggaaagccgtaggtcgtcgcaaagtgttgtatgtcaatatggaaatcaaagaggaagcctttgcacgtagagttataaaacagataaagggcaaagaaaacagatacctttttgatggtgcatggtttgacgttcaccattggcgaacccttgatcttttgaaagagaaagaagagagggcgaagctggagagtgtcattaagttcatgcaaccagacttaattattttcgacattctggcaaggctacacaacggagacgagcaaagcagtgatatgaaggctgtaatgcaggcattaagacaggtatcgcagaacagaacccatatcattgttcatcatactcgtaaaccgtcagcagacagcacagggccacaaacagctatggacattcgcggtagctctgctttgttcggtgaagtcgatacagcccttgttatcagtaaacgagcagggcagggtgcaaggttcgttctaacaacttctgcccgttctgttgaactaccagacgaaattttgttgaacagagacgagaacttgcttttctatcttgcagataatgacgagtcagataaggttcagaaagtctttgagagtgcttttaaagacagcaagaacatattggctactgatcttaaaaaacatatccaaaacgcgttcttggtgaaagagcgaagagctgctgattatatttcaaaagcagtcaatgacggctggatttcaagacatcaaaggtctgatcgtcagtatgaatacacggagggaattgcagctccttggggtttaaatcaataa

SEQ ID NO: 31571 - DNA, 2223 bp, Escherichia coli
atggacggctcagcgaatatgtccggtacatttactcaggaaaacggtcgtctgaccattcagggccacccggttatccatgcttcaacgtctcagagtattgcaaatacagtctcgtctctgggcgacaattccgttctgacacagcccacctcatttacacaggatgactgggagaacaggacgttcagctttggttcgctcgtgttaaaagatacagactttggtctgggccgcaatgccacactgaacacaaccatccaggcagataactccagcgtcacgctgggcgacagtcggatatttatcgacaaaaaagatggccagggaacagcctttacccttgaagaaggcacatctgttgcaactaaagatgcagataaaagtgtcttcaacggcaccgtcaacctggataatcagtcagtgctgaatatcaatgatatattcaatggcggaatacaggcgaacaacagtaccgtgaatatctcctcagacagtgccattctggggaactcaacgctgaccagtaccgccctgaatctgaacaagggagcaaatgctctggccagtcagagttttgtttctgacggtccagtgaatatttctgatgccaccctgagtctgaacagccgtcctgatgaggtatctcacacacttttacctgtatacgattatgccggttcatggaacctgaagggagacgatgcccgcctgaacgtggggccgtacagtatgttgtcaggtaatatcaatgttcaggataaagggactgtcaccctcggaggggaaggggaactgagtcctgacctgactcttcagaatcagatgttgtacagcctgtttaacgggtaccgcaatacctggagcgggagcctgaatgcaccggatgccaccgtcagcatgacagacacccagtggtcgatgaacggaaactccacggcaggaaatatgaaacttaaccggacaatagtcggttttaacgggggaacatcaccgttcacgacactgacaacagataatctggacgcggttcagtcagcatttgtcatgcgtacagaccttaacaaggcagacaaactggtgataaacaagtcggcaacaggtcatgacaacagcatctgggttaacttcctgaaaaaaccctctgacaaggacacgcttgatattccactggtcagcgcacctgaaacgacagctgataatctgttcagggcatcaacacgggttgtgggattcagtgatgtcacccccacccttagtgtcagaaaagaggacgggaaaaaagagtgggtcctcgatggttaccaggttgcacgtaacgacggccagggtaaggctgccgccacattcatgcacatcagctataacaacttcatcactgaagttaacaacctgaacaaacgcatgggcgatttgagggatattaacggcgaagccggtacgtgggtgcgtctgctgaacggttccggctctgctgatggcggtttcactgaccactataccctgctgcagatgggggctgaccgtaagcacgaactgggaagtatggacctgtttaccggcgtgatggccacctacactgacacagatgcgtcagcaggcctgtacagcggtaaaacaaaatcatggggtggtggtttctatgccagtggtctgttccggtccggcgcttactttgatttgattgccaaatatattcacaatgaaaacaaatatgacctgaactttgccggagctggtaaacagaacttccgcagccattcactgtatgcaggtgcagaagtcggataccgttatcatctgacagatacgacgtttgttgaacctcaggcggaactggtctggggaagactgcagggccaaacatttaactggaacgacagtggaatggatgtctcaatgcgtcgtaacagcgttaatcctctggtaggcagaaccggcgttgtttccggtaaaaccttcagtggtaaggactggagtctgacagcccgtgccggcctgcattatgagttcgatctgacggacagtgctgacgttcacctgaaggatgcagcgggagaacatcagattaatggcagaaaagacggtcgtatgctttacggtgtggggttaaatgcccggtttggcgacaatacgcgtctggggctggaagttgaacgctctgcattcggtaaatacaacacagatgatgcgataaacgctaatattcgttattcattctga

SEQ ID NO: 31572 - DNA, 432 bp, Escherichia coli; identical to SEQ ID NO: 9330

SEQ ID NO: 31573 - DNA, 153 bp, Escherichia coli; identical to SEQ ID NO: 28129

SEQ ID NO: 31574 - DNA, 150 bp, Escherichia coli
atggccttacatcagccgctaatggctttggaggtaaggttgcatctggttttatgcgagcatcaggactccgatctttcaccaatggatttgccagcaaaatgccaaatccattctttaatgcaggaagtcgttctgcatcagcattag

SEQ ID NO: 31575 - DNA, 225 bp, Escherichia coli
atgaaaaaattcataagcactttaactatcttgtcatgcttccttttagctgcttgtgaagacaaagtttatgatgtcagttactacactgaacatcttgaacaagcccaagatgttgtcgaaaaatgcagcaaaggggatatgtctggtcaaaactgcgaaaatgcgcgtgaagccattcaaaaagagcaatcgggtaaagcatttaaaaatatgatgcaataa

SEQ ID NO: 31576 - DNA, 162 bp, Escherichia coli
atgaaattaaaaaattcatacacatctactccagcatttttatcaccaaaatcacaggcagaagcggaaaggctgaaacattttgctgatatggtctacatgaactgtgccacaactctgagcttaggaaccaagaataatagtccctctacaaaagaataa

SEQ ID NO: 31577 - DNA, 486 bp, Escherichia coli
atgagaataaaacatttgaatatgataaatatgaatgtgaatatgaatatgatgaaagaagccattgatgttttgataaactctgaaaaacatattctgattataggcgaaactggaactggaaaatcaacacttttaacagaattgctaatcaatgacactgacgttaaacatttaaaacaccattatctttgcgatgaaaattttgatgattttgactttttatctgcacctgaaaaaacgttggttcttgatagtgtagccatcggtaacaacttacaggaatcaaaagttgttcagtttattgttcgatttattaaaacagccaggaaacgtggcaaacgtcttattgttgtcactactccttcagatggcggcgtgcagatacaaaaccttttcgacacagttatatcgttaacccgctcccacgatgaaataggatgcacagttatcattccagtaccggagttaattaaatatgaataa

SEQ ID NO: 31578 - DNA, 327 bp, Escherichia coli
atgacaacatttaccgacgacgacaagaaactaattaaagaaatcagggagcgaatcggcagcctggacgtgcgagacaatattgagcgccgggcttatgaaattgctctggcatcactggaagcagaagcgccaaatttgcctggtggtttcacaattgaagaagcaaaagaattacacgaaaatctggtaaaaagtcacgtaagcaaggctttaagtggcgaaaaaatgaaaaaagaaaatcgtgatgccgatttgcgctggattcatggcgtaatagttcaggctgcgtggtttgtgaaagcatcactagggcagaacgcatag

SEQ ID NO: 31579 - DNA, 339 bp, Escherichia coli
atgaaatttattattttaaaaaaggataaagatagcacaattgccagaaacgactctgttttccctgttaacaatttctttgtcgttttaactaccgtgtcttccgtggctaactctttcggaatagtgtcttccctggctaaatctatcggaatatcttttcccacgggcaatgttattgagacgtgttttttcggtatgttttcactattactggctgctttcagttttgtaagtacaatggggctggcgaacgcagtcccccccattaaaaatgtgtttccgcttttgtttttcgttcttgtcttaattactaattataatatttacttccgataa

SEQ ID NO: 31580 - DNA, 1677 bp, Escherichia coli
atgtatgtaattaatcaacagacaagggacaataatattcttacgttgcatgatgtttttaaaatctatcaaaatacaggggggcttcgtcttgtaaaaacagaggagaatgaaaagtacatctccattatcatttgtggcgtttttcgtattagaaaaaacaaaaagaataacaaaatcactttgtggggatacaagctaagagataagcacactggggtatggaccagaagaaattcatttcctggtaagatttttttattctggtctaaaaaatctgcatacgacatggacgactggttaaaatatgcgattagctacatcatcaaatcattgattgaggctggatattcaattgaagacaaactctatttgttacgcattggagaggaagaggaaaacagtgagagtcgttatatttccacactatatccatccaatgtatattactcatatgagtatggaatacatgacattgttcattgccttggtaaaatagcatcattcaactacccctataatacacgatatatcagcagacatattttactcgcagagataaaaaacaaaatttatcagagagcattaaaaattataggggtggataatgaatttaatgcttcaaaagcattgagtaaagctatatggataatggtagataaaaagatatttgcacaatatgccagagcttcacattgttcgatagcttacaattcaattcgtcaggcattatttgaggactatctggatttttcaaagcgaatccatattgtgaatgatatggattttttcggattgtggcctatggttggtcgtctaagacaacaacataaaaatggtcagtttatactatctggaaagacaaaagagttatatgaaaaaatcagttttccctgcaaacttagttatggtgagttcagaagtttacgacatgttagtttgtcattagtatatgctttaaatgataaacatgataatgcatcattcagatttacagtcagattattacgccatccacttatcaagaactatcctgtgagagcaatttactggattatcgattatattagcattcgagcttactcagaaaaagaaaatgatatttatcgtatatgctcaaaatggctagaatatcatcgtgatttatttaaaaacattggcttttatgaccgtaatactgaatccaggcaaacatcacgctgggaaatggaaacgaatcagttgtgtcatgcaattgactggttgttagcagaagaacggttaattcataaaaaccaggagtggccttctttctggagactatctgatgaatggacgcgacaagtgaagaataacgttattcccgtaatcccaaaatggaaaggaaccgggataaactggcagaaagttgataacggtgtaaatgaattaattacatttgatgctctgtgtcaggaaggtcaggagatggaacattgcgttgccagttatgcagactggtgtgcatctggagaatatattgcaatttcagtcctgatggataatgaaagagccactcttggactttcacgaaaagaacatgatttaacctatcagtttgaccagatgagaggtattcgtaatcaggctgtttccagaaacatgctaattaaaggcaggcatattttaaaaataatcaactcatcactaaaaagataa

SEQ ID NO: 31581 - DNA, 303 bp, Escherichia coli
atgactcaagcaaaagctaatctgagaaaacttcgccgtacacgttatgtcccccctcgaacagtaaagaaaagcatagcgaatacagaacgtgtcgtttcaaaagcaattaccggctgtggtgtcttccgtgatataccacaagtaaaaatcaatctcatcgaaacaaggaaaattttacaaatcgaactggctttatccattgctaacttatctgaggcgaatccaattgagatacgaaaaaaaatcaaaagcattgaccgacaattatcttcaacctcaaaaatcagaactacattatga

SEQ ID NO: 31582 - DNA, 216 bp, Escherichia coli
atgagtgcttttattaagctggcatctgttctggcgttatttattagcccagttgtggttgcaatagcaggagaacaatctcactgtacaaaaatcaacgaataccctttcatcgtcactcaatgcgacgacggaactgtgacagtggtgaatgtgataaataaccgtgtagctgtgtgccgtaaaggggaatcatgcaaagaaataaaattataa

SEQ ID NO: 31583 - DNA, 300 bp, Escherichia coli
atgaaaacttatgggttcatccttcttattttacatataatccctatgggggcatggagctttcttctttttattacaaaagatgagaacaaaggagaaaaaatactaaaccacatcgcatcaatatttccattatggctgaacttcggaggggtgatgatagcgatggctctgctgcccctgttaatatggagttttaatggcatattcttcggcttctttctgctaatttatgcatttggcgtttataactaccttcatcttctttattcaatttctcccttttatcatggagattag

SEQ ID NO: 31584 - DNA, 252 bp, Escherichia coli
atgctaactgaaaacacaccagaaaacattaagcgtctgcggcaaaaaattggcctgacacagaaagaatgtgccgaaatatttagcatgagtccgcgtacctggcgtcgcaaagaagaacctgtcggaactgcaagcggtacagcacttacaccagtagagtttaaatttcttctgcttttagctggagaacaccctgattatgtactttgtaaaaggaataaaaagaattctgattctggaagtaattaa

SEQ ID NO: 31585 - DNA, 228 bp, Escherichia coli
atgcttattggtatgcgggtaaagtccgaacggtccacatgtgtagtcagtaacggtaagttaagcagcgaaactaaaaccaaatgggaatatatccggagtacagcaaccattcgcattggtggacaaactacagcaggattacgccatttatttgggcatgtgaggaattttcgtctctggcataaagagctaacagatgcgcagcttggggaggttgtggagtga

SEQ ID NO: 31586 - DNA, 129 bp, Escherichia coli
atgttccaggttaatgcggcaaccatagactcgcgggtcaaaggtttcggccatttcctgaatatcctgcgcactgatgacacgcccgtcacaggtgtcaccctcaacgccgatacgaaagaattttga

SEQ ID NO: 31587 - DNA, 1029 bp, Escherichia coli
atgcgtcgctatgcgctcaaagaggatggcgacgaaagaggtgccgcgcgaaaccgttttcaggcaaaacatcttaatcggggcggtgctgcggggtatatcgcgaaatacatctcaaaaaatatcgacggctatgcactggatgggcagctcgataacgataccggcagaccgctgaaagatactgccgcggctgttaccgcatgggcgtcaacgtggcgcattccgcaatttaaaacggttggcctgccgacaatgggggcttaccgtgaactacgcaaattgcctcgcggcgtcagcattgctgatgagtttgacgagcgcgtcgaggctgcacgcgccgccgcagacagtggtgattttgcgttgtatatcagcgcgcagggtggggcaaatgtcccgcgcgattgtcagactgtcagggtcgcccgtagcccgtcggatgacgttaacgagtacgaggaagaagtcgagagagtggtcggtatttacgcgccgcatctcggcgcgcgtcatattcatatcaccagaacgacggactggcgcattgtaccgaaagttccggtcgttgagcctttgactttaaaaagcggcatcgccgcgcctcggagtcctgtcaataactgtggaaagctcaccggtggtgatacttcgtcaccggctcccacgccttctgaacacgcctcagcagtgcttaatctggttgatgacggtgtcatcgaatggagtgacccggaggtcgtgagggcgctcaggggggcattaaaacacggactgagaagaccaaaccgccagcaaagaaacggaagcacgttaaaaccacatgaaattgcaccatcggccagactgagccggtcggaacgattgcaaattacccgtatccgcgttgaccttgctcagaacggtatcaggccgcagcgatgggagcttgaggcgctggcgcgtggggcaacagtaaattatgacgggaaaaaattcatgtatccggtcgctgacgaatggccgggactctcaacatattatcaatga

SEQ ID NO: 31588 - DNA, 1923 bp, Escherichia coli
atgaaacacaatggaatgattccaaccactgacaatcttgattcctatggcccagaagaaaaatatcttggaacgtggtcatgtccgtcacaatccactgcaaaaccagagtctggttaccctgaagataaaggcaatggggttctggaagtattcaatgctggtcgctttcactgcacacaacgctacaccacccgaaccggtaatatttacattcggatgcttgatgcagaatggaaccctgtcagtcctgtatggagtgcatggagagctattacaagcgggactcgcccattaagcacgtcaattgacctgaattctttaggtggtgcggaacacctgggaatatggcgcaatagcagtacatcaatagcctcatttgaccgtcatttcccggaggaagggagttttggacagggtattctggaagtctttgaaggcggtctgtatgggaggatgcaacgttataccacccgtagtgggactatgtacattcgcggactgacagcctcatgggatgcagaaaatccacaatgggaggactggattgctgttgggtatcagtccacgggatggacttattcaggggatcttgatgaccttttaaagcctggtatttatagcgtcacgaaacaggccacaaatgcacctgtcaccgactctaaagatcttgctgttggctcaatagttgaggtgaaaaaacgttgtgatattgaatcgtatatccagacatatacgactgtttcagcaacggatgcctataaaaaccggacatttcagcgaacccgcgccagcggtgaaactgactggggggaatgggcggaagtatacaactcaaaatcattactcactaaattaggtgtcggcggtgttaccgacaggttatccagtctggactggcagacctacgactttataccgggcagcatgataactgtcaggctttcagatatgaccaatattcccgatgggatggaatggggcgtcattgatactaacctgataaatatcactgttggccccagtgaaggcggaggtgtcgcccgttcaatgcaggtatggcgcagcacttcaaacaaaaccaactatcgtttttttacagtccgcttatatggcaatcctggggagcgtagcttcaatattcgtcggctaccaattatcgacgaagcccagacatgggaggcaaaacagacattcagtgcaggcctttctggtgaactgtccggcaatgcggctacagcaacaaagctgaaaacggcaaggacaattaacggcgtaaaatttgacggctcggcaaatattgaagcgtttccgcctggtgttccgctgccgtggccatcagatacaccacctgcaggctatgcaatcatgcaggggcagacgtttgataaggcagcatatccgaaactggctatagcctatccttctggtgttattcctgatatgcgcggctggacaatcaagggcaaacccgccagtgggcgtgccgtattgtcacaggaacaggacgggattaaatcgcatactcacagtgccagtgcgtcaaatacggatttgggaacgaaaacaaccagttcgtttgattacgggacgaagacagtcagtacgtttaactacggaacaaaaaccactaataccactggtaaccatacacataccatttacagagggaatgccaatactaatggtgaaaccggtaaaacaggctttgacaacccatcgtttaatggcacatcaggagctgccgggaatcatgcccacacggtagatattggtgcacataatcatacggttggtattggtgcacattcacacacggttgctattggctcacacgggcactctattaccgttaatgctacaggtaatacagaaaacaccgtcaaaaacatcgcatttaactatattgtgaggcttgcataa

SEQ ID NO: 31589 - DNA, 261 bp, Escherichia coli
atgaagataagaaaaggtgacagacaatattatctgaataaagaaggtgatacgtttcatctggtgaagcgagtaaaaactttttctaagtctgcgactttaggaaaaacgaaagcaacggtgaaaactgttgctgatcttgtttttcatgaggaggcattcgacactatcgactttgccagcgacggattaagagagaatgataaagaaattgtttctatgatgattcaggaaatgagcgaggaaaaaaatgctaactga

SEQ ID NO: 31590 - DNA, 210 bp, Escherichia coli
atgaaagttcttattggtaatataaatattgataattatcatatgttgtctgcattagctgggattgcgggatttgacaggagcattcagtttacatgtgaaatatcagcaagtatcgaaattatggaggatgatttcgtaaataaagctggtatattaaagatgttagatgaatttattgaaaatgatttttcaataaagctcgtctag

SEQ ID NO: 31591 - DNA, 324 bp, Escherichia coli
atggaaaaccacgccaaatttgttgctactgaaattcttaatcagcttggtggaaaccgctttattgctatgacaggcgcaaagaactttgcctgttttgatgaaaatggtgagtgtggtctttgctttcgtttgccttcaaattttgcaatgaagggaattaatttagttaaaatcaaattaaccttctctgatacatacctggtgacattttcccgtgtccgtggagctacagtaaaagaaatatcaaaatttgataatatttattgtgatcagcttgaatgtttatttaatgaacaaaccggacttgcaaccagattgtaa

SEQ ID NO: 31592 - DNA, 123 bp, Escherichia coli
atggagaatctcctcagtcagctatatcagaaatgccagatttgtcttatgaacagtcaaatgcttatgaaaatgccgtcagagttttattactgggagaagaagactggcagacgttggtga

SEQ ID NO: 31593 - DNA, 303 bp, Escherichia coli
atgtcctgttctcgttcggttgtattaccgaataacgccttaaaaatcgccgttatgaaaaatggtgatttgtctcttattcaacttggtcttgataaagagaagtgcgacataactgaatctgttatcgcgatttatcagagtgaattaaacctcctgtctgatgtggtcaatttacttgttaaacgcgctgtatttcacaagcaaatttcatccgtggatgagctgacaaaattaacgacagaaatcgccagctattgcgctgatgaatttaagaaactgaacgacaaaaggaactggtaa

SEQ ID NO: 31594 - DNA, 300 bp, Escherichia coli
atgtcctgttctcattcagttgtattactgaataacgccttaaaaatcgccgttatgaaaaatggcgatttgtctcttattcaactttgccttgataaagaaaaacgcgacataactgaatctgttatcgcgatttatcagaatgaattaaacctcctgtctgatgtggtcaatttacttgttaaacgcgctgtattccacaagcaaatttcctcagtggatgaactgacaaaattaacgacagagcttgccagttattgcgctgatgtatccaggaaacttaacgataaaaggagctga

SEQ ID NO: 31595 - DNA, 318 bp, Escherichia coli; identical to SEQ ID NO: 8153

SEQ ID NO: 31596 - DNA, 210 bp, Escherichia coli
atggtgaaagcatcaacccgcatcaccctggacacaccggaggtggtctgcaccaacaggctgattaccggcacgctgaaagtgcagaagggcgggacgatgcgcggcaacattgaacacaccggcggtgaactctcatcaaacggtaaggtactgcatacccataaacaccccggcgacagcggcggcacaaccgggagtcctctatga

SEQ ID NO: 31597 - DNA, 201 bp, Escherichia coli
atgaaacccaatgccgggacgctgcgcggtgtcagtctggctgcggtcgcgaactccgaagtcgatgcactgattaaagtgctgccgcgcatgacggcaccgatgctgactgagcaggaggtcgccgcgctggagctgcctgaccttgtggcgctggccggtaaggtggtcggttttttgtcgccgaactcggtgcagtaa

SEQ ID NO: 31598 - DNA, 246 bp, Escherichia coli
gtgcatgaagcggtgaccgctgttgctgaacatgtgcaggaaaaactgagcgccactgagcagcgcctcgctgagatggaaaccgccttttccgcacttaagcaggatgtgactgacagggcggatgaaaccagccaggcattcacccgcctgaaaaacagcctcgaccacaccgaaagtctgacccagcagcgccgcagcaaggccaccggcggtggcggtgacgccctgatgacgaactgctga

SEQ ID NO: 31599 - DNA, 246 bp, Escherichia coli
gtgcatgaagcggtgaccgctgtcgctgaacatgtgcaggaaaaactgagcgccactgagcagcgcctcgcagagatggaaaccgccttttctgcacttaagcaggaagtgactgacagggcggatgaaaccagccaggcattcacccgcctgaaaaacagtctcgacagcaccgaaagtctgacccagcagcgccgcagcaaagccaccggcggtggcggtgacgccctgatgacgaactgctga

SEQ ID NO: 31600 - DNA, 405 bp, Escherichia coli; identical to SEQ ID NO: 1309

SEQ ID NO: 31601 - DNA, 207 bp, Escherichia coli; identical to SEQ ID NO: 5080

SEQ ID NO: 31602 - DNA, 372 bp, Escherichia coli
atgccagcacaactctatcagtctccaacagggcatgagcttgaaatcattccgttatccgatataagtcgtttcagtgaaaatgtgaagctgaaagttctgtataaaacgtccccgctcgccggagctatcatggagcttgactcggtcagttatctgacatcatcccgtcatactcatgcagttgagcacaaacatcctgttcataaagcagaactcacctttgtaactaatgaggatggtatcgtcacagtaccttctcttcatatcggacagtggctggcgaaagtccaaaataagaaaagttttcaggacaaaagcctgtgtgatgaaactgtcgatgtggcaaccttaagcttctcccgaaattaa

SEQ ID NO: 31603 - DNA, 1752 bp, Escherichia coli; identical to SEQ ID NO: 11847

SEQ ID NO: 31604 - DNA, 141 bp, Escherichia coli; identical to SEQ ID NO: 31245

SEQ ID NO: 31605 - DNA, 489 bp, Escherichia coli
gtgcagagtgatttgccgtggtggctggtctgccggggggcgattcataagttccgctgtgtgccgcatctcaccgggcggcgctttgagcacggggtgacggactgttacacgctgttccgggatgcttaccatctggcggggattgagatgccggattttcatcgtgaggatgactggtggcgtcatggtcagaatctctatctggataatctggaggccacagggctgtatcaggtgccgttgtcatcagcacaaccgggcgatgtgctgctgtgctgttttggttcatcggtgccgaatcatgccgctatttactgcggcgacggcgagctgctgcaccatattcctgaacaactgagcaaacgagagaggtataccgacaaatggcagcgacgcacacactccctctggcgtcaccgggcatggcacgcatctgcctttacggggatttgcaacgatttggccgccgcatcgaccttcgtgtga

SEQ ID NO: 31606 - DNA, 141 bp, Escherichia coli
atgctgaaaggcgggatttccggtcgcagtgccagaggaaaacgtatccatacccgtaccattcacagcatcgacaccgacattaagctcaaccgggcgttgtgggtgatggcagaaacactgctggagagcatgcgctga

SEQ ID NO: 31607 - DNA, 243 bp, Escherichia coli
atgtttatgcgcaactgtgggttacgtggttgtatcgcttacagtgaacctgacagcacagaagtggcagaagacattatcaggcatcacctttgcggtttgtctgttgccagggcacgagaaattctgcataaatgtgaacaggcaattaatcgggcatccctttccctggataataatggtaagtgtgtactgaactgcaggaaaggtctgactggtgacagcccgccacccagggattaa

SEQ ID NO: 31608 - DNA, 675 bp, Escherichia coli
atggaactgcttttattgagtaactcgacgctgccgggtaaagcctggctggaacacgcgctgccgctgattgctgaacagttgcaggggcgccgttctgcggtatttattcctttcgctggcgtaacgcagacctgggatgattacacagcgaaaacggctgcggttctcgctccgctgggtgtttctgtcaccggtattcatagcgttgtcgatcccgttgccgcgattgaaaatgcggaaattgtgattgtcggcggcggtaatactttccagttgctgaaacagtgccgcgagcgcgggctgctggcacccattactgacgtggtgaaacgtggcgcgctgtatattggctggagcgcaggcgctaaccttgcttgcccaaccattcgtaccaccaacgatatgccgattgtcgatccgcaaggtttcgatgcgctaaatctgttcccgctacaaatcaacccgcacttcaccaacgcgctgccggaaggccataaaggtgaaacccgtgagcagcgtattcgcgaactgctggtcgtcgcgccagaactgacgattattggtctgccggaaggtaactggatcacagtaagtaaaggtcacgctacgctgggtggcccgaacaccacttatgtgtttaaggctggtgaagaagcgggtcaccgtttttaa

SEQ ID NO: 31609 - DNA, 339 bp, Escherichia coli
atgggaaccactcagcaggtcattctgatcacaaccgtaacggcaggggccgcactgacacagcagcgttttgtcggggcagataataccccctgtaaagccggtgccgcagcgctcggggttgccgaagtggatgctgttaccggcgacagcacgccggtgagcgttctgggcattattgctgtcgaggccggggccgctgtcagccgtggtgtggctgttcagtcagatgctcaggccagagccgtgccgcagtccggcgacggtaaatcctgtggtattgcacttgatgaagccgagggtgaaggcgacgtcattcgtatcctgcgcggggtgtga

SEQ ID NO: 31610 - DNA, 189 bp, Escherichia coli
atgactgcagagcaggtcaaagcccatttccgccgcaacggaatcacctttacccagtgggcaaaacagaacaactacacccgagcagaggtttaccgcgtactgaatggacaggtaaaagcgaactatggcaaagcccatgaaatcgccgtcaagctgggattaaaaaccatcactgacgccgcttaa

SEQ ID NO: 31611 - DNA, 348 bp, Escherichia coli
atgtcacttggctcacgattaaaagaagaaagaaaccgcctaggatttagtcagtctgagtttgctgaattggtgggggcatcctataaaagccaattgcggtgggaaaaggatgaatccgctcccggagcagatgctttggcaatttgggctactttagggcttgacgtgctttacgttgttacaggacagagaggggatgtaatgaccaatgttgtcccaaaaatgtcaccagaaaaacaaaaattaatggacgcatttgatgaaatgactccggaacaacgacgctcatttcttgaggttgggcgattctatactcaacccaaaccaagtaaatttacaggctga

SEQ ID NO: 31612 - DNA, 669 bp, Escherichia coli
gtggagccgttttgtggggcagcagcgctctattttcttaagacacccggcaagatcgaagtcatcaatgatatcaacggtgaactggtgaatctgtaccgggtggtaaagcatcacctggaagaatttgtccgccagttcaaatgggcgctggtcagccgtcagatctacaaatggctgcagatcaccccggaagaaacactgacggatatccagcgtgcggcacggttctactaccttcagaagcaggcgtttggcggcaaggtggcagagcacagcttcggtacctccaccacatccccgccacgcttcaacctgctgcgtattgaagaagaactgtcagcagcacacctgcggctttccagaacagtcatagaacacatggactggcaacagtgcattgagcgttatgatcgtccgcacacactgttctactgcgacccaccgtacctgggtacggaaggctatggtgtggattttcctgaagggaactactcgcggctggcagagctggcccggtgcatcagaggaaaaatgataatttcggtgaacgatatcccacagatgcgcgaggtgttcactggactgaacatacagacagtgaacatcaactacagtctggcggggaaatctacgccgcgccgtgaactggtaatctgcaacttctga

SEQ ID NO: 31613 - DNA, 327 bp, Escherichia coli; identical to SEQ ID NO: 21885

SEQ ID NO: 31614 - DNA, 993 bp, Escherichia coli
ttgtggacgcagattgataacggtcagcttgcgcctgacctggctgaaatcaggacgtccattacgggtgtcagcaatgaaatcacgcagaccgtcaataagaaactggaagaccagagtgcagcgatccagcagatacagaaggttcaggttgatacaaataataacctgaacagcatgtgggctgtgaagctgcagcagatgcaggacgggcgcctttatatcgcgggtattggtgccggtgttgagaatactcctgacggtatgcagagtcaggtgctgctggcggcggacaggattgcgatggttaatcctgcgaatggcaacacaaagccgatgtttgttgggcagggcgatcagatattcatgaacgaagtgttcctgaaatatctgacggctcccaccattaccagcggcggtaatcctccggcattttccctgacaccggacgggcggctgacggcgaaaaatgcggatatcagcggtaacgtgaacgcgaactccgggacgctcaacaacgtcacgattaatcagaactgtcggattctgggaaaactgtcagctaaccagattgaaggtgatattgtcaaaacggtgggaaaagcctttccgagaaatggcagttatgccagcggtacaataacggtcactgtgtacgatgaccaggcttttgaccgtcagatagtagtcccccccgttctgtttcgtgggggtaagcatgaaaacttcaacagcaacaaccaacagtcatactggtattcaacctgtaagctgcaggtactgaagaacggacaggaaatctttcagcaacccgcgacggatgtcagcagggtattttcatcagtcattgatatgcctgccggacacggccatgtcaccctgactttcaatgtttcttcatatggtgctaataactggacgccaacgaccagtatcagcgaccttcttgttgttgtgatgaagaaatctacagccggtatcagtatcagttga

SEQ ID NO: 31615 - DNA, 729 bp, Escherichia coli
atgaactggcctcaaatcaccctcattattctgttcgcctttggtctgggcgtaaccgccatcagacacggcgaaccacgtaacgataaatacagcttctggtggcagcttgctggcaacctggtgattgtctggctgctctggtgtggcggctttttcagccaggcatgcgcagcacaacctccgcaggctgcgctgcagtatcgcgatgatgtgatccgtaatgcccggcttgaatggggactgtctgcgccggtggccgatttcgccgcgcaactgcatcaggaaagcggctggcgacctgatgcggtctcgccggctggcgctcagggactggcgcagttcatgcccgccactgctgactggataagtcagctgatgccggggcttaacagccgtgagccgtttaatccggcatgggccatccgggcgctggtcagctatgaccgctggctgtggcagcgcgtcagcgccgccagtgactgcgagcgtatggccatgacactgtcgggctataacggtggtctgggctgggtacaacgggacaggcggcttgcatcacagaaaggtctggacagcacccgctggttcggacatgtcgccacggtgaatgccggacgcaatgcggccagctggcgggagaaccgccattatccgcagcgcatcctgcgcgaactggcaccgcgatatctcacatggggaggcagcagttgtgtggcatctggttaa

SEQ ID NO: 31616 - DNA, 540 bp, Escherichia coli
atgtggataagcccgtcattccatctgaaggtgatccgtactttcgatatggtaaccagcacaccggaaaaattatccgggcaggctgctgacaagatgcaggctggcgtgatcctgctggactttatgcgccgggaattaaacctgtctaactcatcagtgcttggagcctgtcagaagcttcaggaggctgttggcttaccgaatctggcaccgcgctatgccattgatgctcctgctgacgcgcctgatggctcaagtcgcccgacactgtcgctgagtgcactgctgaaacagtatggtatccgccttacggctaatcaggcatatcaccagatggcgaagctggggatcgtcgaacagcgcgaacgatacagccgtacagcgattaacaacatcaaaaaattctggtcgctgacggcgaaaggctgcatgttcggcaagaacatcaccagtcctgcaaatccgcgcgagacgcagccgcatttcttcgaatcccggttccctgagctgttaaagctgctcgataccgttcattga

SEQ ID NO: 31617 - DNA, 195 bp, Escherichia coli
atgatatttaaatgtattcagtgcgaaagagatattacaaccctgcgttttcacagcgccatcgccgtgatgtccggtaaataccacatccctgcggtacgcgtcaccctggtctgcccgtactgcagccagcatttttcggcagatgtgcccgttatggagttctcacgcccggacagggaggacgcgcaatga

SEQ ID NO: 31618 - DNA, 276 bp, Escherichia coli
  misc_feature (234)..(243): n is a, c, g, or t
atggattcttgtcataaaattgattatgggttatacgccctggagattttagcccaataccataacgtctctgttaacccggaagaaattaaacatagatttgacacagacgggactggtctgggattaacgtcatggttgcttgctgcgaaatctttagaactaaaggtaaaacaggtaaaaaaaacaattgaccgattaaactttatttctctgcccgcattagtctggagnnnnnnnnnngagagaggatggacgtcattttattctgactaa

SEQ ID NO: 31619 - DNA, 660 bp, Escherichia coli
ttgggtgccaaactcttccggcatttactggcgctaccgatctcttattttgagagtcgtcgtgttggtgatactgttgccagggtaagagaattagaccagatccgtaattttctgacaggacaggcattaacatctgttctggacttattattttcattcatattttttgcggtaatgtggtattacagtccaaagcttactctggtgatcttattttcgctgccttgttatgctgcatggtctgtttttattagccccattttgcgacgtcgccttgatgataagttttcacggaatgcggataatcaatctttcctggtggaatcagtcacggcgattaacactataaaagctatggcagtctcacctcagatgacgaacatatgggacaaacaattggcaggatatgttgctgcaggcttcaaagtgacagtattagcaaccattggtcaacaaggaatacagttaatacaaaagactgttatgatcatcaacctgtggttgggagcacacctggttatttccggggatttaagtattggtcagttaattgcttttaatatgcttgctggtcagattgttgcaccggttattcgccttgcacaaatctggcaggatttccagcaggtgtgcaagtcatacatcgggattacgtaa

SEQ ID NO: 31620 - DNA, 210 bp, Escherichia coli
atgaacggaggtgtgttaaatggcacgctggaccccgtcctggcacctctgtttaagcgggtcgaaaacggggttaacccgtctgagctgctgggcgaactggcggagctctaccctcagatgaacacggacgatctgcaggaacggctgggccgcattctctttgtggcaaatatccgggggcgtctgcatgagcgtgacaacggctga

SEQ ID NO: 31621 - DNA, 354 bp, Escherichia coli
atgcgggagtaccagctgcaggagggggatattgacctctctgatgcaccggttgcggacggggcagtgcctgcggagtttgccgaggcgataagcgccgatcatgatgcacaacagcagcttgacgacgcgctggacattctgatgaacggaggtgtgttaaatggcacgctggaccccgtcctggcacctctgtttaagcgggtcgaaaacggggttaacccgactgagctgctgggcgaactggcggagctctaccctcagatgaacacggacgatctgcaggaacggctggcccgcattctctttgtggcaaatatccgggggcgtctgcatgagcgtgacaacggctga

SEQ ID NO: 31622 - DNA, 327 bp, Escherichia coli
atgacactgcaggttgaattctggacggtggtgggctttctcatcaccttcatgagctttgttggcggtatggccaaatggctgttcagtaaagcggaggaacgtcaggctgcacgattcgcctcccttgaacaggccctgcaacagtccgcctccaactggggcgagctggaaaaggaatttatgcgatttaaagcggatttaccgctgaattatgtccgtcgcgaggattatatccgtggccagacagtcatcgaggccaaactggacgcactttacaacaaactggaagtggtacagcagtaccgcaataccggaggtcaataa

SEQ ID NO: 31623 - DNA, 210 bp, Escherichia coli
atgaacggaggtgtgttaaatggcacgctggaccccgtcctggcacctctgtttaagcgggtcgaaaacggggttaacccgactgagctgctgggcgaactggcggagctctaccctcagatgaacacggacgatctgcaggaacggctggcccgcattctctttgtggcaaatatccgggggcgtctgcatgagcgtgacaacggctga

SEQ ID NO: 31624 - DNA, 336 bp, Escherichia coli; identical to SEQ ID NO: 5363

SEQ ID NO: 31625 - DNA, 174 bp, Escherichia coli
atgcattacatcaaattaatacacagtaagctaactattattataagccctgtcctgttaattacctttggcaaactgattataaagttaatgtccgtaccaggagtcggttatgtttcttataattaccagggatacgatgtttttcaccgcgatgaaaaacattctgagtaa

SEQ ID NO: 31626 - DNA, 825 bp, Escherichia coli; identical to SEQ ID NO: 5941

SEQ ID NO: 31627 - DNA, 765 bp, Escherichia coli
atgaccggtctggtcaccggattatggacaatgcttgccgtacgtgttttatttggtatggcagagggcccggttagtgcagcaggaaataaaattattaataactggatctcgcgtaaagagtcggcaacagctatcggtatttttagtgctggttcaccacttggcggcgctatttctggtccggtcgttggcttgctggcaatatcacttggctggcgtccggcgtttgggatcatatttatatttggcctagtttgggtattactgtggtacttctttgtcagtgataaaccgtcaaaaagtaaacgtctggcagcggaagaacgtgtcgatttcgaaaaccatgacgatattattctagccgaagatggtaaaggtacaccttcgcttggttattacatgaagcagccgatggtatgggcgaccacgctggcattttttagctataactatattctatttttctttcttacttggtttccaagctatttgaatcattcattacacattgatattaaagaaattagtattgcaactgttatcccgtggtttattggggcaattggcatggtgttaggtggcgtctgctctgactttatttatcgtattacgggaaatgccttactttctcgccgtttaattctcggcagttgccttgcgggggccgcggtttgtgtcgctgtttccggaactgttacctctattggtagtgcgattacgctgatgtctgtttccttattcctgctttatctaactgggtga

SEQ ID NO: 31628 - DNA, 360 bp, Escherichia coli; identical to SEQ ID NO: 6138

SEQ ID NO: 31629 - DNA, 267 bp, Escherichia coli; identical to SEQ ID NO: 6058

SEQ ID NO: 31630 - DNA, 204 bp, Escherichia coli
gtgtttaaaagatacattgcaccctgtagggctgacggctggcgctttatgacattaacgattgtaaccttatggggaagtcccttgcagtttaatgtggataagcaaaattacccgtctgtgaggcgtgttttgtatcaaaaacaaggggtgcgtattttcatgaaaggagatcactcaataacttccatcgagatcgggtaa

SEQ ID NO: 31631 - DNA, 1374 bp, Escherichia coli; identical to SEQ ID NO: 5465

SEQ ID NO: 31632 - DNA, 279 bp, Escherichia coli
gtggatgtggactggctgatcgccgagcgtcccggcagggtaaaaaccttgaagcagcatccgcgcaagaacaaaacggccatcaacatcgaatacatgaaagccagcatccgtgccaaggtggagcacccgtttcgcatcatcaagcggcagttcggcttcgtgaaagccagatacaaggggctgctgaaaaacgataaccaactggcgatgttattcaccctggccaacctgtttcgggtggaccaaatgatacgtcagtgggagagatctcagtaa

SEQ ID NO: 31633 - DNA, 141 bp, Escherichia coli; identical to SEQ ID NO: 7328

SEQ ID NO: 31634 - DNA, 570 bp, Escherichia coli; identical to SEQ ID NO: 6885

SEQ ID NO: 31635 - DNA, 252 bp, Escherichia coli
atgagtaaaaacgtaaaacagacttctgaaaatgtggcttctactgctgcaaaaacgctggctaatcctaatgcttctgccatccagaaaagcctcgctggttctgcgctttcgcaacgtgggacatcaaaccagacaagtgggcaaatggagcataaggcatcatcagctcttgataatccacgttccagcaagttaacgaagcaacttgcagcctctgttttggcacaatcaaacaaagggcgtaagtga

SEQ ID NO: 31636 - DNA, 753 bp, Escherichia coli
atgattttagttataacatctagctttgataaaacaattgattacatagtaaaaaaacatagcattaacaatttttacaggttagatgttgataatttctctgaatataaattttcttacactaaaaaaggattcagtattgttaataaaaataataatgaattgctcgagagtgaatgcagatccatctattatagaaaaccaactcctgagaatattatcaataaaattgattcaaaatatcataatcattgctttcgagaagtattcgcttttgttgaagggattgctgagtcgtttactggaaaatgcttatccaagccatcaattataaaaagagcagataacaaagtatttcaagcaaaaactgcaattgatattggattcacaattcctgattttatattgacaaataatttcgattgtttcaaaaacactttgacaatcaatagcattgtcaaaccgttatcaagtggattgatagaaaatcagaaggtaaaggaatttgttcaaacaaatatggttgacatgaataagaacacagaaacattaaaatattgtccagcttattttcaatcgtatacaaaaaaagaattcgaggtgagatcaacattcataaatggtaaagattattcggtaaaaatgatatctaaaaataaaattgactggagaaaaaacaataacgaaatattctattcaacaataaaaatgcctgatactataaaagaaaaactgtctcttatacacatctga

SEQ ID NO: 31637 - DNA, 645 bp, Escherichia coli
atggggatggcgattgcgccgtttgacaagccgcatccggtaatgcggattcagccgattgccattagtgcctctggtgctttgccagacacattaagtagcctgcctgcgttaccttcgctggaagggctgacggtacgcaagctgcaactttctatggacccaatgctcgatatgatggggatgcagatgctgatggagaaatatggcgatcaggcgatggccgggatggatcacagccagatgatgggccatatggggcacggcaatatgaatcatatgaaccacagcgggaagtttgatttccaccatgccaacaaaatcaacggtcaggcgtttgatatgaataagccgatgtttgcggcggcgaaagggcagtacgaacgttgggttatctctggcgtgggcgacatgatgctgcatccgttccatatccacggtacgcagttccgtatcttgtcagaaaatggcaaaccgccagcgacgcatcgcgcaggctggaaagataccgttaaggtagaaggtaatgtcagcgaagtgctggtgaagtttaatcacgatgcaccgaaagaacatgcttatatggcgcactgccatctgctggagcatgaagatacggggatgatgttagggtttacggtataa

SEQ ID NO: 31638 - DNA, 957 bp, Escherichia coli
  misc_feature (903)..(912): n is a, c, g, or t
atgcaacgtcgtgatttcttgaaatattccgtcgcgctgggtgtggcttcagccttgccgctgtggagccgcgcagtatttgcggcggaacgcccaacgttaccaatccctgatttgctcacgaccgatgcccgtaatcgcattcagttaactattggcgcaggtcagtccacctttggcgggaaaaccgcaactacctggggctataacggcaatctgctggggccggcggtgaaattacagcgtggcaaagcggtaacggttgatatctacaaccaactgacggaagagacgacgttgcactggcacgggctggaagtaccgggtgaagtggacggcggcccgcagggaattattccgtcaggtggcaagcgctcggtgacgttgaacgttgatcaacctgccgctacctgctggttccatccacatcaacatggcaagaccgggcgacaggtggcgatggggctggctggtttggtggtgattgaagatgacgagatcctgaaattaatgctgccaaaacagtggggtattgatgatgtcccggtgattgttcaggataaaaaatttaacgctgacgggcagattgattatcaactggatgtgatgaccgccgctgtgggttggtttggcgatacgttgctgaccaacggtgtaatctacccgcaacacgctgccccgcgtggctggctgcgcctgcgtttgctcaatggctgtaatgcccgctcgctcaatttcgccaccagcgacaatcgcccgctttatgtgattgccagcgacggcggtctgctacctgaaccggtgaaggtgaacgagctgccagtgctgatgggcgagcgttttgaagtgctggtggaggttaacgacaacaaaccctttgacctggtgacgctgccggtcagnnnnnnnnnnagatggggatggcgattgcgccgtttgacaagccgcatccggtaa

SEQ ID NO: 31639 - DNA, 2397 bp, Escherichia coli
atgtttagtcaggttgacatcggtagtttcggtagttttacggacctcagttggaaaaatagccttaaggatgcaggtaacaatgtccagaatttcaagaggcttaacatcctctacggacggaactactctggtaaaactacactctcacgaattttccgcgctttggaaacggggcgcattccacataactacgtggacccaaattttactattcgtggtgacaaaggtgatgtgacacaggtaagtcttgctggtcatggctacgatgttcgcgtctacaaccgggattttgtgagcgataacctaaacttcttggtcaatcagaccgacggcgagatcaagacgtttgctatcgttggtgaaaagaataaagaaatcgaagatgccattaccgcaattcaaactaggttaggcagtgttgaatcgaaggcgggtctccgacatgagcttgaagctaaaaagaaagagcgagatcgaaccaaagacaatcataaaactgcgtctgatgctctagagggcaaacttcgttctcatgctaacaataagattaaacagaatcgcatctacggccctgctgtctacaacatagaaagcatcaaaaaagacattggtttagtcaaaaaacctggcttcagggctctgacaaccgaagaacaagcagccaaggtcaatctcttgaagcaagaggccttgcctgatattaacgataccgtatcgataaacctcaacatcgaatcaataagcaaagaagctgaagaactccttttaagattgattgagcctaccctgccaattcaggagttgttgaatgagacggctctccagatgtgggtgaaggaaggtataccgctgcacaaagataagcgggacacttgcgcattctgtcgtcagaatcttcctcatgatatctggcaggtattaggctctcacttcagtaaggaatcctcggctctggagtcaagtatcgattcatgtctgacttctatcaccaccgaaatccaagccattcctaacttcttgactttgactggcgataaattctacgcagaagagaaaatattatttgaaaacagcaagatagaactttctgaacatctgaaagactacatgcaggacctcaaagctctgcaggcggcgttggataagagaaagaacgctatttttcagcaggttctcatgcctgtctatattcataatccgacagcaattcagcaatgtgtgggcgacatcaatgctctgatcgtcaaaaataatgaccgcacaatttcgctggagaacgataaaagcactgcacgagaatctctccggcttaccgatgtggcgtcttttatcgcagacatcacctacgataatgaattcgcccgtattgccagtcttaagtcagatgctaacacagccaacactgcctttaccgaaactgaagctgaaatttttgaacaagaaaccgaagtgacccgtttacaggggcagcagaaggatgaacgcaagggcgcggagcgagtcaatgagttgctcagccacttttttggtcatgacggcatcgaacttgaagcaaaagacaatgttgagaatacttcggttaagtttgaagtcaccagagatggcaaatcagcctacaacttgagcgaaggagaatgcagcctgattgctttctgctacttcatggccaagttggaagagcctgaaagcaaaggtaaggatctgatcatttatatagatgacccgatttccagtcttgacggaaatcacattttcttcatgttcagcttgattgaaagcctgattgcgaaacccattaagaatttagatggaacaaacagctatcgctataagcagctttttatatccacccacaacctagatttcttgaaatatctgaagaaaatatcacttcctaatgaaaggaatcatggtggatgccaacatttaatcgttgagagaaatggaggggcaagtcagatttccctgatgccttcatatttgcgagactacatcactgaattcaactacctgtttcatcagatttacaagtgccgtaatcaagttggagcgaatgaatctcatgaaccatactatggattcggtaacaacctccgcaagttccttgaggcatttctgttctttaagttcccgcaccatgatgacaagaacgatgcctttgaacggatcaagaaattctttggcgaagaggattcaacagcgatagctcttgtgaatagacttaacaacgagttttcacatctcgaatcaattcctgatcgcggattcaaacctgtggagattccagaaatttccaaggtagccaactacgtgttagacaagatttatgcgtcagatccgcatcaatacaattccttgttaaaaagcattggcgaaccaccaaggttatcttag

SEQ ID NO: 31640 - DNA, 558 bp, Escherichia coli
atggctggcctggcgcgcattttcggcattctgtttcaccgttgcggtcagttgctccatgctggctgccgtctcttccagcgaagcggcctgttgctcggtgcgcgaagagagatcgttattgccggtggcgatttcgctggcaccgctatagatggcattggccccgttgcgcacatcaccgacggtacgcatcagctctccctgcatatggcgcaaactctctgccagttgccccatctcattagagccatccacctcaatcggtttcaccagatcgccgcctgcaatatgacgaatgctgtcaatcaggcgattcattggcgcgaccagcgaggctttaataccgaaccagacggcgaagatgaccgccagtacgacgatcatcacgcctaccagaatccacatcgcctggctgtaggaggcattgttatcgctgacggcgatatcatagagccgatcgttttgctccatgtaagccacatactgcttctcgaaaccgtcctgatatccctgggtcggctgatcaaagaactcgttgattttgcctgcacctaa

SEQ ID NO: 31641 - DNA, 972 bp, Escherichia coli
atgagcaaaataatagcgatgctaattactgtcagtaccctttttttaccgtcaataatccaggcaaaacctatttcaataaaagttgcctatgaaaataaccctggagaacccctggatgtggtcatgcgttactgggcagacctattaaataaaaaaagtaatggcgaaataacacttgcgctctatcccagctcccaattgggatcaaaacaggatgtcaccgagcaagccatgatgggcatgaatgtcataaccttgagtgatgtggcttttcttgccgattatgaacccgatttggggattttgtttggaccgtatctgactgacgatccgcaaaaactgttcaaaatatatgaaagcgactggtttaaacaaaaaaatgaaagtctgaagaaaaagggaattcatgtggtaatgaataattatctctatggcactcgacagattatttcgaaaaaacccattcgcaccgttgacgatctcgcaggtttaaaaattcgcgttcctaataacgtcatgcaaataaaagccattcaggcgatgggggcaacaccaactcccatgccattaggcgaagtttatcccgcattaacccagggcgttattgacggcgtagaaaacccaatttcagtgctgcaagggcaaaaactgtatgagcaggcaagatatctgacaatggttaactacctgacaaatacctcagtgtggataggtggtgaagccttctttggcaccctttcaccagaacaactggagatgatccaccagaccggctatgaagcgggtgtctatagccagaaactcactcttgagcgtgatgccgaaatgttgaaaaccatgcaggcagccggcgtcgaagtgatctatcccgatactggaccattccagaagaaagcacgcgaagtttactctcaattcccggaatggacaccaggtctgtacgaaaccattcaacagcaactgcaataa

SEQ ID NO: 31642 - DNA, 345 bp, Escherichia coli
atgaaaccgtatactatgctctatagtgaatctttcgaaataaacgcatcaacaatttcaaataaaacaaactctaccgtaaaaacatttaccacagaacctaatgatgaagattatctcaacacttggacaacgcatacaagagtcatagagaaccaagatgaggattacagtttagcccccagcaactgtgaaagaaaatacgaaatatctaatgaaaagcagtctgctatggatacattttttacagaatccattgaaaataatgatgatgattttatagtatgtagaacatttgtaacaaatgtcgttgaatcaggtgatgatgatttctattttaactaa

SEQ ID NO: 31643 - DNA, 918 bp, Escherichia coli
atggaatttaaacttgatctaaaatccaatgctttagatagttttaatgaagccatcaaaaaattccagcaaggagaaaatggagattataaagctttcaagtttgctatactacatttgtctcattgttttgagttgacgttgaaaatgtatattcaaacattagacgaaaacttgattttttcaaaatgctacagagcagtaatagagcgtgccaaaagtgacaaagtcaatcttattgaagctttttataaaatggaggctgaagaattcgactttgaagaacttattaaaggacataaaaatcctcatactattactttggatcaagcaatatcgatagctacacatgaaaagtgtagcataacctcagtggacttagttgataaagagttactagatgatatcgcttggatgaaagatcttagaaattcaattgagcattacgaattctcgtttactattaaatatgttcgtctggcaatggggcgtttggtcagagggttggctgagttctctgatatatttggtttatacgatctagataaagaagtttctaaggaaatatctaattcctataatatactttctgacgaatatgagcataatgttcatgaaggttatcttgatgtagctgatgctagaaaagcagcatttcttggggttagaccaaagttttttgagttagttaattggaaagaatatatctgcgattactgtggtcatgagacaatgattcaaaataacgattctacttcaggatatcgttgtacgtattgcggtgccgaagactcaggctcaattgaagtcacatgtgatgtttgtggtgctgaatggcctgaagaggaaatgagttcttggcttggggaggggactaacacttgtcctgactgtagagatattagcaacaaaccatga

SEQ ID NO: 31644 - DNA, 504 bp, Escherichia coli
atgaaactggccctgacgctggaagccgacagcattaacgtgcaggcactgaacatggggcgcattgtcgttgacgtcgatggtattgagcttgctgaactgattaacgtggtctgcgataacggtcactcccttcgtgttgttgatgaatctgaccgggcctcaacagactgcacgccaccatttgctgccctgaccggcatacgctgcagtaccgcgcatatcacggcaaaagacagcgcctggctgtactcgatgtcgcatcagacgaatgacaccggcgaatcagaatggattcattttacaggcagcggatatctgttacgtaccgatgcgtggtcatacccggttctgcggcttaaacgcctggggctgtcaaaaacgttccgtcgtctggttgtcacacttacccgacgttatggcgtcagtctcattcatctggatgccagcgctgaatatctgccgggcctgcccactttcgactggtcaccaggaacaacatga

SEQ ID NO: 31645 - DNA, 663 bp, Escherichia coli; identical to SEQ ID NO: 14387

SEQ ID NO: 31646 - DNA, 522 bp, Escherichia coli
atgaacaaatggttgcatcgtaacggcttctcttacaaaaaaccggctggaacgcctcataaattcagcgaagagaggcaggcgcaattcattgaatattatgaagacctgaaagaaaaagcaggcgatgaacctgttctttttatagatgctgtccaccccactcaggccaccaaaatcagttatggctggatacgaaaagggcaccggaaagcaatagaaacaacaggtagccgtacacggctgaatatcatgggtgcgctaaatctgaagtctccggaacgcccactcatcagtgagtacccaaccattaatgcgttaagcatatcccggtttttcaatgagataagaaaggtttatcctgattataatcaaacagtcaacatcattctggatggtgcacgttatcaccatgctcaactggtaacagactgggctgaagtcgttaatatcaaacgcgttcaattagcacttatctacataataatagacctttgtaaaataactgtatatcattactga

SEQ ID NO: 31647 - DNA, 1164 bp, Escherichia coli
gtggggcttatcagtgacataggcagtcaggtggcggatattgcgcgtacacagggagaactgaatgcgttgaaggccgcgaaggaagcaaccggcgaaacacttcctgctaatgcaacagagaaacaacgtcaggaatatcttgcgaaactgcgtgacacgcaggcttacaggaatgaaatggcgaagtatggtaccggcagtgaaattcagcggggtatccaggccgcgacagcggcgcttcaggggctggcggggggtaatttagcaggtgctctggccggagcttcagcaccggaactggcacatctgctgaaatcaacagaaaaagacccggcagtaaacgccattgctcacgccattctgggcggcgcagtggcggcaatgcagggtaataatgtcgctgccggtgcagcaggcgcagcaacgggagagctggcagccagagcgattaccggaatgctgtatcctggcgtgaagcagtcagacctcagtgaagagcagaagcagacgataagtacgctggcaactgtgtcagcagggctggcctgcggtcttaccggaaacagcaccgcatcagcagcagtgggagcacaaagcgggaagaatgctgttgagaataactcactcagtgatggctggaacaatatcctgccatcaggaacacaggattacggacaggccgtagcctcgtggaatcagtatgctcaggacaataatctgacaccggagcaggttcaagaagggatgaatcgtatagctattggtgaagggccttcttgggggacaacatataaagtacacccggtagttcaggctggcggtgatgttagctttatccggggttatactttaagcggaactatagatgacaatcatatttcagttaatcaaggggatatttatagtataggtgctcatggcggagcctcgatcggattatcctttggcccgtatttcccgggattaataaattcaaatgataacgattattcgataaatggtggttttggcgttggtgcagtggggctttctacgggtaaagatggtgttagtttcacttttggttttggcccaagttggggttggagtgcaactgaaattaaaggcgttgacgttaatggcacttcaacaagtgaggtttatcgatatgattttaaataa

SEQ ID NO: 31648 - DNA, 339 bp, Escherichia coli; identical to SEQ ID NO: 25365

SEQ ID NO: 31649 - DNA, 339 bp, Escherichia coli
atgccggattttcatcgtgaggatgactggtggcgtcacggtcagaatctctatctggataatctggaggccacagggctgtatcaggtgccgctgtcagcggcgcagccgggcgatgtgctgctgtgctgttttggttcatctgtgccgaatcatgccgccatttactgtggtgacggtgagctgttgcaccatattcctgaacaactgagcaaacgagagaggtataccgacaaatggcagcgacgcacacactccctctggcgtcaccgggcatggcacgcatctgcctttacggggatttacaacgatttggccgccgcatcgaccttcgtgtaa

SEQ ID NO: 31650 - DNA, 312 bp, Escherichia coli
atgggagttgagcagaataatttcagggacatgttgtccgtttatctccccgtcacggcgcagacgcagcatgtgtttggtatacccccggcggcccgggtcacgtacgcgggtctggcaggcgaaaaagggctggaagccttcccgctgcaggctttccagtacggtgatggtggggatgtacgtatagttctggcttcgggacgtgtgtttctcttccccgaaaatccccggcacatggtgcatcagttcttcatgtgtcagcggacggtcacggcgtatctggtttacatgaccaaaacgactggctaa

SEQ ID NO: 31651 - DNA, 252 bp, Escherichia coli; identical to SEQ ID NO: 19414

SEQ ID NO: 31652 - DNA, 516 bp, Escherichia coli
atgtacgcccctgacagcgccctgccagtcggttttatcgaacagcagcgctggagtcgggtcacggacacctacggtgttaagcaccagcgaaaagaacgtccctgtgaagaaaaagaaagttaccgctggcagcaggcttcggaacgtatggccgaacggctgggggagatacagaaacgggtaatcactgtctgtgaccgggaagcggatatctggcattacctgcattataaagtcagccacggacagcgcttcgtggtgcgtgctgcacagaatagccggctggaagaagcacccggcaagctcttcgaactgccggaagtcctggcaaccgcgggaagccacacgctgaatgtgatgcaaaaaggagggcgggcagcccgccaggcccggatgttcatcaggtacagcgaagtcagcataaaaatcgcgacaacagcggccaggcgctcccgctcacgtatgtctgttgccgggagcagtcagaggacggtgcctgctggcatctgctga

SEQ ID NO: 31653 - DNA, 234 bp, Escherichia coli; identical to SEQ ID NO: 15429

SEQ ID NO: 31654 - DNA, 159 bp, Escherichia coli; identical to SEQ ID NO: 8964

SEQ ID NO: 31655 - DNA, 393 bp, Escherichia coli
atgaaatccgagacgctaactgtccaacaactttttcaagaccgccgacaatactgtgttccattctatcaacgtgcctatgtatggactcagcaagaccagtggtcagctctactggaggatatcctagagaaagtacaatcccggctctcgggtacaaaaccaactccccatttccttggtgcggttgtactggaacctcaatcaaaaaaaggattattaggtgtagattccatacatattattgatggtcagcaacgattgaccactcttcaatatgttctggcatccatccgattagcattacgtgctacggatctttccagcttagaggctctcatttcgccttgcctgaaaactcaaacgaagacacaatgcgaaataaagaagtag

SEQ ID NO: 31656 - DNA, 954 bp, Escherichia coli
atgcgggcgaaacttctgggaatagtcctgacaacccctattgcgatcagctcttttgcttctaccgagactatatcgtttactcctgacaacataaatgcggacattagtcttggaactctgagcggaaaaacaaaagagcgcgtttatctagctgaagaaggaggccgaaaagtcagtcaactcgactggaaattcaataacgctgcaattattaaaggtgcaattaattgggatttgatgccccagatatctattggggctgcgggctggactactctcggcagccgaggtggcaatatggtcgatcaggactggatggattccagtaaccccggaacctggacagatgaaagtaggcaccctgatacacaactcaattatgccaacgaatttgatctgaatatcaaaggctggctcctcaacgaacccaattaccgcctgggactcatggccggatatcaggaaagccgttatagctttacagccagaggtggttcctatatctacagttctgaggagggattcagagatgatatcggctccttcccgaatggagaaagagcaatcggctacaaacaacgttttaaaatgccctacattggcttgactggaagttatcgttatgaagattttgagctaggtggcacatttaaatacagcggctgggtggaagcatctgataacgatgagcactatgacccaggaaaaagaatcacttatcgcagtaaagtcaaagaccaaaattactattctgttgcagtcaatgcaggttattacgtaacacctaacgcaaaagtttatgttgaaggcgcatggaatcgggttacgaataaaaaaggtaatacttcactttatgatcacaatgataacacttctgactacagcaaaaatggtgcaggcatagaaaactataacttcatcactactgctggtcttaagtacaccttttaa

SEQ ID NO: 31657 - DNA, 555 bp, Escherichia coli
  misc_feature (396)..(405): n is a, c, g, or t
atgacagcctttcgtgccgcatttaaggcatatcgtatgcatcaggtgttaatactgcctcgctttgcacggcttacctttgcccttggcttagcaactgcggtttttcccgttgacgcagagtattattttaatccacggtttttaagcaatgaccttgctgaatctgtcgatttatctgcctttactaagggacgcgaggccccacctggtacatatcgggtcgacatttatttgaacgacgaatttatggctagtcgggatattacttttattgcagatgataataacgcagatctcatcccatgcctgagtacagaccttcttgtcagtcttggcataaaaaaatcagcattattagacaacaaggaacattcggcagataaacatgtgccnnnnnnnnnngcgcatgcacaccacttcaggatcgtttggctgatgcatcatctgagtttgatgttggtcagcaacatctgtcactctccgttccgcaaatatatgtcggcagaatggctcgcggctatgtttctcctgatctgtgggaagaaggaataa

SEQ ID NO: 31658 - DNA, 1581 bp, Escherichia coli
atgaaacaaaagaaagcctggagtttttttcagagcctggggaaggcatttatgtatcccattgctctgctaagtgtatgtggcatgatgctagggctgggaagtggtttagccagtgatgatatggcaaagttaattccatttctggctattccaataattaaaaccatacttgatttcattgttagtcttggtttgtttgcctttgttaatttacctgtattgtttgcgatagcgattcccttaggattattaaaagataaagaggataaagcctatggtgctttttctggcttaattggttttatggcgatgcatctgggaacgaacttttatcttaaacagcacgacttattggtcgttgctgaccaaatgtcgacacatgggcaaaccatcattctggggatccagtcctacaataccagcgtgttggggggaattgttgctgggttattagtcgccagcatgtataaaaagatcgttaatttacgcattccagaatcattaggtttttatagcggcccacgtctggtgcctatcattacactgattgtgatgagtggatttggtctgatcattccttttatctggccgccgtttttcaatcttttcatgctcattggacactggatttcaacttccggtcctgttggttatttcttctatgcagttgccgaacgtgtgacgattccttttggcttaaaccatctggtgacgtcagttttccgctttacgccaatcggcggttcggctgtgattggcggcgaagaatattacggcaccctgaacatgtttatggcatacgttaaagagaatgcggtcattccgctggatttggcggggaaaatggagcagggcaaactgatgattcagtatggtctggctggtgccgcgctggcgatgtatcgcactgctcatgctcaaaacagaaaggctatcaaagcattgcttatttccggggtgcttacggtgattattggcggcgtcagcgaaccgattgagtttctgttcttatttgtcagtccactgctgtttgtcttccatgcctttatgaatggattcgctaacatggttctgccatatatgggcgtgaagatgggatttactggcgatctgattcaatttattagctttggcgtattgcgtggcacaagaacaggttggccgatcgcggtgtgtgtcgaagtggcctatttcttcatttattactttgtgttccgttggaccattcttaaatttaacctgatgaccgtaggccgtgaagagtccaatcctgtcacgctgaacgttcacgaagatacggctatagcggatatcccaactcctgataaatcagagctgcaagcggcggagcagatggttaaggcacttggtggtaaagagaatattaagtcactggataattgcgtaactcgtttacgtttaacaatcgcagatatgggattgattgacgaagttgcaataaaaagagctggcgggattgcggttgttaaacttgatcaaaataccctacaagtcattatcggcactaaagtcatcgccctgcgtcgggatatggataactatatggggatatactga

SEQ ID NO: 31659 - DNA, 1176 bp, Escherichia coli
atggatgtttttaatactcctgtttcccgcaaaggaacatattgtacccaatgggacttttgcgaggacagatttggtgtaaaagatgtactaccattctctatttcagatatggatcttccgataccagacgctatcaccagagcattaaaaaaacgcctggaacacccgattttagggtacagtcgttggcaacatggtgaatatctgaatgcgatagtaaactggtattatcaacaatatcaaacagatattaaacctgaatggataacctatagccccagtgtgatgtactctattgcaaaagcaatagagttattgacatcgcatggtgataatattctcgtttttacacctgtctataatgcattttttgatgtaattaaacatagcgagcgaaatattctgacagcctctttgattataaaaaatgaggggggctacgctatcaactggcaagattttgatcttaagattaaaagcgcaaagatggtgttattatgtaatcctcataacccgacaggaacagtctggtcggaagaagaactgcataaaatcgctgcaagctgtacaaggcataatgtctggttatgttcagatgaaatccatagtgattttgtttttaatcgtagctttacatccgcgcttaaaataaaaaaagaaaaagtagtagtatttaactcgatatcgaaaacatttaatgttcctgcactaacaggatcgtatatgatttcaactgacgataattttaatcataagttcagaacgatatcgaggtatcgcgattttgtaaactccccatcagtactgaatataattgcaactattattgcctataacgaatgtgagggatggttaaagtcattaaaggcacatattgcctctaacattcaattcacccagcagtatctgaatgaaaatattccagaattgatcgtaaggccagctgatggttgctatttttcctggatagattgttctgctattggttatccttttgatgaattctacagtcgattaattcatgaaggcaaagtgggcattatggcggggcatgtctatggaacggagggggagggctaccttcgtctgaacctggcctgcggtcgagaaaaattatatatggggcttacgcgtcttgtgagtgtaattaaaaatattaatcagggagaataa

SEQ ID NO: 31660 - DNA, 141 bp, Escherichia coli; identical to SEQ ID NO: 6191

SEQ ID NO: 31661 - DNA, 261 bp, Escherichia coli; identical to SEQ ID NO: 5349

SEQ ID NO: 31662 - DNA, 423 bp, Escherichia coli; identical to SEQ ID NO: 5299

SEQ ID NO: 31663 - DNA, 621 bp, Escherichia coli
gtgtttgttgccgaaaaaatagtgcaatatgcggagaaaaatctcgaaaaaaatctcaatccatcgctactattgattcttgcggatcacatttcgaatgcaatatcccgagtcgtttcaggtatacaaattaataatgttttccttgatgaaatcaaagcgttgtacaaagcagagtatgcgataagtcgcgatgcattaactatcattaatgagcaattcagcgttcaacttcctgatgatgagattggttttatagcattgcatattttaaataattatgaaaattcagttgattatgaatcagtacggattattgagttgtcgcaaataatcacggagcttattgaagttgtttataacagaaaggtggacagaagttcatttaactattccagatttatgatgcaccttaaatatttttcaagtcgcgtgttatgcaatgaaaaaataaaacagaaagatattggtgatatctatgaacagtttcttgaaaaggacatcctgttacagcgcgcaattcatgaaattgaacggtatctgtatgccacttttaaatatgaattaattttagaagaaaaattatatctctctattcgtagcaaagtattaatggactaa

SEQ ID NO: 31664 - DNA, 441 bp, Escherichia coli
gtgattggcgcaaactgcctgataggtaattatgcgtttattcgtcctggcacaataatcagcaatggcgtaaaaattggttttgccaccgaaattaaaaatgcggttattgaagcggaagcaacgattggtccgcaatgctttattgccgactcggtagttgcaaaccaggcatatttgggcgcacaagtacgtaccagtaatcatcgtctggatgaacaacccgtgtctgttcgaactccagagggaattatcgctaccggatgcgataaattaggttgttatatcgggaagcgttcacgccttggtgtacaagttattattttgcctgggcgaattatttctccgaacacacaacttggcccgcgcgtgattgtagaacgtaatttacctagtggaacttactcactccgacaagaacttatccgtacaggagattaa

SEQ ID NO: 31665 - DNA, 423 bp, Escherichia coli
atgttcctgaaaaccgaatcatttgaacataacggcgtgaccgtcacgctttctgaactgtcagccctgcagcgtattgagcatctcgccctgatgaaacagcaggcagaacaggcggagtcagacagcaaccggcaggttactgtggaagacgccatcagaaccggtgcttttgtggtggcgatgtccctgtggcataaccatccgcagaagacaaagctgccttccatgaatgaagccgttaaacagattgagcaggaagtgcttaccacctggcccgcggaggcaatttctcatgctgaaaacgtggtgtaccggctgtccggtatgtatgagtttgtggtgaatgatgcccctgaccaggcagaggactccgggcctgcagagcctgtttctgcgggaaagtgttcgacggtgagctga

SEQ ID NO: 31666 - DNA, 150 bp, Escherichia coli; identical to SEQ ID NO: 13600

SEQ ID NO: 31667 - DNA, 255 bp, Escherichia coli; identical to SEQ ID NO: 7207

SEQ ID NO: 31668 - DNA, 162 bp, Escherichia coli
atgagcgacgataagcctcgtcacgtttgtcatccatttctgatgctggatgagcagcagctcacaccggttttcaagtttttgcataatattctctcctttagcgcgcagcaaaatgcctccgggggccggatcatgcctttgctgcggttgaacggataa

SEQ ID NO: 31669 - DNA, 312 bp, Escherichia coli; identical to SEQ ID NO: 9190

SEQ ID NO: 31670 - DNA, 123 bp, Escherichia coli
atgtatcattcttgtgccactgtatattacaacctgtttcagatattaaaatgtcagcgatggattttgctgaaacattatatccagatgcaatgttataaatatctccgggtgaagttatag

SEQ ID NO: 31671 - DNA, 438 bp, Escherichia coli
atgaagtttcaggtcttccagtggttgattggcgcaacagatggccatgcaaaaaacttctccgtatttattcaggctggcggcagttatcggctcacaccattttatgacatcatttcggcatttccggtccttggcggtacgggaatacacatcagcgatctcaaactggcaatggggcttaacgcatccaaaggcaaaaaaacggcaatcgataaaatttatccgcgacattttctggcgacagcaaaggtgctgaaattcccggaagtgcagatgcatgaaatcctgagtgactttgccagaatgattccggcagcactggataacgtgaagacttcattaccgacagattttccggagaacgtggtgacggcagttgaaaccaatgtgttgaggttgcacggtcggttaagccgagaatacggtattaagtaa

SEQ ID NO: 31672 - DNA, 501 bp, Escherichia coli
gtgaaagctacctgtaaggtcgcaaccgattcaaaacagattgaagttgtcctgccggttgtgccttccaaccttttcactggtatcgacgtagaagcacagggggcgagcaaccagaccgatttcaatattaatctgaccaaatgtagcaatacagaggatcagaaaattgagttccgttttaccggtactgcagatagcgctaataaaacgctcgctaacgaagtagaaggatcaacggatgctgacaacagcggcaatgcggaggcgactggtgtagggattcgaatttactccaaaggtacgacgaataatggtctgattaacctgaatactactgcggcagagggtagcgcctccaccgccgcttatacaattccaggaaatgctacgacccatgatttcagcgcggcctttactgcaggttatgctcaaaacggtagcactgttgcacctggtgtagttaagtcaacagcaagttttgtggtgctgtacgagtaa

SEQ ID NO: 31673 - DNA, 852 bp, Escherichia coli
atgagtgaacgtctgagtattaccccgctggggccgtatattggcgcacaaattacgggggccgacttaacacgcccgttaagcgataatcagtttgaacagctttaccatgcggtgctgcgccatcaggtggtgtttctgcgcgatcaagctattacgccgcagcagcaacgcgcgctggcccagcgttttggcgagctgcatattcaccctgtttaccctcatgctgaaggggttgacgagatcatcgtcctggatacccataacgataatccgccggataacgacaactggcacaccgatgtgacatttattcaaacgccacccgcaggggcgattctggcggcgaaagagttaccctcgaccggcggcgatacgctctgggccagtggtattgccgcatatgaggcgctctctgttcccttccgccagctgttgagcgggttgcgtgcggagcatgatttccgtaaatcgttcccggaatacaagtaccgcaaaaccgaggctgagcatcaacgctggcgtgaggcggtcgcgaaaaatccaccgttgctacatccggtggtgcgaacgcatccggtgaccggtaaacaggcgctgtttgtgaacgaaggttttaccacacgaattgttgatgtcagcgagaaagagagcgaagccttgttaggttttttgtttgcccatatcactaaaccggagtttcaggtgcgctggcgctggcaaccgaatgatattgcgatttgggataaccgcgtgactcagcactatgccaatgcggattacctgccacagcggcggattatgcatcgggcgacgattcttggggatattccgttttatcaggcggggtaa

SEQ ID NO: 31674 - DNA, 237 bp, Escherichia coli
atgaaacgaattagccttgccgttctggcgcttttaatgaccgcacaacagtgttttgctggcggcgtagccctaagcacgacgcgcgttatttatgatggtggcaagaaagaagcgtcgctgaccgttgaaaaccataataaaaatgaagagtttttgatccagtcatggattgatgatgtgaatggaaataaaaaaaacgccgtttattattacaccgccattattcaaacttga

SEQ ID NO: 31675 - DNA, 1248 bp, Escherichia coli
atgacagaaaaaacggaacggaataaagcgtcgtcagaggtggttaggcagtcagacctggccctgttgacagatgtacaggcagcccttcagcaggaaaagcatcatgcccttttcctgatggtgatttttctgctggtactggtagtgacgtttgttatctgggcatggaacagtcctctggatgaagtgacccgtggtcaggggagtattattcccggcagcagggagcaggttatacagacccttgacccgggtattttgaaaacacttgaggtcagggaaggagatattgttgagaaaggtcaggtactgctgacactggatgatacccgaagctctgccatgctgagggaaagtgaagcccgggtgaataacctggaagcagtcagggcaagactccgtgcagaagcttattccgaatcactgacatttccggatgacgtgcctgcagatttgagggagagggaaagtactgtttatcgactacgaaagactgaactggcacaaagcatcgccggccttaagcagagtaaggctctgctggataaggaaatagcaatgacccggccaattgtgcgtgaaggggcgatgtcggaagtcgaactgttacgtatgcagcgtcagtcagcggagctgcagttacagatggatgagaaacagaataaatacctgacggaagctggagctgaactagtgaagacagaagcagagcttgcacaggcaaaagagaatatggctggcagagccgacccggttgagcgttcacgtatcagggctcccctgagaggcatcgtaaaaaatattcgggtaaatactttgggaggcgtggtttctgcaggacaggacataatggaaattattccgctggaagaccagttgctgattgaggcttatataaatccacgggatgttgcctatgtcagaacagggatgccggcacttgtaaaactgacggcttatgactatgccatttatggtggtcttgacggagtggtgacactggtaagtccggatactttacgtgaccagaaacggccgggagatttaaaactggatccaaatgaagcatattatcgagtactggttactaccagtaataattatctgacagacaggaacggaaaaatattgccagttattcctggcatgatagccagcgtggatataaaaacaggtcagaaaagtgtatttcagtacctgattaaaccaatcaccagaatgaaacaagctcttcaggaacgatga

SEQ ID NO: 31676 - DNA, 237 bp, Escherichia coli; identical to SEQ ID NO: 20817

SEQ ID NO: 31677 - DNA, 459 bp, Escherichia coli
atgatatctgataacaaagttacctatcatgaggttgacttcctgctgccagcacagaggtttaacattcagttttcctatgtttcccagaaggggctgccatttatccgggagtttgtgctgagacttgttcatgtagcttcgatgagcaaagcacaaatagcaacctatttcggcctgacccaccgtgagacagaggaggcgatttccgatcttgtacagcgtggcgaattgacgctctcctcagacggcagactggtcttaacagacaaatcaaatggctatttttcagaggttggcgagataccgcatctttcaactattcaggacagtggctgtaccttatcctttgatttagccacatttagttgcttcagcaaccaggcttttcaggaccactggaggggaggggtaacattaaaggttgatgacaacaacattgatcttacccagcaatag

SEQ ID NO: 31678 - DNA, 4959 bp, Escherichia coli
atgtgggatggtggcttacaagaacaggaagtattggctatcgagaaaataaaagctgctttttcagtcaacgtatctaagcctgacaagcctttccgtagcggttcaattagtgagcagctaaaaagctatggttttatcggcaatgaaatgttcccttggaaaggttatgcaggttttcgatttgttgaggcaaaaaaagagggggaattcgatttagttattgtaacacactgcaacgtgatcattgttgaactgaaagactggaaccatcagcctgtaaccgcacgcggagatacttggtttaaaggtgataagaacatggggcgctcgccagtaagcgtgactcgtagcaaaaaattcatgctggacaaaaaactcaagcgtctggtagaccgttttacgaacaaaggctatatcccgattgttcatttttttgttgtgatgaccggcaatgcagatttcagcgcgctgccggaggaacaacggcgccatacgatctcgttaaaagatttcctgaagtttgccgatcgcgggagcttcaataactatttcaaaccgcacccagctaccaaggttcttaacaaggatttccatcttttcgatgatttgttcctagggcctcagacggcaccaaaagccttgagagttaatggctatgaagctaatgatatgattttcgaacatcctaaaaaggtgtatcgagaatatctggcaaaatctgagatatcaacgaacagcgaagcgctactcagagtatggaattttagaaatataacgggaacgaaagcgaataccccggaaggacgagctcagattgtttcacgtgagcgcgaagtgttacagcacatcaatcaccagaatcgtgacctgtataaccactgtctcaggtctttgacgagttttcagaaagacgaggtgacggccgagtatagcgaagtctacgaagttccgccgggtcatgtccggtttaatgagtttatcggaaaatatggtaagaacttttctgatatggaccgcttgaatgtggtgaaactgctcattgcaaagtttagtgatctccatgagatgaaaattgcgcacagggatgtcgccgatcacagtctgtggatttcaccttcaaaagaagttgctctttcgaactttatttcggcttaccaccagccagccggaacggttggcgattaccgtaagcttttatccgtaggtgcagtccacgtaaaagacatgcttgataagggcgagcttacgccttttcagcaagatgttcatactctgggccttgtcgcctggcacttatttagcggtatgcgcatgtcgccaaagagtctggagaaagtacaggacaacatgctaaacagccagcactggtattcatctgtattacgggatgccgttgccgcaaaattcacttctgcaacagaattctttgatgccctgaaacaagccgaacctgctggcaaggatattccaacatttgatgatactgagcttgacccttaccgacatgctatcaatcacgctcgtcaatacccggaagacgatggctttcagtttcaggtcgaaacagtcgacaaagaagtctatatctcgaaaggaaggctcgtgaaggcttggctgaatgttgggggacagggatacgatccgtcaattaatttccaggttctgaagtttttaaagcaggttgagcggctttcttcagttaaaacaacgtatctacctcaaattcgtgaattcggtatcgcatcaaaatcatcaagcctatatatggtcacggatcaggtacagggagaaacctgggataaaatagcggtccccgatgatgaaaaaatcgacctcattggtaagtttgtcgccgccgttgagcacttacatggtctgggtgtttctcacggggacatccaccctggcaatgtgatatttgagacacagagccgtttgctttttctcatcgatatccccgatttttcaccgtccggtgacgaacctaaaaatcacagttacagccctgaatacattgataattgtacttcttttgaacgtgacaactatgcagtgatgaagatgtcctgcgagttgctaggcatgtcatgggggctggaatcagacatttatccgacaatcgcgaatgctatccgagcagagctggaagatccggtttttgggtttaaggatttaggccgctttaaaaaagcgatagatagtaatgacctggtgccagaacaagacctgatagagattactgcaggaaatgccgatgaaataatctctattctgcctgataacgggcatctgtatgtcaaagttaagtcaaatcctaaagcgccagctgaagtaaatgtgactttctctgggattggtggcagttttactgcggtgttcaacaaagatcagaagacgctggttcatggcttcaggccacgggctcgcgtcacaattcgtaagcaagatattgatgaaagccagttcgaaattgatactggcatcaagattattcccggcagtccgcaggatctgtcggcgttgacagtattgcttaatgaagaagaatcttttgcgcgggcaatcgagttgattgccgcaactgaagatgttcaggtacaagagccacttacgcttcagctaaaagatacctttgcaaggcttgataagcagacgcttgaaccttctttaagagaagtgctggaaatcccaacagtgaaactgtggcgcgccattctggatactgaaacagaatcttatccaaacattgaaatcagcggtgaagtggtcccggttgcagatgctcatggagagcttcttctcccttactctgctgatgttgatccactcggtgctttcagaagtagtgatgaagtcgaagccttacaggtcgatcaggaaggtgttgagcgatttattggtgaagtgtcacttaagaagtcagagctcaaagagattcgtcttgtcaaagttagttcagcagccttcaagctgaaggattctgatattgtcttcttccgtacaaggccgactcgtgcatcttatcagaaacgtaaacgcgcactggaacgtctcctagatcgagaaagtgtgctgcctgacttaattgacttgttcgatccatcctgcaaacaggcggctcaaaattatggtatcactctcagcgataccgattttgccagatacgaccgtgaagatcagcacggaaacaagatcagtctgaatgaacagcaaagaaaggcgtttaacaaactggtcaataatggccctctctccctgcttcaggggccaccggggaccggtaaaaccgagttcatcgcggcctttgttcactacctgatcgagaaacagaataccaaacgcattttactggtcagccagtcacacgaggctgtgaatacagcggccgagcgtatcagaaagcattgttcccggcttggtacagagttggacgttgtcaggttcagcaaccgagagggagccgtttcccctggcttaaaagatgtgtactcacacgcaatcacaacagagaagcgcgaactcttcaatgctgaaattaagtaccgtgttgaagcattgagtgaagctattggtctggagccgggatttatttcgggtgttgttcttgcagagctcaatttgttcagacaaatcgatcaccttgagaaattgctctatcaggttaacaatttaacggattcaaatgagagcaatgaactgaaagatattgcagtcgaactcgatttttccatccgctctaagctgagtcaggagtatgggattaacttggacaatggcgtgaaggtctcagcagcaaaagacattctgatttccaagctatgtacagagtatggtgtcagacctgatgaggcaagacgagtaaaagcattagctaaaatatcccgtgatatgcaggatgctatgtcgggagagcgagtgaacctggacgagttttattcgcgctccaggcagttagtggctggcacatgcgttggtattggacaagggcacattggcattcaggagaatatctatgactgggtgattattgatgaggcggcgcgctcgatttcaagtgagctggccattgcaatgcagtcagcccggcgtgtcctgttggtgggtgaccacatgcagcttcctccattgtactcagatgcccacaaggcggcattagcgaggaagctgggtatcaataactcccgcactgaaattgacgaggtattacgaagtgactttgcccgagccttcaactctgcttatggtgcgcagacgagtgcagctttgatgacccagtatcgtatggctccaccgattggtaatctcgtatcgaagacgttttatgacgggaagcttctgaatggagtacgggcaattccggatgtctatcagcaagctccggaagcgttacgtagcgttgtaacctggcttgatactgctaatcagggccaccgagcacatcatcttgaagatcgcggaacaagcatttacaaccgatgtgaagctgacgagattatttctgttcttaaacaggtgtcagagaatgaagaatttgtcgctaagctttcaaaacttgttagcaaagatgaagccgctatcggcgtgatatgtatgtatgccgaacaaaagcggttactccgtcagaaattcaatcaggaaatctggagcgagggatttaaggacattgttaaaattgacactgttgacagttatcagggaaaggaaaatcggatcattatcctgtcactgacgcgttcggataagcagcatagcccaggtttcttacgcgttccaaaccgtataaatgtcgcgatgtcacgcgcaatggatcgactgttgattgtgggtaatgccgatatctggaagggaaacaataaagaattgccattaggctacgttgtaagttatatggctgagcgaggtcaggaagctggatacaggttcctctctgctcagcagggaggcaaaaagaaatga

SEQ ID NO: 31679 - DNA, 195 bp, Escherichia coli
atggttgtagtgggcgatagagtgggcgcttttggtgcctatcgtgacggctgcgaaattattggtcgtgcagcctcaaaacataaagaactggtcgtggttgaaggttattcacattacgacctgtatgataagccagaacctgtgaaacaggcgctcgataaattaattcctttttacaaaacacatttgtaa

SEQ ID NO: 31680 - DNA, 291 bp, Escherichia coli
atgatgaagtgctctgaaattatcatcgatattcatcatccaaggcagcgcggtctgacaatgcgaacaatagaatgcatcgggttaaataaaaaaattattaccacgaatgaagacataaaaaagtacgatttttatgaccctaatatgatctgcgtagtaaaaagacatcaggtcatagtacctgagaattttattaacgcaccgaatgttaattacaaaaatagagaacaatattctttacagcaatgggtgaaaaaaataatctcaccggaaggtgttcgtgaataa

SEQ ID NO: 31681 - DNA, 333 bp, Escherichia coli; identical to SEQ ID NO: 28805

SEQ ID NO: 31682 - DNA, 168 bp, Escherichia coli
atggctgaaccggtaggcgatctggtcgttgatttgagtctggatgcggccagatttgacgagcagatggccagagtcaggcgtcatttttccggtacggaaagtgatgcgaaaaaaacagcggcagtcgttgaacagtcgctgagccgacaggcgctggctgcatag

SEQ ID NO: 31683 - DNA, 306 bp, Escherichia coli; identical to SEQ ID NO: 28810

SEQ ID NO: 31684 - DNA, 603 bp, Escherichia coli
gtgcgtaaagtctggcgtcagttgttacgggaaggaatcagggtagccagatgtacagtggcgcgcctcatggcggttatgggacttgccggtgttctccggggtaaaaaggtccgcactaccgtcagccggaaagccgttgccgcaggcgaccgcgtaaaccgtcagtttgtggcagaacgtcctgaccagttgtgggtggctgattttacttacgtcagcacatggcagggcttcgtctatgtggcgttcatcattgatgtgtttgccggatacatcgtggggtggcgggtctcatcgtccatggaaacgacattcgtgctggatgcgctggagcaggcgttgtgggcccgccgtccgtccggcaccatccatcacagcgataaaggctctcagtatgtgtcactggcctatatggagcgattaaaagaagcaaaactgctggcatcaacagggagtacaggcgactcgtatgacaacgcgatggcggagagcatcaatggtctttacaaagcggaggtaatacaccgtaagagctggaaaaaccgtgcagaagtggaactggccacactcacgtgggtggactggtataacaatcgatga

SEQ ID NO: 31685 - DNA, 300 bp, Escherichia coli
gtgaacaccgttggcaaatcggcattcgtggaggctgttggccagccgagtgatgatgcatccggctatctggattttttcaaaggcgagatagggaaaagccatctggctcaggagctgtggacgcagattgataacggtcagcttgcgcctgacctggctgaaatcaggacgtccattacggatgtcagcaatgaaatcacgcagaccgtcaataagaaactggaagaccagagtgcggcaattcagcagatacagaaggttcaggttgatacaaataataacctgaacagcatgtag

SEQ ID NO: 31686 - DNA, 789 bp, Escherichia coli
atgcaggacggacgcctttatattgcgggtattggtgccggtattgagaacacccctgacggcatgcagagtcaggtgctgctggcggcggacaggattgcgatggttaatcctgcgaatggcaacacaaagccgatgtttgttggtcagggcgatcagatattcatgaacgaagtgttcctgaaatatctgacggctcccaccattaccagcggcggtaatcctccggcattttccctgacaccggacgggcggctgacggcgaaaaatgccgatatcagcggtaacgtgaatgcgaactccgggacgctcaacaacgtcacgattaacgagaactgccgggttctgggaaaactgtccgcgaaccagattgaaggcgatctcgttaaaacagtgggcaaagctttcccccgggactcccgtgcaccggagcggtggccatcagggaccattaccgtcagggtttatgacgatcagccgtttgaccggcaaattgttattccagcggtggctttcagcggtgccagacatgaacgggagaatagcgatacttattcgtcatgccgcctgatagtgaagaaaaacggggctgaaatttataaccgaacggctctggataatactctgatttacacgggtgttattgatatgcctgcaggcagtggcgtaatgacactggagttttctgtatcagcatggtgggtaaatggctggtatcccacagcaagtatcagcgatttgctggttgttgtgatgaagaaagccactgcaggcatcagtatcagctga

SEQ ID NO: 31687 - DNA, 198 bp, Escherichia coli
atgctggccaacacctgcacctggacctatcgcggtgacgagtgcggttatagcggtccggctgtcgcggatgaatatgaccagccaacgtccgatatcacgaaggataaatgcagcaaatgcctgagtggctgtaagtttcgcaataatgtcggcaactttggcagcttcctttccattaacaaactttcgcagtaa

SEQ ID NO: 31688 - DNA, 198 bp, Escherichia coli
atgctggccaacacctgcacctggacctatcgcggcgatgagtgcggttatagcggtccggcggtcgcggatgaatatgaccagccgacgtccgatatcacgaaggataaatgcagcaaatgcctgagtggctgtaagtttcgcaataatgtcggcaactttggcagcttcctttccattaacaaactttcgcagtaa

SEQ ID NO: 31689 - DNA, 300 bp, Escherichia coli; identical to SEQ ID NO: 31685

SEQ ID NO: 31690 - DNA, 1224 bp, Escherichia coli
atggctggaggaacgaacaaattaagcgatacatcgttgcgtaagatgctggggagggaaatcgatagagatagattttatgctgacggtgatggattgagtatcaaggtgtcaaaaattggcgttcttacttggtatttctctttccggattggtgggcgtgaatcgtattcacagcgtgttaagcttggaaactacccggatctttctctgaaagctgcgcgcgagaaacgtgaacagtgtcgagcatggcttgctgaaggtaaaaatccaaagcatcggttaaatgtggcaatacatgaaacactcaaaccagtgacggtaaaagaggctctggattactggatcagagaatacgccgtttacaagcgcacgaatgttgataaacacattgagcaactgaggaagcatattttcccctatataggtgattatccgttatcaatgtgcgaaacccggcattggctggagtgtttcgctagagtaaggaatgacgctccagtggcagctggttatttgctgcagatgtgtaagcaggctctgaagttttgccgcgtacatcgttatgcggttagcaatgctctggatgacctgactatcgatgatgttggtagaaaacagaataagcgcgatagggaacacagcagtcaagagttagcagatatttggcaggaatgttcaggtaagaaatttaaaccatactattcatcgttgttgcgtctattggtggtgtttggatgtcgaacccaggagcttcggttgtcacgtattacagagtgggatttaaaggattggatctggacagtgcctaaagaacacagcaaaggcggagagaagatattgcgccctattccagtggtaatacgcccattcatccaacagcttatagagcaacacaaaaactcaggtcttttgttgggtgaaataaagaaaccagaagctgtcagccaatgggggaggatgatatataagcgtctggggcatattgaatcgtggacacttcacgacctgcgcaggacgtttgctaccacactaaataacatgggggttgcaccacatgttgttgaacagcttctcggtcacacattaggtggtgtaatggccatatacaatcgtagccagtacttaccagaaaaactagacgctctaaataaatggatggaacggcttgaggttatttctggtcagtattcaaatgtaaaaatattgaaggtagcgaaatga

SEQ ID NO: 31691 - DNA, 738 bp, Escherichia coli
atgaaaaagataagcatccctgagcgtatatattatccattgcctgaagcagcaaagaagctgggatgtacgcttaatgatatatatcattttgctgctataggtgctttgaatatttctgtttattttccaaactgtcatccatgtaaatcgctagttataccaaaatcattagttgaaaatattgatgttgattcaggtgggatgttgcaaggggatcgctgggtaattacagggatgaagcctgttggtagcgattttgaatgggtaaattattttggtgtggcttcttatcttgcaaagaatttttgcggtttcttctatctaaatcgggaaagtttttctgaacttgaatttattggcaatgatgcaaggatagtatcatcttttttttcaactcgtcctgaatcagaaaactgggaatgtcaaattatgagtgatggggctattgagatcgacagaaggtttttatgtgtaatggctaaggatttggagcatatcaaagatgttggaaccatgcctggaagaaaaatgggagaatcgccaaaaactcttgcgaagaaagctgagttgatccctgcattaatcaaactaattccagaaatggatgatatagatattggaactgctccagttgctaaagtgatcgctgttttagaggctgcggcagcgatgaaaggggtgtttcttcccgcaacagataagaatacgtgggctaaatacttagggcgaacgtga

SEQ ID NO: 31692 - DNA, 222 bp, Escherichia coli
atgagcaaagttaaatcatcgcaagaccaatttgatcgcatcattcgtgaggaggaatgccgacgccttaccggtatttgccgaacgacgcgttatatgatggaaaggaaaggggtgtttccagcccgtcgtcagttgggggctcgttctgtcggttggttgctgtctgaggttaatgattggcttgaacgtcaacccaaagcacaactgaaatcggcgtaa

SEQ ID NO: 31693 - DNA, 261 bp, Escherichia coli
atgccgattctgacgcatgaaataaacaattattttgatcaattcggacttcatgatattgcttcaatgcctaccactcagtaccgtcaggcccttgcaaatggtggtttactgtggattgatcatcatgattttattcgtagcacgctatcagatgaaatccttgcaacaaatcaagagcaggttaatgttttgattgagcatttgcaggttttaaggaaaaaaatgccactacctcctaattggatgagtgagaaatga

SEQ ID NO: 31694 - DNA, 510 bp, Escherichia coli
atggatcttaacgtcatggcatatccagaaaaattcacaatcgcaggagttgaatacaaggggaaaagaaactcagctgaaaaaaaagtgctaatcccttatactgaagaaccagatattaatattggagatgaaatcactcaaaaactagggaagggggaaataatattaaaagtaattgatatgtcatttttaccaggaggtacactcaatgttggtactaatcaccctcacatgcttacattaaaagtcgagaatctgactgctaatgaacataaaccaaaacaatctagccaaaatacatttaacattggtaacatatccggtacacaggttcaactcggtgagcataacaatcttattgtaaatctcagcataactgaacttgttgaaaaagtttctcaatcacaagatcctcaggcaaaaaatttgcttaaggatttactaaataatagtacggtagccagtctcgttggtgctggtgcgtccgccttgttaacaatgctttga

SEQ ID NO: 31695 - DNA, 627 bp, Escherichia coli
atgaaagttactgcatatgatggaacagaaatatgctatcaaggtttggcatttaaaggtactcccgttcaaattttttggaatggttttatcgatccttacattgaaaataactcagaaattgttttagagcagacctccgcgttagcaattgaatgtcaattctcaatagaggagtcaatcgaggaggctaaattactattacttgtgatgattcgcaggctttactatgaaatggccgaaacagataaaatattaagaggtgatgggttttccttcccagaaaaaaaagacgttagtggttatattgaaagtatctctcaaaaaatcatagaacatgctgaaattgaaaagctaaaaaaaacgcatccaaaacaaaacatattcaacatagctactgtaaatagccaatacgtacaacttggtacaaataacaatattaatatacaagagctctctgagttcttctcaaaaattgcatcaactggtgaaaaagaaattattactctctcaaaaaaccttcttaagaaggcctactcaaaaaacttactgagtaaagaaaactatgaagctctaatatcaaaccttaacacacagacaaaatacactttcaaatctactagttaa

SEQ ID NO: 31696 - DNA, 3654 bp, Escherichia coli
atgaatacgtcaaatatcaaaaaatacgccccggtggcacgtaaacagttccgcgatgcggtcatgcaaaaactgaccacgctgggtattgacgccgataaaaaaggcaacctgcaaatagcgcaagcaaccgatcttggcgacagtgtgcgatatggtcagttctcgctggataaatcactggcttcacgccgtgaacgtctggtcaagcgtgcagaaaagcagggctatgacgtgctggtggagcacatcgcttacacctggtttaaccgcttttgcgctattcgctatatggagctgcatggctatcttgatcacggtttccgtatgctgtctcacccgaccctggaagggagttttgaggttctggatcatgtgccggaagtggctgatgcacttgggctggacaaatcacgcctggtggagatgaagctggcgggcgatcgtgacgaagagctgtaccgtgaactattgcttgcacagtgccatgcgctgcacggcgctatgcctttcctgttcgaagcagtcaatgatgatatcgaactggtattgccggataacctgactcgcaccgactctattctgcgcgggctggtggacacgattcctgaagaagactggaaacaggtcgaagtgatcggctggttgtatcagttttatatttccgagaaaaaagatgatgtgatcggcaaggtggtgaagagcgaagatattcctgccgctacccagctgtttactccgaactggattgtgcagtatctggtgcagaactcggtgggccgccagtggctgcaaacctatccggactccagcctgaaaggcaaaatgccgtactacattgagccagcggaacaaacgccggaagtgcaggcacagctggcggctattaccccatcaagcattgaaccagaaagtattaaggtgctggacccggcctgcggctccgggcatatcctgaccgaagcctataacgtgctgaaggccatttacgaagagcgtggctaccgtacccgtgacattccgcagctgattctggaaaacaatattttcggcctagatattgatgaccgtgcggcgcagctttccggttttgcgatgctgatgcttgcccgtcaggacgatcgtcgtattctgggccgtggcgttcgcctgaatatcgtttcgctgcaggaaagtaaactggatatcgctgaactgtggaccaagctgaactttcatcagcaggcgcaacgcggcagcatgggagatatgtttacccaagggacgtcactggccaataccgacagcgcggaatataagctactgatgcgtactctggctttgttcactagtgcaaaaacgctgggatcactgattcaggtgccgcaggaagatgaaacggcgctgaagacattcctgggtggactatatcgtctggctgtcgagggtgatatcccgcagaaagaagcggcagcagagctgattccgtatattcagcaggcgtggattttggcgcagcgttacgatgcggttgtggcgaacccgccgtatatgggtgggaaagggatgaacggtgaactgaaagagttcgctaagaaacaattcccggacagtaagtcagatttgtttgcgatgtttattgagcggggtttttcctggctcaaagatgctgcgtacaactcaatggtgactatgcaatcatggatgtttttgtctagctatgaaaatatgcgtgcgaatatattggataaatacactattgagacgatggtacatatgggcaatggcgttatgaaaattgcctttggtaccaatgcaacagtgtttagaaatgttcacattccttcttatcaaggggcattctcttatactgagaatgacgatatcaatgatgaaggatatccaaaagaatttccggttaaaaacgatcgtttaaagactgccgctgccgatgacttccaaaaaatccccggtgcaccgattgcgtattggctcagcgaaagtgaggttaatttatttgataataaaaaaatatctcaaattgcctcaacacgccttggaatggcaacagcggataatgagcgttttttacgtttttggcatgaagttaatttcgcgaatatcggttttgattttactgatcgtattcaagctaaaaaatccggtctgaaatggttcccttatcagaaaggtggtgaatatagaaagtggtacggtaatcttgattatgtcgtaaattggttcgacgatggtcgggaaattcaaaattttaccgatgaaaaatcaggaaaggtacgttcgcataactataatttagattttatatttaaaaaagggattacatggaacgctctttcctcaagcaagacatctgcaagagtctcagagtcctcattatttgacaatgcagggtcttcgttatttgttaataatgaagacctttacctgcctgtgttagcatttattaatagtgatattattatctctttaataaaggctatctctccaacattaaattatcaaccgggggatataagtaaattaccagcattttttgatgagaaaatgattgagagcctatccttgaacactgctgaactaatttctctggctaaagaaaattggagtcagcaggaaaatagttatcagttttccttcaatcaggatgcgtttcaaaacggcagcctagtaaacatattaaaaaaccagactgaagttttttatcaaaagttaatcaaaacacatgagctagaatgtgataataacaaaatattttatgaaaaatgcaatattttaaacgaaaacaatcttgccttggcagaaataacattggaaaataatgttttccagtcattaagctcaatttcaaaagatgaatataaccaatttaaggcgattcaggttataaactcacttagcctggctattggctgcatgatgggccgctattcccttgatcgcgaaggcttggtctacgcccacgaaggtaacaaaggcttttctgaattagtagatgaaggcgcctaccaaaccttccctgccgatgaagatggtatcctgccattaatggattctgactggttcgatgacgatgttacctcccgcgttaaagagttcgttcgcacagtctggggcgaagaacatttacaagaaaacctcgatttcatcgccgaaagcctctgcttgtacgcaatcaagccgaaaaaaggcgagtcttcgctggataccatccgtcgctatctttccacccagttctggaaagatcatatgaagatgtacaagaagcgcccaatttactggctattcagctcaggtaaagagaaggcgtttgagtgcctggtgtatctgcaccgttataatgaaggcacattgtcacgtatgcgtaccgaatatgtagttccgctgctggcacgctaccagggaaatatcgatcttgttaacgatcagcttaaaaatgcagaatcgggcgctgccaccacacgcctgaaaaaagagctggatgggttgactaaaaaattcaacgagctgcgcaattttgacgatcgcttgcgtcactatgctgatagacgtatcactattgatctggatgacggcgttaaggttaactacggcaaatttggcgatctgctggcggatgtcaaggcgatcaccggcagtgcgccacaggaggcataa

SEQ ID NO: 31697 - DNA, 267 bp, Escherichia coli; identical to SEQ ID NO: 26890

SEQ ID NO: 31698 - DNA, 492 bp, Escherichia coli
atggatgacccggtaaagggcgaaggccggatgattactgatgccagtggcgtcaccagaagggaaggcgggattttgggaatgtggagcaatatatttccagaacgtaatggtagcaacgagcaaaaaggtgatagcacaccgcacatacccgacatcagggatattcttgatattttccctcagccactgcgggaaaagctgttgaacaaaatcagtgaagccatcgactatgaacccgtgattggtgccatgggaaaaactggcgcggggaaaagcagcgtatgtaatgcgctgtttaaaggggaggtttgtgcagttagcgacgttgaggcatgtactcgtgaagttcaggaattgcatatacgcttcggaaaacattcgctgaagataattgatatacctggtgtcggtgagaatgcccggcgggataggagtatgaagatttataccgcaatttgcttccctccctggatctcatcctgtgggtaa

SEQ ID NO: 31699 - DNA, 396 bp, Escherichia coli
atgacgataaaagcacgcattcagtcacgactgaaacgttctaaacgttacgtattcactcgtgacgactttaaagatattgcaggctacgatcaggttggtcgggtattgcgcgagcttgtcagggaagggcaactgttgaaggttggttatggcgtgtataccaaagcacggcggaacggtattacaggcaaggtaatgccagcggctcccggaggctcttcagcggtgattgtcgaaacgctggaacgcctgaaagtacgctatcgttttgctggcgcaacgcaggcatacaatagcggtacttctacgcagatcccagcttcacccgagataaaaaccccccggcgttttaaacgcgtattatctgtagggaacagcagattaaatggatga

SEQ ID NO: 31700 - DNA, 282 bp, Escherichia coli
atgcaaagtaacttctcaaccggtcaagcagaacactgctccttgatggtcttgacatcgtgcttaagtggatgggagtcgtccctgataggatcgggggagggcagaatgaaactcaaaaatccgggacagcgcagcaaaacaggctgcacaaaaagcgcaggttgcgtgggagtggaatcccgcacccccaaaatggtgcagaagttacggcagtggtcatccgacgcactgggaaataacaaacccgccgtgaccagaatcggaggctcgagggtgtga

SEQ ID NO: 31701 - DNA, 228 bp, Escherichia coli
atgcctctccaaatttatcactggcaacgacgcatgtaccgggtggtggatttttttgtagattgtgaaattgctgctcaagctcgaatggaatatgtttttggatatcttccggagatgaatagtaagcctttaatggaaccttccctgaatgttcattcattgaatctatacaatattgcagagaaagatgcctacactcaattttattttctggtttttcattaa

SEQ ID NO: 31702 - DNA, 459 bp, Escherichia coli; identical to SEQ ID NO: 11546

SEQ ID NO: 31703 - DNA, 309 bp, Escherichia coli
atgcaaactttcaccggcgatttgcgttttatccaccgaaaaccaccgcagtgggaagtggggtgccatatcaggcaggtagcgttcagcctcccgccggttaaacggttcatgagacttaggcgcagggtggaaagcgtgtcctgtcagcagcgcctgctcagcttcgccaaaattcaacgctttttcacgcagggcggtccagtcatgacgggcatcaattgcctgttgcgtatgggcgtggctttccagcacgcgctggtggaaagtttcgcagaggggaacgggcagaaacagttgatgccgtag

SEQ ID NO: 31704 - DNA, 1602 bp, Escherichia coli
atgaaaacgcccaccactcccacccttctggggccggacggcatgacatcactgcgtgaatatgccggttatcacggcggtggcagcggatttggtgggcagttgcgggcgtggaacccaccgagtgaaagtgtggatgcagccctgctgcccaactttacccgtggcaatgcccgcgcagacgatctggtacgcaataacggctatgccgccaatgccatccagctgcatcaggatcatatcgtcgggtcttttttccggctcagtcatcgcccaagctggcgctatctgggcatcggggaggaagacgcccgtgccttttcccgcgaggttgaagcggcatggaaagagtttgccgaggatgactgctgctgcattgacgttgagcgaaaacgcacgtttaccatgatgattcgggaaggtgtggccatgcacgcctttaacggtgaactgttcgttcaggccacctgggataccagttcgtcgcggcttttccggacacagttccggatggtcagcccgaagcgcatcagcaacccgaacaataccggcgacagccggaactgccgtgccggtgtgcagattaatgacagcggtgcggcgctgggatattacgtcagcgaggacgggtatcctggctggatgccgcaaaaatggacatggataccccgtgaattacccggcgggcgcgcctcgttcattcacgtttttgaacccgtggaggacgggcagacccgcggtgcaaatgtgttttacagcgtaatggagcagatgaagatgctcgacacgctgcagaacacgcagctgcagagcgccattgtgaaggcgatgtatgccgccaccattgaaagtgagctggatacgcagtcagcgatggattttattctgggcgcgaacagtcaggagcagcgggaaaggctgacgggctggattggtgaaattgccgcgtattacgccgcagcaccggtccggctgggaggcgcaaaagtgcctcacctgatgccgggtgactcactgaacctgcagacggctcaggacacggataacggctactccgtgtttgagcagtcactgctgcggtatatcgctgccgggctgggggtctcgtatgagcagctttcccggaattacgcccagatgagctactccacggcacgggccagcgcgaacgagtcgtgggcgcactttatggggcggagaaaattcgtcgcatcccgtcaggcgagccagatgtttctgtgctggctggaagaggccatcgttcgccgcgtggtgacgttaccttcaaaagcgcgcttcagttttcaggaagcccgaagtgcctgggggaactgcgactggataggctccggtcgtatggccatcgatggtctgaaagaagttcaggaagcggtgatgctgatagaagccggactgagcacctacgagaaagagtgcgcgaaacgcggcgacgattatcaggaaatttttgcccagcaggtccgtgaaacgatggagcgccgcgcggctggtcttaaaccgcccgcctgggcggcagcgacatttgaatccggactgcgacaatcaacagaggaggagaagagtgacagcagagctgcgtaa

SEQ ID NO: 31705 - DNA, 684 bp, Escherichia coli
atgtggaaagctaaattttataaagcacttccagaaatagaagcagaatataaatctgctcgttggatgtttttaactctaacagtagaaaactgcgaaataactgatttaaaaaatactcttgctcatatgaataaagcttttaaaaagctgataaagagaaagcattttttaaaaaataatctcggtttcgttaagactacggaaataacaagatcaaaagacgggaaagctcatccacactttcatatattgctaatgatgaaaagtacctattttaaaggaacggaatatatgaagaccagtgattgggctgagttatggagagattgccttaatgtctcatatacccctataacagacattaggatcgttaaggtcaagaacggtggtgatgccagccgttcggctcttgctgatgctgtagctgaaactttgaagtatgccgtcaaaccaagcgatatgactaaggatcgtgaatggtttcacgagctgacaaggcaagtttttaaattaaggttcgtatcaactggtggagtattgaaagatttattcaaggaagaaacttccgaagaagatttattattactaacagaagaagaagaaacagacaaagaacttggatcgttatattttaactggtataaaacaaaagcaaaatacagaagaaaaataacagaatga

SEQ ID NO: 31706 - DNA, 1167 bp, Escherichia coli
atgtcatatcagtttatacatattgaagattacgggataaatatatctaaaaaaaggagtaataacggaacgagtgaaaaatacaaaaaagaaacaaaaggaagatccgttagtcaaataatatcagaagcaaaaagagacaatgggttttgttctcatgttgaaaagccagaagaaccgattattttatatggtaagagtttagatgaagttgaaaaactcgctatggaataccatagtaaaacaaagataatagataaaaacgggaaagagaaaaaattaagatctgatgctaatgttttactcgctggtgttatttctttaaatcgtgaaaatatggaaatatgggaagattataaaaatgactcgatagcttatttgaaaaataagtatggtaaaaagcttatatcagttattgaacacactgacgaggaacatcctcacatacatttttattgtattcaggatataggtaaaaagtttgatttgatacacgacggaaaaaaagcattgtatgaaaataaggacaaaaagaaacacgatcaaaatattgcttatttgaatgctatgagggactttcaggaagatttttttaaggtggttagttctaactatggtttgtcaaaggatggtccgaaacgagccagaatgagccgttcggactacttcaagcttggtagagaggttaagctcattaatcaagtaaaggtaaaagcaaaaaaagacggttataaatttgcaatagacgattttgaaaataaaaactggtttaataaactaacggcaagcattacatttaataaagaatcgttaaatgaagccgtttcccgtgggaataaatataaaaaatcgcttagtagtaaaactaaaaaactaaaagaactcgaaggtgtagaaactaaatataatgatttgcgaaaagattttaaacttagagttaataaccaaactgaaaacctaagaaataaaaataatgctcttgagtctgagaatgaaaatataaaaaacaaaaataaagaactggaagaagaaaataaacaactaaaaaccactcttgaagaaacttccccactctacgagctattaaaaaataagtttggggatcagtttgaggaatggaaaaataacttatttaaatcttttagatccaaaataaaacctaaatag

SEQ ID NO: 31707 - DNA, 864 bp, Escherichia coli
atgaggataagcgaagtgcgtgtggttgagcatcatggtatcagactggcaacagaagcctttggcgatccgaacgatccgccggtgctgctggtcatgggggccacggcatccatgcttggctggcccgatgaattctgcatctcgctggccgaacggggactccacgtgatccgttacgatcatcgtgacactgggcaatctacaaccgtgccaccaggggaagccacatatgcggtggaggacttggccgaagatgccatcgccatcctaaatggctacgggatcgacaaggcgcatctgatcggcatgtcgctcggtggattcatcgcacagatgctggcagttgcgcacccggagcgcgtggcttctctgaccctgatcgcatccgagcctctgggttgggatggcgcggagctgccgcatatctcccaagcatttcttgaccacttcggcacgctcgcttctctcgattggtcagatcgcggggcggtggcggatttcttggtcgagagcgggagactatgtgccggagccgggactcccttcgatgagttccgcgaaagggcgcgtgtagagcgcataatgtctcgaacggacagcctgccaagcatgttcaaccacggcgcgcttttcacccgcgatgactggaccggacgtttccgagagatcagttgccccgttctggtcattcatggagcggaggacccaattctgcctgtcgagaatgggacagccatcgcccacgccatacccaacacatcacttaccgttctcgccgggactggccatgagatacccgtgttggctatccaagaaatcgttgagcagatctcggcgcatgtccgaggctcatgctgctag

SEQ ID NO: 31708 - DNA, 390 bp, Escherichia coli
ttggagcagaacgaagccttatccgcacaccttgagacactttctgcagaagacaaatttatctacaaccttgaacagcgctggacgcgaaagctactggtttcatccatgtcaggtcagacagaagcgatgcgccaaaaaggtatgtacgtggacttggacggcgacgctgtcacgtcctctccgctcagtgttgatggagttacctcacagtactggatcaatgccgcggacagggccttactgatactgagagatggtaactttaaggctccctacggaagtttggcgacttacttggagagcttggagagaccgtttaatcctttggaaaaagctttagaactcgacgctcagattaagtggctcaaagacaccaatgcatggtga

SEQ ID NO: 31709 - DNA, 273 bp, Escherichia coli
ttggttaaatctgaaaaaatcgacggctgggaaaagattgtagaaaacgtcgagaggctcatcagtgatgccaagctcttacaggaaaatggtagatacgcgtccgctctttctatcgcaattctagcgtttgaagaggctggcaaaggctccaattttgaaactgatttcatcacctcgcgtaaaggaaagatgaaggtttatagctggcatatgatccggcaaatcgtgagcagcttttttcttactgcatctctctggcaaaaatactga

SEQ ID NO: 31710 - DNA, 489 bp, Escherichia coli; identical to SEQ ID NO: 25166

SEQ ID NO: 31711 - DNA, 858 bp, Escherichia coli
gtgcagcagatatttggcggcagaccggacccggacctgttattcagacaactggtcagtgacagttacagttatttctacggctccagtcagtctgccagccagattatgcgccagaacgtcacaataaatgccctgaaagagggtatcaccagtaatgccgcccgtaatggtgacaccgccagcctggtgaatctggccaccacgtcatcgatggagaagcaacgtctggcgcatgtctctatcggtcatgtgacaatgcgaaacctgccaatggtacagactatcctgacgggaattgccattggtattttcccgcttctggtactggcagctgtcttcaacaaactgacactgtccgtcctgaaaggctatgtgtttgccctgatgtggctgcagacctggccgttgttgtatgccattctgaacagtgccatgacattctatgcgaagatgaatggtgcgccggtcgtgctgtctgaactctctcagatacagctgaaatactctgacctggcctctactgccgggtatctttcagccatgatccccccgttgtcatggatgatggtaaaaggccttggcgcaggtttttccagcgtgtacagccacttcgcctcttcctctatcagtccgacggccagtgcagcaggcagtgtggttgacggtaattactcctacggcaacatgcagacggaaaacgtgaacggcttcagctggagcaccaacagcaccacgtcgtttggtcagatgatgtaccagaccggcagtggcgcaactgccacacagacccgtgacggtaatatggtgatggatgcaagcggagcgatgtcccggttcccttgccctggtggatag

SEQ ID NO: 31712 - DNA, 156 bp, Escherichia coli
atgcgtgaatatccaaatggcgaaaaaacacaccttactgtaatggccgcagggtttccatctctgaccggagatcataaagtcatttatgtagcagcggatcgacatgtaacttcagaagaaattctggaagcagcaatgagactcttgaattga

SEQ ID NO: 31713 - DNA, 888 bp, Escherichia coli
gtgtttaacggctttgagctgataagccagcagttcagccgggtacggcaggcgcatccgtcggtggccccgcagtgggtgacgcggacgaatcatgcggtgagcgacctgacgggccggccgctgatgctctttaacagtgaaggcaagacggtctggcggccggggcagaccagcctgtgggggctggtactcagcctgcccgcggacaccggctacccggacccgcgcggggagctggacgcggaagccgcccccggcctgctgtatgcgggacagtggcaggatgcggaatcggggctgtgctataaccggttccggtactacgagccggaaaccgggatgtacctggtgagtgatccgctggggttgcagggaggggaacagacttaccggtatgtgcctaatccgtgtgggtatgttgatccgctggggctggcaaaaacttctgttcccgtatcaatagtagaaccaaaaaaaatcactggtaactttaaaacaattcgagaaaaattaaggcttgccaggaatggtgatgtttctgcacaagccgaaattgcatacgcaaaatatatgcgtagtttgggaaaggatgtgcatttcaatacacctccgaatcgctcagtatcaatggcagattttacaattgatggaatccaggttgatacaaaattattgagtggtataggcggaaatgctgcaaaaaatgttaacaagggagttggccaggtgggagataatggtatcgtcctggtaattagaaattctaattccaaaaatacacttgaggaatttcatgaattctttggaaacttcaaacctaataattcaacagttcgagttgaagtgattgatcaatccgttttagaacctttttggagattttaa

SEQ ID NO: 31714 - DNA, 1107 bp, Escherichia coli
gtgaatactgttggcaaatcggcattcgtggaggctgtcggtcgggcgagcgatgatgcggaaggttacctggattttttcaaaggagaaatcgggaaaacacatctggcccaggagctgtggacgcagattgataacggtcagcttgcgccggacctggctgaaatcaggacgtccattacgaatgtcagcaatgaaatcacgcagaccgtcaataaaaaactggaaaatcagagtgcggcaatccagcagatacagaaagttcaggttgatacaaataataacctgaacagcatgtgggccgtgaaactgcagcagatgcaggacggacgcctttatattgcgggtatcggtgccggtattgagaatacgccagcaggaatgcagagtcaggtgctgctggcggcagacaggattgcgatgattaatcctgcgaatggcaacacaaagccgatgtttgttggtcagggcgatcagatatttatgaatgaagtgttcctgaaatatctgacggctcccaccattaccagcggcggtaatcctccggcattttccctgacaccggacgggcggctgacggcgaaaaatgccgatatcagcggtaacgtgaatgcgaactccgggacgctcaacaacgtcacgattaacgagaactgtcgggttctgggaaaattgtccgcgaaccagattgaaggcgatctcgttaaaacagtgggcaaagctttcccccgggactcccgtgcaccggagcggtggccatcaggaaccattaccgtcagggtttatgacgatcagccgtttgaccggcagattgttattccggcggtggcattcagcggcgctaaacatgagaaagagcatactgatatttactcctcatgccgtctgatagtgcggaaaaacggtgctgaaatttataaccgtaccgcgctggataatacgctgatttacagtggtgttattgatatgcctgccggtcacggccacatgacgctggagttttctgtatcagcatggtgggtaaatggctggtatcccacagcaagtatcagcgatttgctggttgttgtgatgaagaaagccactgcaggcatcacgattagctga

SEQ ID NO: 31715 - DNA, 345 bp, Escherichia coli
atgcgcggccccggcggtcagtcagtgcggttgcagtggcagcagcaccataaactgagcggcattgaacgtgctggaaccggcgcggaaggattccgctacgaccgccacggcaacctgctggcctggacggacggcaacggcgttgtctggacaatggaatacggcccgtttgatttgccggtggcgcgaacggacggtgaaggccaccgctggcagtaccgctacgataaagacacgctgcaactgacagaagtcattaacccgcagggtgagtcatatctttatgttctggataactgcggccgggtgacggaagagcatgactggggcggcgtggtctga

SEQ ID NO: 31716 - DNA, 924 bp, Escherichia coli
gtgcctgctccggagctgccctgtgagggtgtacgccgtggcctgttcgtaccccgctgtactgcccgccccgccgaagctgcgggccgtctcacggtgcagccggtcccgcgtgtactcgaccagcggcgttccgcccagcttcatccccgcaagataaccgctgccatacgtcagccactccaccggcggcagaccgtccggctcctgacgggtcgccagcccctgttcgctgtagacgtgcctcgtctcatgctcccacagcatctcccccgtctcctggttctccaccgtctgccgttcgcccgtcaggcggcctttatcgtcatagccgtagtggaccgccacacggtggccttcgctcaggtggctgatttctgtcagccagccgtggtcgtcatactgccactgctccgccgggtcgccgttcaccgtccggtgcgtgatgcggtccgacgcatcgtaatgccagagggtgataagtccctcgtcttcactgtggacaagctgccctgtggcgctgtaccggtaacgctgtgtcctgccgtcaaagccgcgctgctccgtcagcctgtccaccgggtcataccggaacgtggactggctgccgttctcgttggtcagcacggtgatgcgcccggcggcgtcatactccatgctgcgcgtcagtccgccctgcgtggtgctgacggcctttccccacgcatcatactgtgtctcactccggctgccgttcggggcaatgatagcggtgaggtcgcctgcggcgctgtactcataacgggtttcacgtccctgcgcatccttctgactgaccagttgaccacgcgggttataactgctgtaagtgctgatgccttcctcccggtgaaccgccgtcctctgaccgtaccggtcgtattcataccgcgtcgtgtaccctga

SEQ ID NO: 31717 - DNA, 729 bp, Escherichia coli
gtgcctgctccggagctggccgctggtattccaggcggtggcaagctcatatgcctccccgccgaagctgcgggccgtctcacggtgcagccggtcccgcgtgtactcgaccagtggcgtaccacccagcttcattcccgcaagataaccgctgccatacgtcagccactccaccggcggcagaccgtccggctcctgacgggtcgccagcccctgttcgctgtacgcgtgcttcatctcatgctcccacagcatctcccccgtctccgggttctccaccgtctgccgttcgccggtcaggcggcctttatcgtcgtggccgtagtggaccgccacacggtggccttcgctgatatggctgatttctgtcagccagccgtgctcatcatactgccactgctccgccgggtcgccgttcaccgtccggtgcgtgatgcggtccgacgcatcgtaatgccagagggtgataagtccctcgtcttcactgtggacaagctgccctgtggcgctgtaccggtaacgctgcgtcctgccgtcaaagccgcgctgctccgtcagcctgtccaccgggtcataccggaacgtggactggctgccgttctcgttggtcagcacggtgatgcgcccggcagcgtcataccccatgctgcgcgtcagaccgccttccgtcacactcaccggacgcccgcgtttatcatattcgatggtgctgcgtttaccgtccggtga

SEQ ID NO: 31718 - DNA, 816 bp, Escherichia coli
atgaatcagttgcttgtaattgatggcgtttctgtgcgccagtacttcgaatctaactactgtcttaacgaccttcagaaagctgctcttcttgccgctggtgagaatcgctcctcccgttcgctggaagttcacgagtttatgcgtcgtcctgaaacgaaggctcttgtggaattattggaagaagaaactacgggagattcccgtagtattcctgtcatcaccattcaggggcgcaatggtgggacgtatgtctgtaaagagctggtctatgcatatgcaatgtggatcagcccggcattcagcttaaaagtgatacgtacttttgatgcgcttcataattcatcaccagaagaaaccacatccgacaaaattaaatccggggtcattctgcttgaatcagcagcaaagactctaaatctgtcaaactcctcgaaacttggtgcataccagaaattatcaaaggtagctggtcttcctgaacttatgccgatctatgccattgatgcacctgctgatgcgccagatggttcaagccgccctacgctgtcgctgagtgcactgctgaagcagtatggtatccgcctgacggctaatcaggcatatcaccagatggcgaagctggggatcgttgaacaacgcgaacgatacagtcgtaccgcgattaacaacatcaaaaaattctggtcgctgaccgcgaaaggctgcatgttcggcaagaacatcaccagtcctgcaaatccgcgcgagacgcagccgcatttcttcgaatcccgattccctgagctgttaaagctgctcgataccgttcattga

SEQ ID NO: 31719 - DNA, 798 bp, Escherichia coli
atgaataatctgatggtcattgatggtattgaagttcgtcgtgatgcttatggtcgttacagcctgaacgatctgcacagggctgccggttctctggataagcataagcctgcattctggctccgcaatgagcaaactgaacgtttaataagcgagttgcagatttgcaactcggtcaatatagagccagttaacgttattcgtggcggaaataaccaggggacgtatgtctgcaaagaactggtgtatgcctatgcaatgtggatcagcccgtcattccatctgaaggtgatccgtactttcgatatggtaaccagcgcaccggaaaaattatccggacaggctgctgacaagatgcaggctggtgtgatcctgctggactttatgcgccgggaattaaacctgtctaactcttcagtgcttggggcctgtcagaaactccaggaggctgttggcttaccgaatctggcaccgcgctatgccattgatgctcctgctgacgcgcctgatggctcaagccgccccacgctgtcactgagtgcactgctgaagcagtatggtatccgcctgacggctaatcaggcatatcaccagatggcgaagctggggatcgttgaacaacgcgaacgatacagtcgtaccgcgattaacaacatcaaaaaattctggtcgctgacagcgaaaggctgcatgttcggcaagaatatcaccagtcccgcaaatccgcgcgagacgcagccgcatttcttcgaatcccgattccctgagctgttaaagctgctcgataccgttcattga

SEQ ID NO: 31720 - DNA, 621 bp, Escherichia coli
atggtttttgatgcagagcgtgagatttatttcccgcagcgcccaccccgtccgcagggtgaggtttaccgccgttacgatccacgcattcgcaggatgctgagtttccgcattgccgatcccgtttctgatgcagaacgtttcacccgctggatgaatgatccgcgcgttgagtatttctgggagcaaagtggctcactggaggtacagaccgcctatctggagcgccagctcaccggtaaacatgcattcccgctgattgggtgcttcgacgatcggccattcagctattttgaaatctactgggcggcggaagaccgcattggtcgtcactattcgtggcagccctttgaccgtggcctgcatctgctggttggtgaacagcaatggcgcggggcccactatgtgcaaagctggctgcgcgggctgacacattacctgctgctgaatgagccacgtacgcagcgcacagtactggagccacgcaccgataaccagcgcctgttccgccatcttgagcctgcgggataccggacaattaaagagttcgacttcccacataagcgctcgcgcatggtgatggcggatcgtcatcacttcttcacggaggtcggtctgtaa

SEQ ID NO: 31721 - DNA, 723 bp, Escherichia coli
atgacaggcggcgctgcctcaaggattacagcgagagtcagaaaggacgaagttatcggatggatttttgcagaggcaacaattcaggcaattgatggggagttaaaaataggttctcagatacagtattctcctaagcagggcggggcaaccgtatctggtgactatatttatctggccaccccacaagtagaaaatgggccttgtgtatcatcttttattatatcaggaacgacggcggcgacccgcgcaagcgatatagtcacagttcccattaagaataatctttataatcttccttttacggttctttgtgaggtacataagaactggtataaaacgccaaatgcagcaccgcgtgtttttgataccggcggtcatcaaaccggagcggctattattcttggcttcggttcttcagcagattacgacggatttccttattgcgatattggtgggtctaacagacggataaacgaaaatgcatcacttgaaaaaatggttatggggatgcgtgtaaagtcagagcagtctacatgcgcagtaagtaacgggcgtatatccagcgaaacaaaaaccacatggtcctgtattcagaacaccgcaattatccgtattggaggccagactacagccgggttacgtcatttatttggtcatgtcaggaatttcagaatatggcacaaggcattgactgatgctcaggtgggggagtcaatctaa

SEQ ID NO: 31722 - DNA, 333 bp, Escherichia coli
atgacgagcaaagaaacctttacccattaccagccgctgggcaacagtgacccggctcataccgcaactgcgcccggcggattgagtgcgaaagcgcctgcaatgaccccgctgatgctggacacctccacccgtaagctggttgcgtgggatggcaccaccgacggtgctgccgttggcattcttgcggttgctgctgaccagaccagcaccacgctgacgttctacaagtccggcacgttccgttatgaggatgtactctggccggaggctgccagcgacgagacgaaaaaacggaccgcgtttgccggaacggcaatcagcatcgtttaa

SEQ ID NO: 31723 - DNA, 351 bp, Escherichia coli
atgagtcacctgatcacgcacttcagccagcgatgctcgtacacgagccatcagattcgcttcgctgtccagcccggcagcacccagcgcagcagttacggcaaaagtggagttaaccagcaggtaataagggaaatagcgcagcaactgctcacgggtgaaaatattttccgcctgcgcctcgccaatagaatcgagccagtctgtcgcgtgaggcataaaagcgctgccctgacagtcacggtaaataaatccgaccggcagatccccaagcatctggacaagaatattttgctgatgcgccagcagcaccaggccgtaatccgcttcagccgtaaacagcggctttag

SEQ ID NO: 31724 - DNA, 1134 bp, Escherichia coli
atgagtaatccgatcctgtcctggcgtcgcgtgcgggcgctgtgcgtcaaagagacgcggcagattgttcgcgatccgagtagctggctgattgcggtagtgatcccactgctactgctgtttatttttggatacggcattaacctcgactccagcaagctgcgcgtcgggattttactggaacagcgtagcgaagcggcgctggatttcacccacaccatgaccggttcgccctacatcgacgccaccatcagcgataaccgtcaggaactgatcgccaaaatgcaggcggggaaaattcgcggtctggtggttattcccgtggatttcgccgaacagatggagcgcgccaacgccaccgcaccgattcaggtgatcaccgacggcagtgagccgaataccgctaactttgtgcaggggtatgtcgaagggatctggcagatctggcaaatgcagcgagcggaggacaacgggcagacttttgaaccgcttattgatgtacaaacccgctactggtttaacccggcggcaataagccagcactttattatccccggtgcggtgaccattatcatgacggtcatcggcgcgatcctcacctcgctggtggtggcgcgagaatgggaacgcggcaccatggaggcgttactctccacagagattacccgcacggaactgctgctgtgtaagctgatcccttattactttctcgggatgctggcgatgttgctgtgtatgctggtgtcggtgtttattctcggcgtgccgtatcgcgggtcgctgctgattctgttttttatctccagcctgtttttactcagtaccctgggaatggggctgctgatttccacgattacccgcaaccagttcaatgccgctcaggtcgccctgaacgcggcttttctgccgtcgattatgctttccggctttatatttcagatagacagtatgcccgcggtgatccgcgcggtgacgtacattattcccgcacgttatttcgtcagcaccctgcaaagcctgttcctcgccgggaatattccggtggtactggtggtgaacgtgctgtttttgatcgcttcggcggtgatgtttatcggcctgacgtggctgaaaaccaaacgtcggctggattag

SEQ ID NO: 31725 - DNA, 1347 bp, Escherichia coli
atgcttacggtatggtggttatcaagttttatcctgattagcacccttaatggctatttcgataatcaggaccgcgattttctgacaggtaaacttcagctcaccgaagagtttcttaaaacagagacgttccggaacaaaacggatattaagtcattatcagaaaaaataaacgatgcgatggtagggcacaatggtttattcatttctataaaaaacatggaaaatgaaaaaattgttgaactctatgccaaaaattctgttgttccagcggtcctgcttaataagtcgggtgatattctcgactatatgatccagacggaagaaaataacaccgtgtaccgcagtatctcgcggcgggttgccgtgacgccggaacagggtaaaagcaaacatgtcatcattacggttgccacggatactgggtatcacaccctgtttatggataagctcagtacctggctgttctggttcaatatcggtctggtctttatttctgtttttctgggctggctgaccacacgtattggtctgaaaccgctacgggaaatgaccagtctggcttcctccatgaccgtacacagcctggatcagcgtcttaatcccgatttggctccgccggaaatttctgagaccatgcaggagttcaataacatgttcgatcgcctggaggggtcattccggaaactgtcagatttctcgtctgacatcgcgcatgagctgcgcacagcggtcagtaatctgatgatgcagacgcagtttgcactggctaaggaaagggatgtttcgcattaccgcgaaatcttattcgcttacctggaagaactgaaaaggttgtcacgaatgaccagtgatatgctttttctggcacgttcagagcatggtctgctgcagctggataaacatgatgtggatctggccgccgaactgaatgaattacgtgagctgttcgagcctctggcagacgaaacaggaaagacaatcaccgttgaaggagagggcgttgttgccggagacagcgatatgctgcgacgtgctttcagtaacctgctttccaatgcaatcaagtattctcccgataacacctgtacagcgatacaccttgagcgtgacagtgactgtgtgaacgtgatgattacgaatacgatgtccggccaggttcccgctaatctggaacgtttgtttgatcggttctatcgagctgattcatcaagggtccacaacacggaaggcgcggggctgggattatcaattacaaggtcgatcattcatgctcatggcggcgagctgtcagcagaacagcaggggcgggaaattgtgttcagtgtgcgcctgttaatggattaa

SEQ ID NO: 31726 - DNA, 435 bp, Escherichia coli
atgaaaaagatccttgtatcatttgttgccattatggctgtcgcttcatccgccatggctgcagagacaatgaacatgcatgaccaggtaaataatgcccaggcacccgcccatcagatgcagtcaacctctgaaaaaagcgctgttcagggagacagtatgacaatgatggatatgagcggacacgatcaggctgcaatgtcccatgaaatgatgcaaaacggcaacgcttctgcccaccaggacatggcggagatgcataaaaaaatgatgaaaggcaaaccaggggccaccaacgaatcagcaacgtcattttcagaaatgaacgagcatgaaaaagccgctgttgtgcacgagaaggcgaataatggtcagtcttccgttattcatcagcagcaggctgaaaagcatcgcagccagatcacccagaattaa

SEQ ID NO: 31727 - DNA, 1116 bp, Escherichia coli
atgaacgaatttacgacacttcttcagcaaggcaacgcatggtttttcatccccagcgccattctgcttggcgcgcttcatggactggagcccgggcactccaaaacaatgatggcagcattcatcattgctataaaaggcaccgtacgtcaggccgtgatgctgggtgtcgcggcaacattgtcgcacactgcagtcgtatggctgattgcttttggagggatgtatatcagtaataaatttaccgcagaatcagccgaaccctggctacagatggtctcttcagtgatcatccttggtacggctttttggatgttctggcgaacctggagcggtgagaaaaactggctggagggaatgcaggagaatgaacatcatcaccatgacgaaacaaggttgatcgatactggccatggaaaagttgaactgtccatttttgaagaaggacaacttccccactggcggctacgcactcttagtggccaaagatgggcttctgaagatatctcattaaccacacttcgggaaaacagtacgatctctcagacttttgaatttgttgatcatggtgattatctggagtcaacatctcccatccctgagcctcacagtttcaacgtacgtctgtctctgggacatcgtggtcatgtccatgactatgatgtggcgttcgctgaacacgaccatgaccatgaccactctgagcttgatgggctggatgtgaattcgaaagagtatcaggacgctcacgaactggctcatgccaatgacataaaacgccgcttcgacgggaaagaagtaaccaacgggcaaatcctgatatttggactgacaggagggcttatcccttgcccggcagctataactgtattgttgatctgccttcagcttaaagcgcttacgctgggtgccacactggttgtttgtttcagtatcggcctggcattgaccctcgtaacggttggagtgggtgcggcgatcagcgttcgtcaggtcgccaaacgctggagtggcttcaataccatcgccagaagagccccctatatttcaagcgccctgattgctgctgttgggatttacatgggtatacatggctggaatgggctggtgcattaa

SEQ ID NO: 31728 - DNA, 273 bp, Escherichia coli
atgtcacataccatccgcgataaacaaaaactgaaagcacgtacaagcaagatccaggggcaggttgctgcgctgaaaaaaatgcttgatgaacctcacgaatgtgccgctgtactgcaacaaatagccgccatacgtggtgccgtgaatggtttattgcgtgaagtgattaaaggacatttgactgaacatattgttcatgaaagtgaagaacagaaacgagaagaagacctggacgttgtgctgaaggttctggattcttacatcaagtga

SEQ ID NO: 31729 - DNA, 168 bp, Escherichia coli
atgtcatccaaaatttttttccattatctgacgttgggtgattttgatggtcagcgagtagaggctttaacaatgtgggttgccctgagcaaagtaagggaagtagatgtaccagaaatgtacgcgttgccttgcatgaaggggggcatcttaaagctcattgattaa

SEQ ID NO: 31730 - DNA, 234 bp, Escherichia coli
atgacatgcaaaacgctgatctcaaagacagatgatggatacacatttagcatttcaccttacgaagacgggtaccgcttatcagtctcgcctgaaaatcgtcacaatggtacccaaagctttgacggctggttcccacgttttttttccgaaccacagtatgccaaatcatctttaactaagtttctcggtgagtccttagtatgggaagaagattcaagtaatgctctatga

SEQ ID NO: 31731 - DNA, 255 bp, Escherichia coli
atgaatttggcctattttttatttttgtctataactgttatgcttacgagctttattattaaatcacttgtcgtattggtaaagttcaaattacttcgtgatgaacgtctcgaatataccagcaataaaaatattgatgagatgtacgatttaatgaatgcgaaggaagaaatcctcataaggcatcataagcagatgttggcattgcatctttcactattaatattcgttctatttattgcttacatttactaa

SEQ ID NO: 31732 - DNA, 288 bp, Escherichia coli
atggaaagcttcgaaactgaacaaatgattcaatatgctttctacataaatatcgtaataacgactggtttggcatggttttgcttgcggtcaggattgcattacaattttttcagaaaagcagagagtgccagaacaaaagggctgagtagtacctctactgaacacggtccagcaattgtgagaataaagaagctacaagcattagtagattttattagtaactgtgcttttctaatcctttcaattggcacagcttatattttgtatttttggatccacagttaa

SEQ ID NO: 31733 - DNA, 198 bp, Escherichia coli
atgaaaaacgacagtttaattacgcggtataaaatacttaaaggcgaacgcgatgagtctatcttcaccataataatcgcgctagtagtaaagctggggctggtagccctggcattctatctgttgcttggttccacgattgattggtcaagctggaaaacctatgccgccatgttgatctttggagcatttctctaa

SEQ ID NO: 31734 - DNA, 276 bp, Escherichia coli
atgaaagtgaaagagttgatcgccatgctgaacgaaagagaccctgaggcaattgttctgatttccggctatgaaacgatcggcggcacggaagtcgcagaagctgatttgctcattgatatgcagtcaatatgcttagaacaggctgataatctcacaggaaaccgtaaagttgtttcttccggtggtgaagattcagtttggttaggctggaaagatgattaccgtacaaaggtgtttttagaagatgcccaaattcctgatcaagatgaatga

SEQ ID NO: 31735 - DNA, 807 bp, Escherichia coli
atgaatattcacgaaaagttaaagcgttggatgtgtattactcaagaagatagtgctattcttgattatcttaatgctgagttaaaaaaagctcaatccttgagcttgaataatgaatcaaacagattgtttttatacaaaacaattttactagcccatttaaaatatattcaagtcattaatttacttacaagaggtgatttttatgaagcatgggtagaacttgaaaggatagaaatagatttaatacatattaaagaaaataatgagtttctgcctgaggttaatttctatggtgttaacttcttagcgagaatggtatgtaattggcaggcgttattcccatataaaatcttcggtagttctcgtgaaataataaaagaagtgaaatgttcagtatgtaatacaacccgtagttttattaatgattgtggtcatgttaaaaataaactttataatggagttctttgctttgatgaagtgatcgattttgaattaattacttatgacatagttagtaatcccgttaacaaatgtagtgtttttttctccaatgatggtgatcattataactattcaactttaattagtgttgtcaaatacatacaatccccacatcaaattttcaatattacgacctggagatttaaggcgaaagaacatgatggagtattatcgccagaaaatatttgtccatgtggagattctttaaaaaaatatgcagattgttgtttgccacgtaatggtatttataaaaaacatatagatatttggtttcccttcccgttgaatgtagaacctatttag

SEQ ID NO: 31736 - DNA, 441 bp, Escherichia coli
atgaaccccattactttgagtgaaatgagtgatgaagatgaagaggtaaaaatcatttcttcatatgaacctcaagatgatgagattgcgatcgtttttgatagttcaaaaattactggaggtaatgcactggattttttccagttcaccaagcaatcacattctaatgttaaagtgtacggagattctaatggtgtttcgtacctgcaattaaacagtataacgttagcgttaggcactttctttgccacatcagtaatgataccttttttagtaaatcttgtttcaaattatattcagaaaaaaattgataactttggaactagagatatagacgttaaagtctctataattaaaaaaaataaatcaggaaaacatgtgaaatacactgtttctggaaaagtagacgatgttttaaaagtaattaacaaaatcaaataa

SEQ ID NO: 31737 - DNA, 1362 bp, Escherichia coli
atgtttaatctaattatgggcggagaacctgactattttgaacattggcccatgtatgaacgggttagtgggagttgtgattttcctatatcacgtatgttagaaggcacctctgatgacatccggttgaagttaacgcctttgaatgataaagcattatcttatattgagaaattacctacgctttttatgtcagaactttattcccgagacaatgttgaatacattactttgcgacttggtgtaatttcaaatctacgaacagttaacaaaaatgttgagtttgatttcagaatcactcactcacaagatgatgtcgtagtgataaacaaagagttatatcaaacagctttagaattaggtgcatatgggctgaaacggactcactggggaataaaagcacgtgatttaaatcaaacattagcacttctaaatataacgacaagaagtacaccacttcctcctactgaagcacttcctgatgaagttgataactacccaataatagataatgttcaaagtttcatggcgcgtgttttagaacaagatcatgaagaagatgcagaaatattttatcgtggacattctgatgtatcttacgagttggctccatcagttttcaggaaaaacaaaaaaggtaacttcaagcatttgcacagtgaatcaaatttagtccgtgaagccctaacagcaaggccaactgagtttgttgatgataaaacaatgctagacaagttagtaaggatgcaacactacggactaccaactcgtttgttggatataacatcaaatccactaatcgctctgtatttcgcttgttgcgacattagtaataatgaaaatacaaatgaggttgatggacatgttattattttcaaaacaaaaagggatcgtataaaattctttgactctgatacagtaagttgcatatcaaatatatcaatgctaagtcaaacactgaaagatcagctggattgtaaaatggacaaggaggctttcaataaaactgaagcttgtcaaaaactcatacattacattaaagatgaaaaaccttattttaaagatgtaattataccatcagatttggaaaggttaattttcgttaaaggaagaaataataatgaaaggatgtcatcacagtcaggtgcattcttattatttgggaataatgctgtttatcccgatttagtttcaaaccctgatgatgctatgcaagagtttaaagtagaaaaaatagtgatcagaaacaaagctagaatacttaaggaactcgcaaggttaaacattacagatgcgacagtttatcaaggcatggaaaggacaatgaaactaattgcggccaaattttccgcaggagattga

SEQ ID NO: 31738 - DNA, 804 bp, Escherichia coli
atgattaaattcccgactacaaagcgcgttgatttgtataaaactgctgtcagctctgagcaattacatctagatctggttgcggctcaggagttcatgttcgatgcctgggaaaatgatgacctggaagttgtgctgaaactcatcagaaaagctatcaagaaatccccgctctgtgctgacgcatactcattctactgcgagatatctcaagaacctcctgagtcaaaaatcgggaagctggagactgctttgtacgcagccagcattgcacttggcgaggattttcaggagttcgcaggacgtttctggggatttgtcgaaacacgtccatatatgagagcaaaagcagctttggctgaggccttatgggagtctggtaatttttatccggctatggctcatagccgcgaaatgctgaagctcaacccgaacgataaccaggggattcgtcatttattagcgaactattaccttgagcttgaaatggtggatgatctggccttgctactggacgattatcctggggatatgcgttcgttttttcagtatacacgcgccctactcgcctaccgacagtcatccccggatgccgatgatatcgctaaagctgcgattgattctaatagacacatccccggcttgttatcgaagtgcagattacagatcaagtctaacagtggatatatcacgttaggtggaatggatgaagccatttattatgtgaatcataatataaagccttggattcgcacctctggcgcaattgattggattgtaaataattcattaagtaaaatataa

SEQ ID NO: 31739 - DNA, 1359 bp, Escherichia coli
atgttggtgaccatgtcagataaagagatccaccgcctaccggtgatacaggcagtttgtgaaaagcgtctacgccgtcgtgatgcagcatcacagcttggcatttcagaacgtcaggcgcaacgacttatcaatcgttaccgagtttctggtgctgaaggacttgtcagccgcaaacgcggccagcccagcaaccgccggttgaccgaatctctcaaactacgagtactcacgctgatacgtgaaaactacagtgactttgggcccacactggccgcagaaaaactcagagagcgccataatatccggctttcaatcgagaccgtccgcaactggatgacgtctgacggactctgggtcccgcatgctcgccgtaagtcacgggtttatcaaccccgacatcggcgtgattgtctgggtgaacttatccagatcgacggctcccaccatgactggtttgaaggccgtgcgccaaaatgctgcctgctggtctttatcgatgatgccaccgggcgtctgatgcatttgcggttcagcgagtcagaaacagcctttgactacatgctggcaacccgggaatacatcgagcagcatgggaagccggtatcgctgtacagtgacaaacacgcaatatttcgcgtcagtggtccggagaaacgcaataccaccgttacccagttcggacgtgtgctttatgacctggcaatcgagcttatttgtgccaacagctctgaagctaaaggccgcgtggaacgtgcgaatcagacacttcaggatcggctgatcaaagaaatgcgtctggaaggtataaccggcattgaggccgcaaatgcctggcttgccactttcatcgctgactttaacagccggttttcacgaccggctaagttccccaaagatttgcatcgtccggtgcaggaaagccccgatgaattaagagacatctttgcctggcatgatgttcgtaccgtgtcgaaatcactgaccttccagtacgataagatcctttatctcatggacaccacagaagaaaatagccgtcttgccggtgaaaaaattaaagtactggattatcccgatggcaccctcgccttcctctatgggcaccggagccttaagtgccaggcatttgataagctggcctgtgtcgaccaggggcagattgttgataacaaacgtctcgggactgtactccgactggctcaggtaaaacaggatgagcgggaaagcgaaggcaaacgggaacgaagcaaaaaatcgcccagccgtaaggctcaggtgcgcatccaggaacagctccgggctatcaatcccgttctggcagacccgagcttgtttgtggcaagttcaaagcgatag

SEQ ID NO: 31740 - DNA, 318 bp, Escherichia coli
atggctgacacctacctccccccgggctttaaaaaatgcaaatcatgtcagcaagttaaaccctttgaacagtttggaaaagagctcaagggcaagtttggcctcaagagtaaatgccgagcgtgtattagcgagaaaaacaaaacgtacgcagcaggcccaggggccgaagtaaagacgcaaaataataggacctaccaggcagaaaacaagactgagctcgcggagaaaatgcgcgttaagcgtgcgaaagaaaaatttggtgatcgctataattcctacctcgcttctttagagtccatgaaaaaactcaaataa

SEQ ID NO: 31741 - DNA, 177 bp, Escherichia coli
atgtataaacttttacccgcaatactagtctttctttcggtgttccttggactaatcgctctactcagtgctatcaaaaatggttctgatgaattggcggtattcctcattacactttcggcgtggttcgctgctttaagtaagttttattcacttaaactgtataaaaatagttag

SEQ ID NO: 31742 - DNA, 354 bp, Escherichia coli
atgaaattaaaaaatattctgctgtgtgcgatgatgtcagtcgcttttggctcctctgctaatactacacataaagttgaaaacgaacctatcccaaacattattcttgatggtaaggttgatgatatttgtaaagatgcaagcatccgaactgaacttaatcatgataaagcaaaggaactggtaaccaccaacctgaagcaggcattaccattaaatacggtaccggataagttggatgaagttgcagaagcctttgtaaaccgcgacaaaggcgcttcagaaacagcagaccattgccttgttaatgtacgtaataaatactgggaaatgtatccctctgaagataagtag

SEQ ID NO: 31743 - DNA, 609 bp, Escherichia coli
atgctcctcccaccaaattttttatctcctgaagaccaggctgagtacgatgcttatatggcaaggttcagcgaggtaaatcactattatgagcattgcactgtccccgtgattgactggttttttaaacaagcaaccgaggcgctgcatcatggtctatggttaccggcctgtacgagctttctgaatgggatcgaaacatcactcagggttacgctgaagttgaaatcaactgttaacgttcagcagtcagttcctgtactggtggacttagatggtacgtcagtaatgagtaacgctttaatgcgaaaggctaagcaggaagggatgccgatagaattactgtcatttccagccgagaagaatatgttggcaaagatagacgctggtaaaaaacctgaagcagatatcgtcaggcttagaaatagtctatgccatggcaacattctggagttcattatgagtgttaaagtcggttctccagatcccatacgaatttttactcctggtaactgctgtggtttagcgcttttactttcggccttatcgaagaaatggacggtaggcttgcatcaatactggatcgacaacaatctgacgtcctgctga

SEQ ID NO: 31744 - DNA, 600 bp, Escherichia coli
atgattattaatgactgtgaagagttatctaaagctaattcttctactgatgctataagaaatctttatctcgataaaatgaaggtggatgggaaagtgttagttgcgaaatttgcacttaaacagttttttcattccgactttggtgactttatctcatttgtcgagaaaagaattacagattgtcttaatgaaactttaaggattatcaaagctgttgaacatggctttgtacgtgttgggcagcataagattaatcgccgtattaatgatgacttaaagttatgcattgatttcaatactgatgattatccggcaaatatgccagatatatatattaagtttaacgatacatttgatgggaacggggcgttatattgtgacaatgatgccctcatatccctctataccgatgttgcttcaattatcaatgtgccggtgatgatggaagtaagattgatcaataaaagagggcgtgttgtctgtgattcttcgcattcaacttacgtatctctcgaaagtaatgaccgatacagagtaactgatcgcacattactaataactgaagcttttgacgattttcgtaacgcgtctcaatga

SEQ ID NO: 31745 - DNA, 456 bp, Escherichia coli
atggaccgcatcaagtacctgaaatggatagctgaagaatcaccaagtacggctcagcagctggtggcctggttaaacagagcaaggcactatacgcccgacatgaaagagcatcaggcaggtgtacagattcaagaaaaggggattgttgtagggcttagacaaagtactaatcgttatcatggagattgtctgaccatacatgtggtacggcttccggaagaaatacaaaacaagggatggtttaagtcttttctgaagctttgctgtgaatcgaatccctggtgcgatgttgtaatagaagacgtgaaaaacccatatttattaagcttttgtaagaaactaaactttactgtattagatgaattttacccgaatacttacatagtaaacacagatgccattatgagtttacctatcccacccttagggagatacgaaacctatctttattaa

SEQ ID NO: 31746 - DNA, 192 bp, Escherichia coli
gtggaaggtattgagacactgagtttgcagcttgatgagaatgaaactatggcccttgctcaattagttaaacgtctgagctggagcgatcttcgtggctgtgctgtgagtgacgaagaagcctgggtaatgaaaagcgcaattgaaaaattacaacaggcgttaagggaagaaggttatgcgcctcgatga

SEQ ID NO: 31747 - DNA, 657 bp, Escherichia coli
atgtttgaaaactacgtttgtaaaatctatgtaagcaatgatcctcattttagtagccatctcgaagcaactgcgtttggtttcgataatggtcagcagcaaaagattctcaccgcagcccatgttgttaccaatgctcttggaaaaatttatcccgtcagcaatacacttaaactttacgtcaaatttcttaaccatcaaggactggtgaacgaagagcctgttctagtcgatttcattctcaatgaggctaatgacagggcagactttaaagacggcattccgtttgttgacagtgcagaaatcgtattaccagctggaatacaacagcctgtaagtagttactttaaggtcctggctcccgcagctggcatgggtacattgggtgtcggatatccaatgaatgagacaacaatttcgacattccctggtgaagtttcaggcatttggcctttaaattgctcaaatcattctccccaacatctcacaactcgctttgtaatagcacatttcaacaccgatggttgctctggtggaccctatgtcgtctccgagaatgacgagcattttgtcattggaagtctggttggaataatgtctggaacctgcccagattcaaatccacacatgtctgttcagtccgctactgatttttag

SEQ ID NO: 31748 - DNA, 525 bp, Escherichia coli
atgagagagccaagaccccgccataccttgcaggtcattcgagtgccttctctggaggttcaggatctggggctgaccagctttgatagctggcttgacgagaacggttatgacaaaacgaatgccagaaataaccgtaccatctgggcgagagaaggcggatggcatctgaaacgttgcagaaatctggaaactggcacggacgatttctggtttatcgctttcgatggtaaaggcggaaagatatacccgctgaaaacccaaagagactaccgggctgcatatcgtaagctggaagcagaaggttatgcacctgcggtcatcgagcaaatgaccacaggcgcagcatataacctggcctatccacgttccaccctaaaacaagctgagacggccaccagcgaaccaaagcggaaacctgacgtagatggggtcgtctcagaaaacggaatctatggtcactcccgtttttgcaacaccgattttgacgacaagttggcttgcttgaatctatccggcgtctga

SEQ ID NO: 31749 - DNA, 1005 bp, Escherichia coli
atggaaaacattgcgctcattggtatcgatctgggtaaaaactctttccatattcattgccaggatcgtcgcgggaaggctgtttaccgtaaaaaatttacccggccaaagttgatcgaatttttggcgacatgccccgctacaaccatcgcaatggaagcctgtggcggttctcactttatggcacgcaagttggaagagttggggcattccccaaagctgatatcaccacaatttgtccgcccgttcgttaaaagcaataaaaacgactttgtcgacgccgaagctatttgtgaagctgcatcgcgtccgtctatgcgttttgtgcagcccagaacggaatctcagcaggcaatgcgggctctgcatcgtgtccgtgaatccctggttcaggataaggtaaaaacaaccaatcaaatgcatgcttttctgctggaatttggcattagcgttccccgaggagctgccgttattagccgactgagtaccattcttgaggataatagtttgcctctttacctcagccagttattgctgaaattacaacagcattatcactatcttgttgagcagattaaagatttggaatcccagttgaaacgaaagttggacgaagatgaggttggacagcgcttgctgagcattccctgcgtcggaacactgacagcgagtactatttcaactgagattggcgacgggaagcagtacgccagcagccgtgactttgcggcggcaacagggcttgtacctcggcagtacagcacgggaggtaggacgacattgctgggaattagtaagcgaggtaataaaaagatccgaactttgttggttcaatgtgccagggtattcatacaaaaactggaacaccagtctggcaaattggccgattgggtcagggatttactgtgccggaaaagcaactttgtcgtcacttgtgctctggcaaacaagctggccagaatagcctgggccctaacggcacgacagcaaacttatgtagcataa

SEQ ID NO: 31750 - DNA, 1053 bp, Escherichia coli
atgaacaacagcaaacatacagtcattgaagtggatactaatctagttgaaattgaaaagggatttaatccccgagaggcggtaatcggagatttgtgttacgaacaagaacctgtcaaatcgatgattgtgtcaatcaaacaagcctttaaggaaggaaggcaggttgatatgatcaaggtcgtaaaaagaaaaggtaaatatttagttcgtcaaggtcatactcgttttcatggcttaaaattagcaatttctgaaggtgctaatattccaaaattatctgttatcttaatcgattataaaaacgaaattgaagaataccttgagaacctcgatggtaacagaagcaatgggctaaatccggttgggcaagctcatgcattagctcatgctgttagtctcgggtattcggttgaagaactagcaatgcgatatcaacgatcaactaccgcaattcgtaatatgctaaaaatccttgatatgccattagagcttcaacgtttgattagcctaaatctaatcaaaaaaacgctcgccattgaaataatgttaaaatattccaacgatcacaaaatggttttaaaacatatagaaggtttcttacctggcgttaagaatattgagactacaacgagcaaaattgtaggcatacctgaacacaatgcagctggagcaggaccagacaccttaaataaaggcggaccagaaaagaaaaattcggcagtcacacgtaagactttgggtattaagcgcctctcgcataagaaaacagaacggctaaaatctgaatttcttgagcttgtggaaagtacacatacggaatctataacgaatactcaaacagaactaaaatttggtagagatagtgcacacttgttcaaaaatgttgatagtaaaaatgtaatattttctgatgatggtgttcaaataatcttgaatgatgaaaagctaaatattttattgtctttacttaacgacgaaaatacagcaatcattctttctaaaccaaaattagaagagcttctggaaattcgagatctccttaaggaataa

SEQ ID NO: 31751 - DNA, 201 bp, Escherichia coli
gtgattaaacctataaagctgactcttatcgataattataatgatttgcttctaactcatgaagtccttaaacgcaacatggaagagttagaacacggtaaacgttttgaccaatttcctgaagggcatgaccactatgaaaaaactgtgaaagaagctgtagcaatcgtagaggcacgtttggaggtgtttcgaaaatga

SEQ ID NO: 31752 - DNA, 717 bp, Escherichia coli
atgaaatctcttttctttactcttgatggtcatatggtaccagcctcagtgaatgtatcccttaacggagatggaaattattatgcacctatcgaaagagaatgtaacgaatgtgcgggcacaggccacaaaggggctgatgtatgtgaaaagtgtcatggggtgcaaacagttggacccattattgaaaaattagtggtactagagccaattacctttctcgataacattccggaactgcgtgttaacccaacactcgaagcatggaaatccagaaaccacgtacttattgagaaagcaaaaaaggctaacactaagttttctaatagtatattggcgcaactagacaataaccgttttttgacagaacgccagctggattgtttctttacaacctttgatgtgatgttgtctgaaactccggaaaatgaacaagaaattttaaaacatagctacaatatcggccaggtcataagcattgaactaacatttactgaagtcagggccgcgtacgcaaaaagtaaagggagttatttttttacatttactggtaaagttagaaatgacgggatcgctttaacggccgataaacaggatcacattttattgggtgaacgttatcatttgactggaaaagtcagaaaattctatgattttgattcgaaaaattatgctgcaataacagtttttaagttaagtaaactccaagacagttaa

SEQ ID NO: 31753 - DNA, 1164 bp, Escherichia coli
atgagtgttttactgacagaacctacacagcaagctaatgacaaggtctttaaaacggcccatgttgccttttcagtagttactggcacaggtcgttacgtcactgggcttaaacagttccgtgatgcaaaccctgaactttgtactgaagtaagtgaccagaaagcatgggctatccacccttcagtaattcaggtcacgccaggcttcaactcccgcgaaatgggaatgggtgacgattactataagctccctgaggttgaagaacacatctacaacatcaagaatgcctacattcgaggtgactatgtagaccctatccgagtacgtgtcattgatggggtaccttttgttcgccaggggcactgccgtttaaaagccgcaatgatggcatgtgatgaagatcatgacatcacaatcctttgcgttgagattaaagaagatgaaattggctgtgagctcgcgaccattgatggtaaccgtggtcttgcgctttctcctgttgcgcttggcgagtcctatcgtcgcctacattctcttgctggctggtcactcgaacgaattgctcaacgtgaaaataaaagcccgacgaccatcagttctcttatccgcctgacaacctgttctgttgttatcaagaaatggattcatgctgacgctatttcgtatgttaacgtgctttcactgatcgatgagctcggtgaaacagaagcaatttcacgtatcaagaagatgatcgcggaacttgagcaggccgatgcgaatggcatcacggtgaaaaaaacccaacatggtcaggtacgagtcagaccttcagacttcaagccagcacggattccgccggttattgccacaaaagccgtagaaggcgtcaaactcatcaccaccagcttattacagaaactgggggatattgaattgccggagatgacagattcaagtgctgacgaagaaatcaacattacgttgaaccgcagtactctggagatgctgagaaatctttcaaaagagatcacagaatcagagaacaagcagcttcgccgtgcggagaatcgtcaggcaaaacttaatggtgagaagccaaaatacccacgtaaaaaaaatgctaagaaggcaggggaagagaccgatcaggatactgacccacagccggacgcagaataa

SEQ ID NO: 31754 - DNA, 252 bp, Escherichia coli
atgagcgtaaacccagaatacaccagggttcagcatgtccagattattcgcgagcgagatgggcagaaggaagttgttcgagtctatgatgaagatggcgacgtggttctgtgtttacctgcctacattcaggatgaggaaataaatcttattctgcgccggttgaatgacgtatattcagtcggatatcgtgtaggtgatgcagcccgccgccgcgccatcaaaaaagcgctgggggatgatgaggagtaa

SEQ ID NO: 31755 - DNA, 429 bp, Escherichia coli
atgtctaataatactgaagtcattagctgtgatttattttcaactctatcttcacttaattttagcaccgaggatattacaggtttgactccggccaactttcgaaagggagctttcttacatgcaaaaatttctgctagccaggccacgcgagcgactgatatttccattcaattactcacggatcgtgtttcaggtgaaatgaactacgtaatagtaattggcaggcacgaaggactcctgcaaagcgaagcaattgacccaaacgctgataagcaataccgggaaaaccgttattctcgccattttatctcagtaaccgatgccaataccaaagccctgaaaaaaacctgcaaggtaatgaaaacatatatcaaagagcaggcatttaagcctaacacctgggggcacagtttcattaagggttga

SEQ ID NO: 31756 - DNA, 513 bp, Escherichia coli
atggcaaaggtcgatcaaacaaaagctaatgctctattgcgagcagcaagaactatgtcgcttggggcaaataaaaatacaatacgaattttgtacggtaatcatgttgctgaaaatatcgattttgagcctggtgcaaaaacaaaactcaaaaaaggtatccggggctggagcaaacgcacagataaccgccgagccttttctgctgttattgatgtcgcagttaactattttggttttgatccaataaatccggaagcgagttttcggcaaattgacttcaaccgaataatgagtgtccttcataatctgggatactttgtatgcgcaccggaagttaataaaataatagaaatccttacttctatgaaagaaattgaagaactaggtgcctgcgaaaaatgtaaacgcccatacattgtgccagtgacaaatgatgctcattgtccacgttgcagattatcttcaactgcttcagccatagagaggtattctcaagaagaattagattaa

SEQ ID NO: 31757 - DNA, 123 bp, Escherichia coli
atgtctgcaaaaggccccatcggtaaattgttggggctttttctttgcgtagttctgatacggtttatcctgtggagcattatggccaccagccagctggtgactggccaacgctttgtatga

SEQ ID NO: 31758 - DNA, 369 bp, Escherichia coli
atgggcgttgatatctgctggcgatttcaaagggaagaaaagcctggtaaatggattaatttatcaagcaattataaaggggaccgatcatatctccactttgcctggctcggatttgatgtagatcgtgaaagggcgagcacatcagcagtttttatccacgcattacgcggattacctgatgatataccgtccgaagatgatgatttattcggtgaacattcatactcatggctgacttcggaagaaattttgtcagccataccacccgataacgccggagaggtgatccaggaatttgtcgaagaagtaaagcgtctccacgtggagaacggcagcgtccgtttcgtctttggatttgaagggtaa

SEQ ID NO: 31759 - DNA, 297 bp, Escherichia coli
atgaaaaccaatctggcctatgcatctaattgctccgattctgtctactcctatatttatcaggcactgcaacaacgctctggtgccgagaatgaaagcctttatcagcaggccatttccagctgctgcacagataaacaaaaaaagaaactggccgggtattatgccggtccatggcagctgctattcaacgcgtggtgtaacaatcgcgtccctaacacagcggtgctggcccttttactccagcagtgcttatctcatttccagtgcgaagaagtgatcgcagcctggcagtaa

SEQ ID NO: 31760 - DNA, 702 bp, Escherichia coli
atggtaattacttattcattatcggaaacgtttaatatgtttttacgcgagattattgcatctggacttgcagttttttgcgcatggtgcgttttgtgtcttttctctgatcaggaacgaggtaaagaggttcctgtttctatgaaaaaaataacttcaaagtcagctttctcctactttatcagttctcaaattgccgcttttattatctccttgttgggttcaatcttaagcacgaaatgggacaacatcgtctggaatgatgaaataagacagttttatctgcatgtaggatttgggctggtagcttgtgtattctgtctgcttgtaatcttgcatgagaaatttatcaaaagaaatttaaatgtttattctggttattgtggttcactggcagttagtctcacaggaatctttgtactttgtgcgttatatctgacattttcattaccatttcattatgaagaacgtctacttaatgatgcatccttggtggcttcggatggcgttgaaaattcagtcgtttttgcagacggtcgttactgggtttttgaactgggcttaccatatttcaaacagtcattgctcaaagaggtaagaaggggcaggtaccagctaatctgcactacagaaaaaaaaccaacatgctggtctggcaaaaaacttcccgaaaaaccaacctctttgaaagctagttcataa

SEQ ID NO: 31761 - DNA, 321 bp, Escherichia coli
atgtgtgatttttgcagggctgacgaaaattactttcatatggcagaatgcgtgtatgaccaactggttaaagagtatcccgtaatgtggctgcgggattcaacccggatcggggcctgctacctctgtcgagaactgctgtcgccggaggggatggtcctggcgatgcagagcgctttccctgcgaagggatggcggctgcgtatttggtacaatgaaaccattgacgaagagatagaaccgcagcgtggagactgtattgagctgtcctccagggcggacgctctgctgtccttcatgtcgttccaggaaaaggtttag

SEQ ID NO: 31762 - DNA, 426 bp, Escherichia coli
atgaagtctaagattagatatgttttatctggttttgttgtgttatgtgcatttgctggagtttataaaatcctaaacaatgttccggttaaacctgaccttttggacttcactggaaacacatttaaaaagacatcactcttcctgccatgtgataaaagctcgccttctttaaacattaaaattgctgataacgagaaaatcgtgatcaacggcatcgcttcaaaagtaacttttgttgaaaaggctgaccccgtcaaaagccctggtttttgtgatgatcttgatctaaacaattctcgccttgtacatacggcatcttacagcctggtgatttctgaaaccaaaacaggatttacactatcaaatttcaagcatcttgccgatgatgaatcattaggcggtatgtggttttatcaaaagtga

SEQ ID NO: 31763 - DNA, 873 bp, Escherichia coli
atgtctaaaaataaagctcgcagtaaagcccttcatcaaacctttagtgaaattattccagagatggataaggcgctaaacaaacagctcttagaagttctgatgaaatatacagaacgtgataatgaactgattgttattttgaatgaggacggcccaaatatcattgaacttaagtctcttaagcctgtgtctttgttggccgaaaagctttctgcttattcaagctattatcatgtggatgttgtggagctcgtggtcaagaaaattgatttcgaaggagcttataagcttcttaaagcttccccagatgtaccactttttaaaagcttaactgaactggataaatatcttgttgaggagtttgaaaaatacggattaaattcatttcttgacgtggataatctggattactcacttgaaaaagccagtgaactcaaaaatgagcagttaataaattgggtttcggacatcatttgcaaacgtgaaaaattaactttacgtaagcgttttgatgtcgcagtaaaggcccactacgaaaatgtagaaaaaatgtatgataccattcgtccgttaatgaaaaaactgggtttcccagaagatctcatgacgcacacctttagtgagttaagcgtttttgaaactaaaggatgggaccatgcaataaaatcgaaaattgagactctcgctaagcgtgaaactcaatatttagatgatgcggctaaagcagagaatcgacgtcttgtaacagagaagttggagaactctttagcgattgcaccaactaaaccaacaagaaattggttacatattgccggaattgcctgtttggtagtctgcacgttcatgtatgtaactaataaatttatttaa

SEQ ID NO: 31764 - DNA, 201 bp, Escherichia coli
atggtccaagacatctatgacattgggcatcagaaggactatgtgcttgatatgagatcaaaaaaatatcagaagcatcacaactccaatggcattcaaagaaatgcctttgttttgttagtacaccaaacaacccaaaattcatgcagttatatcaaagactcattcgcaaaaggactcagccagaaagcatttgcttaa

SEQ ID NO: 31765 - DNA, 261 bp, Escherichia coli
atgcctctactgattttgttttgggatgccaaaaaattagggcttgcattcattctggttgcatttgggaatatcttcgaatgcttcgggttttctgttgtagcagcggttgtgtattggattgcgtataacaaagcagctgagtcaggaataagaggattgctaaaacacaaactctggtggctcggttttttgccaggtaaagcagtttttagtagccgttatttcaacgatccatttatcagagatttgtattcttga

SEQ ID NO: 31766 - DNA, 567 bp, Escherichia coli
atggacgggctggtatcaaatatttccgatgcactggccgggaatgttgtggactggaggaactgggggagttcagttctccgggaagtttcaaaaattctgatgaacgctgccatcgttaacgggctgaagtcactttctaaaagcatgtccggtgccggaggatggcttggtacggtcggcgactggctttccggtgcagtggcaaacgcaaaaggtggtgtttatacatctgcaaatctgagtgcttacagtaacaccattgtggataccccgacgtattttgcttttgcgaaaggtgccgggctgatgggcgaggcagggcctgaagctatcatgccactgacccgggcagcggacggctctcttggagtcagagccattggcaatgtgaatggtggcggtggatttgtttattctcccgtgtatcacatcagtattcagaataaagggagcaatggcgagatagatacgcagtcagccagggggctggtggatctgatcgacagcagggttgtgtcaattatgcagtcatcacgtcgggacggaggattatgcagtgcctga

SEQ ID NO: 31767 - DNA, 708 bp, Escherichia coli
atggtgcgtaaccttaagagtagtgacgatttttcccgtgaactgtcatttctttttcaccggtctataaagattagaaattcaggtttcgcgatatttggtgcgggcctgctgataatgatttttggtctttgcttgtggttgctgtcattacacctctcaccttcagttctggactttgatattgatgtgcccttgtcattcttcaattcatctgaaggtgaagataagttagtggtttcggattttggcgatgcatttggaggcttcctaactacatattctaagttgctattagggattatggggctattagtagtttcttcaactgcctttaaaattttaaagggggaggaaataggtgagatattcccgatgcttctaattgctggcgcttttcttatcggcttgtcagtttttacatctgctttaggttcggaagagactgatgccacttcagcttcgactgtaaaggttatcaagaaatatgtaaaacatgaaaaatacgataaacttgtcgcatatttaaatgatagtaattggccctcaggcgaagaggtatctgtaaactatttaaaggcgcaactacatataaaactcggcaagccagatgtgaagttaacacagaatgttgttagggcgtatatgtctggtgtattacagtcaaatattcccgtgaaagttcgggtaatggtgccaacttactga

SEQ ID NO: 31768 - DNA, 321 bp, Escherichia coli
atgtccaatagcttcgataagccgcaaacgctcccggtacataattctgatgccgaacccttttttccgaaaaaccttggtccatttatcgagcaggtatccggaagggatctggcaatgctcacagaatcagagaaggaaaaacttgcgcacctgatcagaactgggcgtaaatatggagtttctgtcgctatcgttcctgatacagattctgctgagcttcatgaattactgtctaatgccgattccattgaaaggcagttttccatctatgaacgcatccagacgaagattgcgttcacgcggtgtcaggaagcataa

SEQ ID NO: 31769 - DNA, 282 bp, Escherichia coli
atgaaaatcagccagctggaatccgggatgcaggtttggtctgtaacccgtaccaaaatgggaaataccaccatttcaacggtcattgtccaccccgttgtcattattgaaattcatgataaccatgtgattgctcgctggaacggcaatgcaccacgtcggtttggagaaacggctatcaggggctggaagaaggagaagccactgcttgtccgtgagcctttcggaaatgttcgtctggccacccgggctgaaaaaaccgctatgcaggaaaaagagtaa

SEQ ID NO: 31770 - DNA, 630 bp, Escherichia coli
atgaagtcactaatttatgattacggaagaatcaactgtatgagttgcccttctcaatgtgaattaaaaccaaatgcctcattgcgcgtttcgttttgccaggactattgtttttgtacctggccagaagggagtggctatttttctctggggattatggaggggctcctcaaacaaaattataataatctatatttaggctgtatttttgtcgatttttctatcagccatttgcgcttttttactaacgaacgttggatagattatttaattgaaacgaaattaaaaattgttatcgtttgtgataaataccttaaaccattggctaattactggtttaagcattctaaagatatttttcttgttatctatcagcaagatcggctgacgctggcctgtgaaaagttaaaaaagagatttatctatcagcgcgacgccttctttggcggagagtcactctctgaactggagtttgctgtcttaagcgcattgatttccggagacggttgtctgcaactggctgatgaactcaatgtcgatattcgtactatctatgctgcaaagcgccgtgcggaaaagaaaatgggggccgatatcaatacccttttccgattctcacattcgttataa

SEQ ID NO: 31771 - DNA, 252 bp, Escherichia coli
atgactatttacgctgaagagttgcgcatcatgatggatgctattatggatatcattttcgaccacggcacgcacaggcaggcacgcacctttatggctgttttcactctcgacgcggaacacccttaccctgacggcgttcttccgcacctggtcaggatcttcaccactgaccacgcccgtcagtttctgaagcgtatctgccggactgctgtactcagcctggctgagatagcggccgttcggggttaa

SEQ ID NO: 31772 - DNA, 1113 bp, Escherichia coli
atggcacagatctctgatcgtacctatgatcagctcagcactatccaggcgaactatcttcgcctggaaacattgaatgctgctaacgacaacatcaataacgcgacagccaagctacccatcttccggtactacaacatccaggaagatgtgatccacgccagtgccgatggtcaaaagttcgaagcccggcgcgagaccttcaaaacccgttattcgtcgaagtactttggcactcaaaaaggtgtttctgccatgaccttgatcgccaatcacgctgcgatcaacgccagagtgatcggcgccaacgaacatgaatcgcactacatctttgatttgttgatgagcaatacgtcagacatcattccggatgtgctctcaaccgatacccatggggtgaaccatgtgaacttcgcgttactggatctgttcggataccagtttgccccacgctatgcccaggttggcaaagtgatcaatgacatgtttgatgtcaaggaagacaaagaacaccgaattcagctgtgcttaaaaaagccaatcaatacccatcgtattgcgcagcactgggataccatccaacggattgcagtatcacttaagcagcggaaaacaacgcaagccaccttggtgagaaagctctcggagtacaagcgcaatcacccgctgctggaagccctgacggaatacaatcgcctggtgaaagcgaattatctactgtgctacatcgatgatgccagtttaagaaactatgttcagcgcgcgctgaaccggggagaggcctatcaccaactgcgtcgggccgtgagcagcgtcaatggggatcagttccggggcagttcagacgaagaaatccagctatggaatgagtgcgctcgcctggtcaccaatgccatcgtttacttcaactccaggatactcagccagctgttgaccagcttcgaataccaaggagataccaagagaatagatatcgtcaaacaggcatcccctgtggcctggcacaacattaacctcaaggggacttaccacttcgaattgagcgaaaaattgccagatctggaggagcttatgcgctcaatcgagggatatttacccgtcagcgaaaagtaa

SEQ ID NO: 31773 - DNA, 1623 bp, Escherichia coli
atgcctgtacttttcagggtgaaagttattccgctggttttacttctggcaatgatctttgcgtttttacttaactggccaatattgctgcatttttacgagattttgtcgcatttagagcatgtcaaaattggttttgtcatttctattccctttgttctggttgcggcgcttaacgttgtttttatgcctttctcagttcgttttctgctgaaacctttctttgctttactgtttatcactggctcactggtcagttattcgacactaaaatataaagtaatgtttgatcaaacgatgattcaaaacattattgaaactaacccccaggaagcgcattcctatcttaatggctcaattattatatggttcgtctttaccggtatccttcctgccatcctccttttttcaataaaaattcaatatcctgaaaaatggtataaaggcattgcttaccgtttgctctccgtgctggcatcgttgagtttgattgcaggtgttgccgcactttattatcaggattatgcctctgtcggccgcaataactcgacattgaataaagagatcatcccggcgaactacgcttacagcactttccagtatgttaaggatacgtactttacgactaaagtgcctttccagacgctggggaatgatgctaaacgcgtcgtcgctcacgaaaaacccacgctgatgttcctggtgattggcgaaacggcacgcagccagaatttctcgatgaacggttattcgcgtgataccaatgcctttaccagcaaatccggcggcgttatttcgtttaaaaatatgcattcctgcggtaccgctaccgcaatatccgttccgtgcatgttctcgaatatgaatcgcaccgagtacgacagtaaaaaagcatctaacagtgaaaatttcctcgacatcgtgcagaaaaccggtgtctcgctgttatggaaagagaacgatggcggttgtaaaggcgtatgtagccgcatcccgactgtcgaaattaagcctagtgataacccgaaactgtgcgatggcaaaacgtgccatgacgaggtgatgctggaaaaccttgatgatgaaatcgccaaaatgccaggtgataagcttgtcgccttccatatcattggcagccatggaccgacttattacctgcgttatccggctgagcatcgccacttcatgcccgaatgtgcacgtagcgatatcgaaaactgtactcaggaacaattggtcaacacctacgacaacacccttcgttatacagactatgtattagctgagatgattgaaaagctaaaaaattacagcgatcagtacaacaccgtgctgctttatgtgtccgatcatggtgaatcattgggcgaaagcgggctatatctgcacggcacgccgtacaaactggcaccggatcagcagacgcatattccgatgcaggtctggatgtcaccgggctttatcgccgggaaacacatcaacatgtcttgccttgaaaataatgcggcgaaaaaatcatattcccacgacaacctgttctcatcgattttggggctgtgggacgtaagcaccagcgtctataatcctgaccgcgatttgttccgcgaatgccgtggctggtaa

SEQ ID NO: 31774 - DNA, 879 bp, Escherichia coli
atgaagttagctacggacctggtaaaagctattttgattagaaatggtgttgaaccagtaaatataagcgaatcatctaaattatctttgaaacaaccactgacagaacttaaattcagtttatatttgcgaactgagcatttatctcacttcctacccggttatgtttattctataaaagaatgtccactgtcatatgacatcgggatcgaaattcagaaaatcttcgaaagtttacatttgttaaacgaagaatttgaatccctcggttttgtttctgtatggatagaaatgcatcaaagcatttttgaacaaagtcggtttaagaaaagtaactttacttttcgggaggaagaggtcgagcttgctaaagggcttgtttgttctcacaattcacaaataagtaatgcggcttatttctggcttcagcactttgaggagtttatgatttatgttcgtaataagcttatcgacctctttcgagaggcctatgacctgatccttggaatgcagcaagtatttttcattcgggaaaaggaagagctgttgaaaactataagttatggggatgacctgtatgaggtgaaattaatggcggctgagctttactctatcgaacagaacttaaagtgttctgaatcgataagtacaaaatctcaagcttcggcatatattaaccgcatccgtgagtttgtgcgttcggggtggaggcagggctatatagtctgccatcataagcgaagtaatcaaatctcatcattgtcattaccgatgtacttgaaagatacgtcaggccgaagtgctcgaaagcgagtaaaacgtcttatatcttctacagtttgtggtagaaataaagatttaggtcttacagatttttaa

SEQ ID NO: 31775 - DNA, 1233 bp, Escherichia coli
atgacttatgcatccccggctcttcgtcgtaaaccacaggaagtatctgaacactttattaaactcgttcatgctcgaattgctgaagtgtctggctggaagtatatattcgaaagaatacctgctttcaaagacgcttgtgcaaaagccccgagccaggttccttgcccgtttactggcgcagggaaatcgaagtttcgtttccgacaaaaagacctttataccggatgtgcgatccataatgactttccggtaaatgagttttgcgacggaattgatgttctggcgaaatattatgaattaagtaaaacgcagacttgcaaaaagattctctcagattttttcgggatggatctgcatgctccgttaactgacgccgacattgaaaatgaacgacgctataaatcagcagttcgtgccacagaaactcttgaccgagaggaagtggcaaagcgaatgcgaaaacttgatgtgatgtatcactataccggtgaaataaagcctaatactcctgttgctttgtacctccgtaatcgtgggatctcccgcttactgagtcacttaccaaaggatttaggctttaataaccggatctactattgggataaagataagcagaaatcgattatctatccgggaatgattgcaatctatcgtgacacccgaggtcggcctctgactatccatagaacatacgtagacaaaaacggtgataaggcacctgtagaaaatccaaagctgatgatgaagcctcctgccgatatgacaggtggctcaattcagttgtttgaccctcactatgattcaggtagttcgacctggacactgggagtggctgaagggatcgagaatgcgctttctgttgtagaagcgacttcaacaccatgctgggcagccagctccgcatggtgccttgaaaacgttactgttcctgattttttactgcctccgccggatgtaaaatatataaacttttatatctgggcggataaggatattgctaactcacaaggcactcgtgccggtatcgaagctgctcagcgacttcaaagccgcatggttgagtttttggctaaacgatatcccgcatcaaagctgacaattgaagtcttcgaaccagcacaagatattcctgatgggaaaaagggtatcgactggaacgatgttctccagttaacagggcaggatggattcccgattcactgggctcctgaatgtcttaatcagctgtaa

SEQ ID NO: 31776 - DNA, 2007 bp, Escherichia coli
atgaaattagatcttaaatcatcgccgcgccatattaagcgtttacagaatatagcaaaagtcattagcggcttaggcgatgtaagagttgtaatagacgacaataccaaaggaccgtattttgatcctgtcaataaagtttgtgttttaccaaacggcgattatagcgatgatgactttgtcagtctgattgaaggttttacctgtcatgaagctggtcatggtcgctataccgtcagtgaggtttacagtgacgcctttaatagtgttctcatgtcatctgaagggtttacacgcttcgatgacggaatgaatgcagagtttgagagcctcgctgagaaacgtaaagcttatagcagggcaaaacgtcttaccgggcttataaatctgttcgatgatgtacagatggaagagaaggttggtaacgattatccggatgcaaagcggcggcttgcagccacttacgcactgatggttaaagccggaaggatgactcctgatatatcttctcgtccggaaaatcctgtcctatttattgagtggtatctgcttaactcattgcgagtaaaagtccttcagcaggtaggtcacaaagaaaccctcgatccgttttttgactatgcccaaaagatactttctccagtaatttctgatgttgaggaaatttttcatgatgctcttggttgtgaaaatactcagggctgtgaatcccttgctcgtaagaccctggctcttttagagagactgcgggatgaggcaaaggaacaacagcagcagacagagcaggaggagcaggaggcatatgatgaatccgagaccgataccgataccgaatcagaagataaatcgcttacgtcgactgatagtcgtgaggatgattctgaggacgatagtgaaggtcaggcagatacttccgataacgctgatcttgctcaagagggatgttctgagccttcagaacttgctgaagataacgagggaaataatgaacccaccggtggcaatcccacgggtgataacattattgaagacgatactgatgcgattaacccttccgagagtgaatcagatgaagccagttcgactaacgttgaagatgaaagtaacttttcatcggctcaatgggagatactggcagatttgttggatgcctttcttagcagtgatgaggatagcgaagattatcacgatgctttggctaaagagattgaaggtattgcatcaaaagtatccgatgacgtgaaagccgaattcggtgcttctgaatgggatatccctgatctccttatcgatttgaatgtttacaatgaggctttgtctctgagtcattcaatcggtagcgacttgtctgttttacagcaggttaaaatgcgtggccgaaacaaaactcatgagcgtggaattaccttcgatggaaatcgattaattctgtcacaaatgggagttcgtgatgtcttcagagctcaaagcgaatctaaaaatagagggcatgttggcctcgtattagttcgtgatatttcagcgtcaatggctaatgatgaaagatatattcatgccattaagtcagatcttgctttatcgatggccgctgaaagtttgtcaaaaatgcatgtctccaatatagtttttcccttcaaggaaagtgaatttgagattatcaaaacgtttgatcaaagcgttgaggaatctctatcgaaattcactcttggatgtaagggttattatacccctacgggatctgctttaatggcagctgttgatctgttacttgacagccaattcgataggaaaataatttttcttataactgatggttatccgaataaatcggaatttactatcgtcgaagttatggaaaaggctaaatgtaatggaatagaaatcgttggtgttggtattaagactgatgaaataattggttttgaaacggacactttcgtaacagttgatgatacttctttattgtctattgaagtcagtaagctagttcatcaaatactttcttaa

SEQ ID NO: 31777 - DNA, 225 bp, Escherichia coli
atgcttgctatccggttatctgatgagattgagtcccgtctggactcgctggcgaagcaaaccggcagaacaaagacgttttatgcgcgggaagcaatactggcgcatctggaagacctggaggattattatctttcagcagaaactgctgcacgcgttcgccgtggtgatgaagcagtgcattcgtctgaagacgtgaggaagtcacttggtctggacgattaa

SEQ ID NO: 31778 - DNA, 267 bp, Escherichia coli
ttggtctggacgattaactattccgatcgggcgctcaaatcgttacgcaagatggacaaacagaacgcacgacggattgtggattttatgagtttacgcattgcagttgctgccgatcctcgccagtcagggaagccgctcaaaggtgagctgggcgagttctggcgctatcgggtgggagattatcgcgttctgtgtgagatccgagatgacgagcttgttatccttgccgccacgattggacatcgccgcgaagtttacgactga

SEQ ID NO: 31779 - DNA, 351 bp, Escherichia coli
atgtattggttaattgcgttcctagcatttatattccccggtcgatcttttgctgacggttacaccgcttactaccgatgtaatggtactcaggaagcatctcttactgttaaagataacaaactaagtatggttgtaggtctttctaagtttaataggcaactggatacttatagattcaaagaaaagggaatcgaagtagtaatgcagagagctgcttctgatgataactctgaggccataatgtcttttattatgcctgacgttaacaatatgaccttattagttaaaaataacggctacattatcgttaagacaacctgctggttaactaaaaccgacaaacagtag

SEQ ID NO: 31780 - DNA, 546 bp, Escherichia coli
atgttttttaaacggcatttaacggagaaggaaatatacaaggcagcactcccaattgttaggcttcaagggagagttaacacttcattacgttttttatccaaatactcagatgtaaacaaaaatggattaattgcattacatcttaatttattacattttatctcatacaacatacacggtgtagagtctctgaaaatcactcaagcaggcataaacaaagctgtacaacaaagccctcacgcagatgaaataaaaaatattgcgcaggcaataggacgcaaaggacctgagtacatcgaaggattaattagaaacccatgggggaagaaaaatgataatccactaatatttataatgagcattgaagaaagtataaaagaaacccttaactcaggttatatgttatatagagtagctcccataactgagggtgaagcagctgctttcatggatgttcttaaacaattattattatttgaggataattttcgcctttttggtagggacttggtttataaaatagaaaaattaaaaatcagataa

SEQ ID NO: 31781 - DNA, 327 bp, Escherichia coli
atgagagaaagaacaaatatcatgctagatataggattaaagcaatccttacaacggctttcgaataaaaccaaaatgagtctaagtgatcttattaaccagagattatcaggttcactttcagttgaagaacgcattggcgaaaagcctgaatggatgagaaaccttgatccctatctcgccaatcacttttcaaatattgagttaccgctcccttcaccattaaaagaataccaagaaaaaatggatgagatagattcaattattaatgaaatgatggttctaaaggaatatttcagagctaagttttacgacgaaataaaatag

SEQ ID NO: 31782 - DNA, 177 bp, Escherichia coli
atgcagaagccgaagaagaagccgctcgtcgtaaaaaaaagatcctggcatccggcagtgatggcaaatctgatgcgtcaggcacaggaggaagattaccgccgggagcagatggcagagcttgagcgttcagcccggtcacattttgcggatatcggaggagaggatggcggttaa

SEQ ID NO: 31783 - DNA, 345 bp, Escherichia coli
atggcggttaagcgtacccgttttttaggtatccgggtgaccgatggggagtaccagcagctgctggagcgctgcaatggaaggcaactggcagtgtggatgcgggaaacctgtctcgatacgcgcccggcgcggtcgttgcggctgccgtccatcgatccggttttgctgcgccagcttgccgggatggggaacaacctcaaccagatcgcccggaaaattaacggcggccagtggtcaggcgctgaccgggttcaggtggtggccgcgctgatggccatcgatgccggactcgagcggctgcggcatgccgtgctggaaaagggggcagacgatgatcgttaa

SEQ ID NO: 31784 - DNA, 1536 bp, Escherichia coli
atgatcgttaagtttcatccgcgagggcgaggcggcggtgccgggccggtggattatctgctggggaaagaccgccagcgcgacggggccatcgtcctgcagggaaagccggaggaggtccgggagcttatcgacgcctcgccctacgccaaaaagtacacctccggcgtcctgtcttttgctgaacaggatttaccgcccggccagcgtgaaaagctgatggcgagcttcgagcgggttctgatgcccggactcgataaagaccagtacagcgtgctgtgggttgaacaccgggacaaggggcggctggaactgaattttctggtaccgaacacggaactgctgaccggcaggcgtctccagccgtactacgaccgggcagaccgtccgcgcatcgatgcgtggcagaccgtggtgaacgggcgactggggctgcacgacccgaacgcaccggagaaccggcgcgcgctggtgacgccatcttcgttacccaaaacgaagcaggaagccgcagaggctattacgcggggcttactggccctcgcctcgtcaggggagcttaaaacgcgtcaggacgtcactgaggcgctggaaagcgcaggttttgaggtcgtgcgcaccacaaagagcagcatcagcattgccgacccggacggagggcgaaacatccgacttaagggagccatctatgaacagtcttttaacgctggcgaaggacttagagcagaaatcgaaagcgcagcagcagagtaccggcgaaatgctgaaagccgcattcagcgagcacgagaagtctgtcagagcggaactgagcgaaagcgggaagagaatcagcgccgccatccgcgcccacgagcagggtatgagcgcggccatgcagtcgaaccgcctgagcgtgatgcgtatggtcgggcggacatggctgaccatcacgatggtgtcaggactgctgttcgccagcctgagcggggtgttgtggtatcaggggagcctgatagcgtcaaatctggccgaaatcgaccggcagaacgcagcgctgtcgaagctgaacgcgaagacctggggcgtgacgtacctggaagacagcaacggacgttttctggtgctgccgaaggggacggccgtagacaggacgcagagctggacggtcgggaacgggctgtcgaagcagaacgcgctgagactggtgaaggagtaagtgccgatgaccgagctggaaaaacagttgctgagcgcattagagcagctacagcaggactactcgaaaaggctggacgagtgggagagcgccttcggggaatggcggaaaatgtcagggcttatgcaacgggagaacgcggcgctgagcgagcgcgtgacgcgcttgagtcagcaggtggaacgcttgagcgggcaactgcagcgtttgagccggtagtgcagcgtcatgagatggccgtggccgcagaacgggcgcacgagcaacggcagcacgaaaaggaactgacggaagcgcgttcccggcagcgaagctatgacggtccgtcgctgggctga

SEQ ID NO: 31785 - DNA, 129 bp, Escherichia coli
atgggtcttaagccgggtccgaaacgaattgccgattcaacaggggaacctgataaacgccagcgtgacaataaaaaaacgccgggaaatactgacaaattgaaacccagcaaatcttcaaaaaaataa

SEQ ID NO: 31786 - DNA, 633 bp, Escherichia coli; identical to SEQ ID NO: 30074

SEQ ID NO: 31787 - DNA, 837 bp, Escherichia coli
atgaagataaattggaagattatctcaatttcaacattacttttgcatcttcacgcagcagctgcaccacatcaagagaaagagcatagaaaagatgctttttcttctgccgcacagaaaagtgattcacttatatctgctaaagcggagcttataaacggaaggtggtttataaatggtaaatataggcctgttctaaagaccagcatgaccaaaaccaatttcttagaaatcatgaatgtttcaaataaagaatcactttttattgtgataccaaaacttgagtataatatcattgccaaaaataaaatcttactaaatgaaaaaattgcattaagcgaaggcacatccggaaaaagcattgtttgggtcgagccaaaatcaagtctaactatatcgtttataaatgaccttgctaatacgccccttcaggctatcgtttcgatcacaagaaacaacaaagatataattgccatctttggaccggatcagggtaaagggtttactcttcccggaaatacgtctaatgatcaagtgtccgttcctgactattctgacctaaatataaaaaaacttaacatacctcaaagtgttggtaatccagtaaccatcaatcctaaagagaagaattacctcttagttggacaaggaaaatatgaaatcttatctcttcctaaatatcaacatttagtattttctgaacccgtttatattgagaaaagaaaaaatatcctcggtggttatggttattggacgaaagaaacaattctctaccccggtgaatcattatcttttataacgagcgccaaaaacaatctaaggaagcgggatgattaa

SEQ ID NO: 31788 - DNA, 639 bp, Escherichia coli
atggctaaataccctatctcaaataaggcagataacgaccggattcagatccggtctttctggatatccgaaagaaaagcaccctatgtttatagtttcttgaaaaaaacagaactttgtcataggggtgaccaactggatttaattaggtcggctattagtaccgggttggtattaaataatttatttcctgacttggcaaattttataaatggtttaaacgaaagattaacacttgcagatcttaataggtttctgaatgatggaaatactatagatactgaacctaagcctcctattaatgtattgctagagaatgtcttagatcaaaagtttaaggagtatttaacacctctacaattagataattcaaagcaggattctgtttctgtaaaagaaaccttccttgtacaaaaggaacatgcctgctttggtgtgaagattgaaaatgagggaagcgatacctctataccatctgaaagcccactttcttcaggtgcatccaaaatttcaaaagaaaagtccatttcctctgtggtgccagtgctagaaaaagtatcggatgaaaatcaaaccgcctccataagcataaaatctaaagctaaggcaaacaagcgactagcgactttggcaagatag

SEQ ID NO: 31789 - DNA, 657 bp, Escherichia coli
atggatattattgataaagtttttcagcaagaggatttctcacgccaggatttgagtgacagccgttttcgccgctgccgcttttatcagtgtgacttcagccactgtcagctgcaggatgccagtttcgaggattgcagtttcattgaaagcggcgccgttgaagggtgtcacttcagctatgccgatctgcgcgatgccagtttcaaggcctgccgtctgtctttggccaacttcagcggtgccaactgctttggcatagagttcagggagtgcgatctcaagggcgccaacttttcccgggcccgcttctacaatcaagtcagccataagatgtacttctgctcggcttatatctcaggttgcaacctggcctataccaacttgagtggccaatgcctggaaaaatgcgagctgtttgaaaacaactggagcaatgccaatctcagcggcgcttccttgatgggctcagatctcagccgcggcaccttctcccgcgactgttggcaacaggtcaatctgcggggctgtgacctgacctttgccgatctggatgggctcgaccccagacgggtcaacctcgaaggagtcaagatctgtgcctggcaacaggagcaactgctggaacccttgggagtaatagtgctgccggattag

SEQ ID NO: 31790 - DNA, 921 bp, Escherichia coli
atgaatgcgatacaaaagttagttgaatctattcttgttaaaatgggttttgttggcgctgtagtggaaaatatatatttggattcaaaaccatttcggcatattcgatttgtggctgatattccagtaatatcttttctacctcatttggtgaaatatcttaagggcgcagaccatctttactgtggtaacgatgatttgcatcctcttttcatttatttttccgaagcggctacattaaaagcaggccctgtaaatctcgcgaactttcgttttgaagtttctatagcttcaactcatttacgactggtctcagagcagcctgatttgcttatcaaaggatttaaccgggataatctagaatacgtttattaccgctcagatttggcctctaaggatcttatactaggccttgttgaacacggttctcctttcataaaacatctacatggacttatacaaaagcgaattttaaacgagttctctctgattttttctgttcttgaaaagattttagaaagcgcgaagccacaaattcttgcttgcttccatagtgttgattatgaaatgaacgtaaaaataatagccgaagctatacctgaaactgtatctaatcagatagtcacatctgattatatagttaattctatatcagatgcggacaagtttataaatcatgttcgtcgctatttagcaggcagggtaatgaagaggcggatatacgctgaattagatgtttgtgaagaaacatcaaatatttcactagtgaacttaggatgctttacgtctcctctgctcgttacggaatatcaaatgtttaagccacactcttcagggttatatcgaaaagctataaacaactccttaaaacagttcaaaccagaaatgcatttaccttctgaagaactcttttataattaa

SEQ ID NO: 31791 - DNA, 477 bp, Escherichia coli
atgattttctgggcgctgcaacagaagatgatgttcgtccggaggcactgtatcgttttgaaaagatggtggaagaggtggcacgcaacgctgaagccgcctctcagagcgcagcggcagcaaagaaatcagaaacagcagcggcatcgtccaggaatgcggcgaaaacatcagagacgaatgcaggtaacagcgcgaaagcggcagcttcttcaaaaacagccgcacaaaacgcagcaacagcggcagaacgttcagagacaaatgcccgtgcgtcagaagaagcctccgcagacagtgaagaggcttcccgccgtaatgcagagtcagccgctgaaaatgccggagtcgccaccacaaaagcgcgggaggccgcagcagacgcaacaaaggccgggcagaaaaaggatgaggctctgtcggcagcgacacgggctgaaaaggcggcagaccgcgcagaagtcgcagcggaagtga

SEQ ID NO: 31792 - DNA, 333 bp, Escherichia coli
atggagaagcccgacaaagttgctttaaccaatgtgcttactaaacgatatagctctttgccttttcaggtcattgagaagttcgtaagagtagcgattgcagtaaatgactctggtacagaagacagtgtgatggatattcgtcaattagtagcttgggttggcacgtcgatgacgttaaaaacctttagtcttcttgacactttcaaaatagcttttgcttctgctttacctttacatgtggtcgatcttgttcttcaagctatagatctttctcttggcgaagacaaggataaatcgctggagtatttcacagcaaaaaagtcgagttag

SEQ ID NO: 31793 - DNA, 252 bp, Escherichia coli
atggttttctcctcaattcaggatgccttaataaatttagaggaaatcacggatcatgttatcgtttctggtggtggtgaaatatacaaaagcttgatttccaaagtagatactttgcatatttcaacagtcgacatcgagcgagatggagacatagtttttcctgaaatcccagatacattcaagttggtatttgagcaagatttcgagtctaacattaactattgttatcaaatctggcaaaagagttaa

SEQ ID NO: 31794 - DNA, 303 bp, Escherichia coli
gtgctttccgtcgataactttaggatcgtttttgcccatctcagctgcatccgcaacttcatagcccagttcgtcgagggtatccatgatgactttaaaggttttacccttgtcatggctcttcaggtttttaacgttttcaagaacaaagatggcaggtttttttgcgcggataatacgcgccacatcgaagaaaagcgttccctgagcctcacattcgaaaccatgcgcgcgcccgagcgagtttttctggcactgttgcaaatagtcggtggtgataaacttatcatccccttttgctga

SEQ ID NO: 31795 - DNA, 393 bp, Escherichia coli
atgggattcccatcaccagcagccgattttgctgaaagcagaatttcgcttgacgcacaattcatcaaacgaccaaccgcaacatatttcatgcgggccgcctgctcacatctccgtgaggggattttgcaaggtgcaatgctggtggttgattcatctcttccaccactggatggttctctactcatatgtgccgtagagggagaatttcgcgtaaagcgataccgcaagcatcctcgcccacaccttgaggatctggaaagcggaagacgtgagtcactgccagatgatgatgacagcagctattccgggagtcaggccatattcggggtaatcacatacatcattaacgatgccaggagtggggaatttgatgattgcccggtgatttaa

SEQ ID NO: 31796 - DNA, 249 bp, Escherichia coli
atgagcgactggaatattgcagccaaaagtcaggaagaacgggataaggttaacgtagatctggctgccagcggtgtggcgtacaaagagcgattgaacataccagtcatagcggaacaggtggccagggaacaacctgagcacttgcgtgcatatttcatggaaagactacgttattaccgcgagcagagcgtgaaactaccaaaaggaagtgatccggtatatcaaaaggcagatccacaaaaataa

SEQ ID NO: 31797 - DNA, 234 bp, Escherichia coli
atgagaataaaacatttgaatatgataaatatgaatataaatatgaatatgatgaaagaagccattgatgttttgataaactctgaaaaacatattctgattataggcgaaagtggaactggaaaatcaacacttttaacagaattgctaatcaatgacactgacgttaaacattttgatttctgtgatatttatagaatcaaaagttgttcagtttattattcgatttattaa

SEQ ID NO: 31798 - DNA, 996 bp, Escherichia coli
atgaacattgtttcagaatttcttgagaaagtaacaaccattgttgaatccacagcggcgacgaacgccgctaaggtcgcacaggcaatatctcctacattttttgcggctatagccttatacgttatttatctaatatatgaaatcacgtatgcccaacgtgacatccttatgaacgaggtgacgaagaatatcggtgcattcgccctggttggtgcattcacttattcagcgccttattacagccagtttgttattccttttgtaatgcacgctggctccgacctttctgctgctgttactggaggttcaggaactgcaaccagtgttgataatttgtggaacgctctatctacgaatttaaacaacttccttgatacaagtatgagtatttatggaaagttccaaattgctgagaaaatgggggtttatctagtatgggggattggctatatcggcggaatgcttctcatctattacactactgttttcttgacactatcaactttcatggttggaattcttctttccgctggcattttattcatttgtttcgctctattttcatcgaccagaaatatgtttactgcatgggtcggcagttgtctcaactatatactgttaaatttattctatagcatatcatttagtttcttaattagtttcgttgaatcagttgtccctgttaatggagatataaaactatctattgtagtttactttttccttattactattatttccatattccttatagaacaagttggcacactctgttctacattaacaggtggggtaggtataaatggccttacatcagccgctaatggctttggaggtaaggttgcatctggttttatgcgagcatcaggactccgatctttcaccaatggatttgccagcaaaatgccaaatccattctttaatgcaggaagtcgttctgcatcagcattagttcagggattaaaccgtggaagtaaacttaaagcggggtga

SEQ ID NO: 31799 - DNA, 444 bp, Escherichia coli
atgactcaactaatcccagaaaagatactggaaatcatagatgatcatgatcgtgcagaaaaaaagcaacgcaacaaaatcggtttcatttatttatgtctctgtttagcaataattggtgtggccgcgtatacctttatatcaacgtttagcattaatgtggtaacaatcatcataatgcttttcggtgtgtttatgattgtgatttttaagagctatttagactcatggagtgggataattcttagcagtgaccacatattgtccatactcgataaaaccaaagattacccagaaattaaacgtatagttattaatcgtctgctctccggctcaatactcacgggtaaagatgaagagtacatatacagccaactggaaaaggcccaacaaagcaacgaacgtgaaaagagattgcaagcaattaaagagtatacatcgtaa

SEQ ID NO: 31800 - DNA, 321 bp, Escherichia coli
atgaccactttaaccgacaaagaactgattaaagaaatcagagagcgtataggcagcctggacgtccgagacaatattgagcgtcgggcttatgaaattgctctggcatcgctggaagcagaagcgccaaatttgcctggtggtttcacaattgaagaagcaaaagaattacacgaaaatctggtaaaaagtcacgtaagcaaggctttaagtggcgaaaaaatgaaaaaagaaaatcgtgatgccgatttacgctggattcatggcgtaatagttcaggctgcgtggtttgtgaaagcatcactagggcagaacgcatag

SEQ ID NO: 31801 - DNA, 441 bp, Escherichia coli
atgactacttttaccgacaaagaactgattaaagaaatcaaagagcgcataggcagcctggacgtccgagacaatattgagcgtcgggcttatgaaattgctctggcatcgctggaagcagaggcagttatgttctgtatatcaggacaaaatgtagattcagaagaacatgtatcaaccagcaaagcggttgttgatgcctgggttgaagaatggaatcaggttgacggaagtcctggcgaaccactgtacaaaactatgccactctactatcacgctgccttgccagcgccggtagtgccggaagaagcaactccggaaaacgtagaaatgctctctggctatgtttccacgtacaaattaaccgatagcgagcgcgatattgctgccgaaatatggaacgcctgccgcgccgctatgcttcatgggaaaggagagtga

SEQ ID NO: 31802 - DNA, 753 bp, Escherichia coli
atgaaaaactcaatcaatttcatccttcagggtaaaggtggtgttggaaaatcattcgcgaccgcaatactggcacaatactttattgatgaaaatcacatggataatatcgtagtcggtgacacagacccggttaatacaactacggttaaagtaaaaagattaaatgcagatttgatacaaatcactgaaaacagcaaagtaatacaatccaaattcgatccaatgttcgaatcaatgctgaccaatagtcagaatacttttgttattgacaatggcgcatctacatttttaccgttaattcagtatttcaatgataactgtgttatggacatgtttgaagatgtagaacaagacgtttatatccatactgttatcgttggtggacaagctcttgcggataccttgcagggatttgaagaactgaaagaactggttaaaggaagtaaggtaaaacttattgtctggataaatgaatttcagggtattccagcacttgaaaatatcccattgatagaaactaaattcattgaaaaaaacaaggatgtaatcgctggcgttgttgttattcaggacagaaaaagtgatgcctttgcctctgacatcaaagagctaacagaaaaatcactaacactgaaagaagctcttgagtctgaccattttggattaatggctaaatcacgattaaaacgagtcttcaatgacatttacaaacaattagatagcatctatgacgatgaacacggtgaataa

SEQ ID NO: 31803 - DNA, 444 bp, Escherichia coli
atgtttttcctctacgagacctacaatttcttctactacctgataaagttaattgtcattcagccacaatatatttgtgtctatatgatattcttttttttcaatgcagggatagcatatagcatcaccaatgatatcgaggatcaagtatgtcgatggcttttattcgtaagtatgttacatgctctgatgattccccccgcagttatcatgccacttatcatgccaccaaaggaaatacttcaggaaacagagaaaaggcaggaactacatgaatcaatacccaaaacatgcaaattaaaggcactggatgctcaacaaggtggtttattcggcgttgataaagatgaatgggtattccctgacaataaatcattctatctgcctgaaaagtaccgtccagaaaacaggattacggaactagccatgatgaaagaaggataa

SEQ ID NO: 31804 - DNA, 249 bp, Escherichia coli
atgcattcttcttttggtttgccatatcctgctggtcactggatgtattcgttatacgatttactcgataattcagtgttcgtggtttgtttctttgccttctgggtggcaacgggtcaatttttattaagaactgtacacagaaaatttaatatacctgaaatggttgagttttttatcatttttttattaatgatactaatgagtctgtctttttatttttgcgcaatattaaagacttatctttaa

SEQ ID NO: 31805 - DNA, 570 bp, Escherichia coli
ttgacgttttgcggggacctgccttttgttccctctggtattcaccatcacctgtttgagaaccctcgccgcaaggggcatcactgccacggcctgacgcacctgtcctgggcagaacgcaaaattttttaccgggttttgggtaaaaaattttgtgggctgttcatttaccctggacagtcagtgcggcaggttgtggctgtatcagcccccggcgacaggggcttaaacaggtgtatggcaccggacacaacaacgggcaggcacccgccgcaacgacgaagagcgcgtgcgcgaaacggcgttgcccctcacatcccggcggccttttgccgggatgccaggagcgcaggccacggcgcgacagaggcggcgcgaccgttcggtcgctgcaagcccggggttttcacgcatcggaccgtagcgacagcccgaaaccgcgccagcgggttcggcggagactggcaggtgcgccagcagctgcctgtcggagtcgggcctgacgaccggatgccgccaggcagccgggagccgaaggtgcgcccggcagacaggacaacactgcagtag

SEQ ID NO: 31806 - DNA, 1362 bp, Escherichia coli; identical to SEQ ID NO: 21162

SEQ ID NO: 31807 - DNA, 996 bp, Escherichia coli
atggcgtctttaaaggatgtggccaaactggccaatgtatcgctcatgacggtttcacgggtgctgaatgacccgaaacgcgtaaagcctgagactctggctcgggtgcaggaggcgatcatgcagttaaattatgtgccagacctttctgcccagcagattcgtcgtgttggcacccggaacaaaacgattggtgtgcttgcgctggataccgtcaccactcctttttcagtagaaatcacgctgtctattgaagaaaccgcgcgggcgtatggctggaacagctttgtggtgaatatgtttaccgatgataatcctgacgatattgtcgacctgctgctcgcccatcgacccggggggatcatttttactaccatggggctgcgtgaagtcagtattcctccccggttactggagcttccttgcgttctggccaactgcgagaacaagggagagccggttgccagctatatacctgacgatgaacatggccagtatacggccgtacaggcactgctggcagcaggatacagccgccctctatgcctgcatttacccgtcaaccatctggcgacgcgtcgtcgtcgtcgtgggcttgatcgcgcctgcagggaagccagtatcgatcctgatacgcttgagcactgctatatgcaattcggcgatgagcactaccgagatattccggagatgttgctggcgcatatcgaacaggggaaaccgcgatttgattcggtcatctgtggtaacgatcgtattgcatttatggtgtatcaaacattgttaacgcagggtatcagaatcccacaggatattgccgttcttggctatgacaatcttgtaggcattggaaacttatttttacccccattatccacggtccagctaccgcattatgaaattgggcgcttaagtacactgcacattatcaatggtgacacccaccgggataaagtgatagttgagagtccctggcttccccgcgagtcaatctag

SEQ ID NO: 31808 - DNA, 1239 bp, Escherichia coli
atgaaaaaacggcctactcgaagttacatgctgctcagcgctctgctgttctttttctttgtgacctggtcctcatcaagttcactgctctcaatctggcttcaccaggaagtggggctaaaagcatcggaaaccggcattattttttcagtattatccgtctccgcgctcttcgcgcaggtctgttatggctttattcaggaccgacttggtctgcgcaaacatttgttatggtttatcaccgcgttgttgatcctctccggcccggcttatctgctttttagttatttgctgagcgttaatattctgctgggcagcgtattcgggggcttatttatcgggctgacgtttaatgggggtatcggcgttctggagtcctataccgagcgcgtcgcgcgtcagagtacctttgagtttgggcgggcacgcatgtgggggtctctgggctgggcggttgccacgttttttgccgggttactgtttaatatcaaccctgaccttaacttcctggtggcttcatgctcagggttaatcttcttctgcctcctggcccgattaaaggtggccgcgccggcaagcatggagaaactcgaaattggcgctaaaaaagtttctctggaagacgccctgcgtctgcttactctgccgcgcttctgggcactgatattcttcgtggtcggaacctgcatttacggcgtatacgatcagcaattcccggtctatttctcatcacagttcccgacattacgcgaagggaacgagatgtttggctatttaaactctttccaggtctttctcgaggccgcaggtatgttttgtgcgccgtggctggttaatcgcattggtgctaaaaatggtctgatattcgcaggaatggtgatggcgctgcgcatgattgcttcagggctggtggaaggccccctgcttatctccattaccaaactgcttcacgcggtcgaactgccaatattgttagtcgccatatttaaatacaacagtctgaatttcgacaaacgtctctcctccaccatttatctggtgggatttgcctgcaccagctccgtcattggtaccgtattgtccccgctggcaggctttagctatgagagatttggcttcgcccaatcctatctgatcatgggcatcatggtgttcagcaccacgtttatttccattttccttttgcgctcaactaaatcctcatctgagccatcttttctgcagcaaaaagctgtgtaa

SEQ ID NO: 31809 - DNA, 1434 bp, Escherichia coli
atgacatccttattagaacaggctgaacaggtgcttgaaaaagcacaatccgggattaatccgcgctggtatccgcgctatcacctcgcccctcgcgcaggctggatgaatgatcctaatggcctggtatggtttgacggctggtatcacgccttttatcaacaccatccctactccccgaaatggggtccgatgcactgggggcacgcccgaagcaaagatctggtgcattgggaacatttgcccgtcgcgctagcgccggaaggcccggcggacaaagacggctgtttctcaggttccgccgtggtggatggcgatacgctggcgctcatctataccggacataaatttcacggcccgtcggacactgacgacaacctctaccaggtgcagtgtctggcgaccagtcgtgacggcatccattttgaacggcacggcaaggtgattgatacaccgcccggactgcatcactttcgcgatccgaaggtgtggcgcgaaggtgagttctggtacatggttgtcggttcccgcgtggaaaataccggtcaggtgcgcctgtaccgttccaccgatctccgcgaatggcatgacgaaggtattttcgccgaggctgatgaaggcaagggctttatgtgggaatgcccggatttcttccccctgggagagaagcgtgtcctgatgttctcgccgcagggcatggcggcggaagggtatcactatcgcaacctgttccagagcggctatttacttggggactggcagccaggtcaaccgttcacccacagcggacaatttactgagctggaccacggccacgacttttatgccccgcagagtttcctgaccccggatggccgacgcattgtcatcgggtggctggatatgtgggaatcatcgatgcccgaacagcaggatggctgggccggaatgctctcgcttcctcgcgaattaagccttgtcgatggtcgtgtgagaatgaaacctgctgccgaagtgaccgcgctgcgtggcagctattatcccacgcccgtccgctgtctgaacaatcagaacgtccttgtcgcggcaaatgccgacgcggtcgaagttcagttggcatgggatttgagcgcatcgacggctgaacagtttggtatcgcgttgggcgacgggttgagaatttacgtcgatgatcaggctgggcgtctggtggtggagcgccgctatccggaatattcgctggaaggcactcgcagtattccgcttccagcagacagcgttctgtcactgcgaatttttattgaccgctcatcggtagaagtttttgttaacgatggtgacgcttgcttaagcagtcgtatttatccgcagccgggcgagcgtgatatttcattgtttgcaaatctggggaaggcctcattatacgatgcgggatactggtctttagataaataa

SEQ ID NO: 31810 - DNA, 1194 bp, Escherichia coli
atgctggcattaatggtgacattagcagcatttcctgccattgctgaagacgttacaggaaactatcaaagctattttcaggatgaatcagacaccaacggtacgagtgtttcattagccaatcaaggcaatgaaaaatcatcccttagcgcttcatcttctccggttgctgcaggtcaaaaacctgaactcacgacctcgtcaaagccagtgacgttatcggcaccaatggagaataagaaaactgcagtagaaaaacgtcctaaaggggataaccctgaagatgtcagtctgttgcgtttaaggcaggaagatccgccggttcactggaacagtattggtcgtaacatggaagtgggtagcttgcatgggaacattggatctcagatagaaattgacgatgttcgctggagcaataataagaaaaacagcggcaagtttaaactcgccaccattcaggcttttttaaggcacgatgaattgcctaactggtatttcggtttctggaatgccagagaagacagttataaaggacagttcagtaatcaggactataaaggcaccaataccatcaatgaattttttgtgggccatattttcgaaacctggcggggtaatatcggtacggaagtcatggtcggctccgaaacggcaactaaacgctggaaaaaccggttcaaagtctggcaggacctgcgactgtccaacaaatggagcctggccggatacgcgtatggcgagtatcagcctcaggggaacgaaccggggaatggcgatctggagcagtacattttcgaaattgagccagccattcaataccgcgtgaatccggatctcggactctatttgcggccctattattaccataaccgccaggagcgtcagagctggggcgacattgtagaagaagaatggaaagtcacggccgggctctggcgaaactggtatccattattaacctccctgtatgttggatttggccaggacaaaatagataacgccagcaatgccagcgaagttttctatgacggccgttataagtttatcggtggaacgctgagttatccggtatttggtgaggtgcgattatatggtgaattcaaggcacaatttacgaaagaaaccggactttggacatcaaccggtcactcatggaatccgtttaccgtggttggcgtgaattataacttctga

SEQ ID NO: 31811 - DNA, 1494 bp, Escherichia coli
atgaaaaaattaatagttgcggcatctttcgctctgcttgcgctttcgctcggcaataaccctgcctggtcacagccttcgaaagagacattacagaataaaagcatcacccatattaatggcttttttccgagggttgaaggttcattcgtgggcgaccctatgcccgtttttaacgatggcaaatttgatatttattatcttaatgatgtccgaggcggcagcgatctgggggtacatgcttttcatctcttgtcgagtgccaacttgtatgattatcagaaccattcggaagtgatcccctacgttaacgacgttgacgatcctgaactgttattgggaaccggttcgattattaaagtcggcgatacctggcatgcctggtacaccgcacacaatgaaaatgtgttcccggttgagtctgttatgcacgcgaccagtaaggaccgccttcactgggtgaaacacccgcaggacaccctgttacccggcggtaactatcggggtaatgatttcagggaccctcacgtcgtttgggttgaggaaaagaaagaatactggatgttaattactacgcgcagtaatggtcgtggggttattgcccgatacagttcaacggatttaaagcactgggaagatcgcggcgtattttttgataacgacaccatcaccagcaatgccaacctcgaatgcccgacactggtttacttcaacggacgctggtatctcagctttagcgaccaatggccgttacgcctgacacaataccgggttgcggacaatccggaggggccgtggcggaaactggacaattatgtggtcgacggctcaggtttttacgcgggtaaactggttctcaaaaacgatcggctgtttgttttcggctggatcccgacgaaagccggtaaccgtgacagcggcaacattgattgggcagggaatctggttgctcatgagctcaccgcagatgcccagggccagctcaacagcatcctcccccaggagcttcagaaggtcatcagtgagaatcctggcccggaaaccaccttgacgagcactaagacactcaaaacggacacgtcgttcggccccttacagtcggcgctgtacccggccttgcctgagcgcggtgagttgagtgcaaccatcgatgttccttctgccggaatggtgatgagctttggtctgaccgacgacagagtcagtgatgcgatgctgaacgttgtgttcaataagagcaaaggaaaagtctattttttcaacgcgccgctagcgtcgattcatcaggctaacgcggaatcctgggtggacattccgatcggggaaaaaattgagttacgcgttctcatgcaaaactcaattgctgtcttttatataaacaacaaagtggcattcagtacccggatgtattccatgcaggagaaaccgtggagtattagcctgcctcaaaacgaccattttcacgcgacgttgaaaataaaagaaatgatttaa

SEQ ID NO: 31812 - DNA, 1014 bp, Escherichia coli
atgaaaaactatcatgccctgtctgttatttttactcttatgttacccgcgctggcgaatgcgagcatgagcatcatgaaggatccgtctggaaaggttatcgccgtggacccgtggtcatatcttgatgaagatgttatgtggacctcagcccgctcctccaatcctgccggtggccgcgttcatggccaactgaaaatgaaatatgccattgaggataataactggcgtaacagccatttccacaacgggaatgattcgctgacgtttgtacaaggtgtgatgcggcacgatgcgttacccggttggtatctggctttctctgagggcagaaccactaactataacgggacgtgggaggatcagtcttacctcagccaaaaccagtggactcagttgatcatcggccatgaatatttttacaagcgtctgcgctatggctgggatgtgatgggaggaagcgcctcaatcgaagaccgctggcaaggccgcgttaagttctttaccgatcttcgggttacagataatttctcattctttaactacctgtatcagcagatcgatcaccggcgcagcggtgggtcgcaaaacgaccgtgacgtgcgttcatttcagattgagccgggcgtgcaatacattattaataacaacaccggtgtctggttccgccagcagttcgcatctgccattttagacagggcgcagtggggcgatatcgacgaaaaaagctggaccacgtcagtcggcgtctggcgaaactgggggaagttatccacaacgctcagcggcggttatggtcattataagaaatacaatgcgcaacctgaggatggcgaagtctttcagaatacccgcaatcgcttcctgaaggtatcggcaaattatcctttgacctctcgttttaccgtgtccggagaagttactggttcgttgatcaaacagaacggaagttgggtcactaacggtgaggccattaccactgagtataagctgatgctggattataacttttaa

SEQ ID NO: 31813 - DNA, 963 bp, Escherichia coli
atgaatatctggactcttggcgatgctgttgttgatcttctaccccttacagatatgcaatttcgtgcttgtgcaggaggtgcgccatttaatgttgcgataggtactgcacaattgaaatgtcgtaccggctttataggtcgcgtaggggatgacgattttggccatttcctgagaaaaactctcgaagattcaggagtttctacacaatgtatccaaatggataaatatcatcgtacaagtacagtactggtttctcttaaagatcagggagaacgtggttttacatttcttacgaacccttcagccgaccaatttctaacacaagatgcccttccagcttttagtgatgatatcctgcatttttgttcacttgcgctggttgctgcagattgccgcacgactttgactaaagcagtccaggaagtcattgaccacggtggacttatcagctttgatgttaatttacgagaccaaatgtggcgtgataaggaagaaatgtttgcgacagtgagtcaattcgctgaaaaagccgatatccttaaactctctgaagaagagtggtactggttaatgggtacacatgattatacagaggcgttagaagcactcaaaacccatcctgccagattaaaagtggtcacctttggtgcgagaggttcattggtattatggcaagatatggtgatacatttcagaggatttaatgttaaaagtattgacacaacaggcgctggagatgcttttatggctgggttacttgccagcatcgccaataaaggtttgccaatgaattttccagaacttcaattagcaatcactcaggccagtgccaccggagcgctcgcaactaccaaaaaaggtgcacttaccgcccttcctgatacagccgcactggaaacgttcattaatcattttccattaccgggctatgagatccttggagcaaccgctacggtgtaa

SEQ ID NO: 31814 - DNA, 816 bp, Escherichia coli
atgcagagcgagataatcacgcagaaaaatgggaaaggtatatttgatcgaaaggcttggttaacagagtctaaaaaactgtatttatctgcgaagctgttgagaagtgaaggtgagcgaaacaaaaaattgcttcgggcagcaagtaagaaatctcctattgttcatgaatacatcgatatcgcatcggcaactgatcaaactagcagacttatgttggggtatgcttttgaaatgttgttaaagtcagcgattcttctaatgaatctcggtgcgagaaaaaaagctattgaaaatgagttttgtaattatgggcataaacttgattgtatggctgttgatttaggtttgccattaaccgttgacgaactgaagttattgaaagttgcgtctcgagatatagttttaaatgctcgatatcctattggaatagtggatgataataaatatataacagagttgaatgaaagaaatattcagttggcagatgaaaatatttttagggatatggtcagtctgtatgacaaaataaaaagtatagttgctaagtttgataatgatgtagcgaattgtgcaaatttcaatatgcttagattgagtgagtttactctctttatgcggaatggtggtggactatcatcaagagcaatagttatcttttcggataaatttccagaagtcagtaaacgcaagtcatatttaaaaaaagctatcgaagaacatgcaggcaaagtggcttttttatatacttaccgctggtcttcgttttcattctttgaagacacaggtaaaaaacttatcccgcttgtggagtag

SEQ ID NO: 31815 - DNA, 630 bp, Escherichia coli
ttgcggtgcatatgggatcgtgcgatatgccggatggtgaaaggttggagggaacggcaacaactcacccctcccagtgaagggacgggtagtttgccgctctcgatatgccggacggagccaaggccatcgatcacggggcgcgtcagtggaagaacccgcgcctgcgtgacgtatgcgtcttcgccgcaccatctcacccgtcacgccaccacataccgggaactgccgccaaggtctaactcaaccaatctagccgcgctacatacggtttttgtggcaactcatcaggtgtccgctgtcgatgaaactctctgcgccggtagcggaactctcacgcgtgcggtcgccgtcgtcacagctcccccaaccgcaaacggtctttgcaaacacgcaagcatctgcaaaaaaaggatttttttcgggtatctgggaggctgtgcggcggaaaaattcttgaagaatacagaaggttcatgcaaactgaatgaactggtttctgtcgctgcgaacaacagactccacaggaacattgaggagctcgaaaacctcaatgaacccgaagaagctcgcctaatggcgggcttttttcgttctacgctccccgacgaaagatcgcaagtgaaataa

SEQ ID NO: 31816 - DNA, 498 bp, Escherichia coli
atggaaagcgcaaatctggatttagaagaaaataaagaaattgccagtaagttcgaacgtgcattaggtatgggagcaacgcttgcagagctgcatggcataaccccggatacccttgaaggcgtttatgcttacgcttataacttttatgaaaaaggaagacttgacgaagctgaactcttttttaaatttctctgtatttatgatttccaaaattataactatctaaaaggatatgccgccgtctgtcaattgaagaaagattatcaaaaggcattcgacatgtatcatatctgtttaatgctatctcccgataacgatttctctttggtttattatatgggtcaatgccagatgggcttaaaaaacattaaaatggccactgagttatttaatactgtcgtaacctatagtcaaaatgaaaaaattaaagagatggctactgcttatcttgaacttttgacagccaataccgaagaggaagttcgaacagagtga

SEQ ID NO: 31817 - DNA, 942 bp, Escherichia coli
atgagcactaaattaaccggctatgtatgggatggttgcgcagcgtcaggcatgaaattatccagtgtggcaattatggcccgcctggctgatttcagtaatgacgaaggtgtgtgctggccatcaattgaaaccattgcccgccagattggcgcaggggtgagtactgtaagaacggctatcgcacggctggaagcagaaggctggttaacgcgtaaggcgcgtcgccagggtaaccgcaatgcgtcgaacgtctatcagcttaacgttgcaaagcttcaggctgcggcactttctcaactgtcagattctgacccgtcaaaatctgacgcatcaaaatctgacccgtcaaaatttgatgcgtcgaaatctggcaaaaaagcgggttttcacccgtcagaatctggcggggatccgtcagtaaaatcaaaacatgatccgtcagataaaaaaccttctcgtccggacgcttcgcaaccggacacgcagaaggctgaacaggattttttaactcgccatcctgatgcggttgtattcagccctaaaaagcgccagtggggaacgcaggatgatttgacctgcgcacagtggctctggaaaaaaatcatcgccctgtacgagcaggccgccgaatgtgacggcgaggtggtacgtccgaaagaaccgaactggacagcttgggcaaatgaaattcgcctgatgtgtgtacaggacggtcgtacccacaaacaaatctgcgagatgtacaaccgtgtcagccgcgacccgttctggtgccgtaacgtgctcagcccgtcgaagctgcgggaaaaatgggatgaactttccctgcgcttatcgccgtccgtcagcacgtacacagaaaaacgcgaagacccgtacttcaaagccagttacgacaatgtggactacagccagatcccggcaggattcagggggtga

SEQ ID NO: 31818 - DNA, 315 bp, Escherichia coli; identical to SEQ ID NO: 22722

SEQ ID NO: 31819 - DNA, 168 bp, Escherichia coli
atggttatcctgaacaaactcaaccttacgacctactgcttcttcaaaaatcctctgattaaaactctcaaaaaagaagccacgttcatccccaaaaacttttggttcaaaaatcagcacatcaggaatttcagttttaattacgttcatcttattaataacctttaa

SEQ ID NO: 31820 - DNA, 2559 bp, Escherichia coli
atgactatgttccagtattacaaacgatcacggcattttgttttttcagcatttattgcttttgtttttgtcttgttatgccagaacacggcgtttgcacgggcgtcatcgaatggtgatttaccgacaaaagcggacctgcaggcacaacttgactcactgaataaacaaaaagatctttctgctcaggacaaactggtgcagcaggatctgacagatacattagccaccctcgataaaatcgatcgcgtaaaagaagagacagttcagctacggcaaaaagtcgctgaagcgccggaaaaaatgcgccaggcgaccgcggcgttaacagcacttagtgatgtcgataacgacgaagaaacgcgcaaaattctgagcgcgctttcgttgcgccagctggaaactcgcgttgcccaggcgctggacgatttgcaaaacgcacaaaatgatctggcgtcttataacagccaactggtttcgttacagacgcagcccgaacgcgtgcaaaatgcgatgtataacgcttcgcagcagctgcaacaaattcgcagtcgtctggatgggactgatgtcggcgagactgccttacgtcccagccagaaagtgttaatgcaggtccagcaggctttgctgaatgccgagattgaccagcagcgtaaaagcctggaagggaacactgtcttgcaggataccttgcaaaagcagcgtgattacgtgacggcgaacagcgcccgtctggagcaccagttacaactgttgcaagaagcggtaaacagcaagcgcctgactttaaccgaaaaaacggcgcaggaagctgtctccccggatgaagccgcgcgtattcaggctaatccgctggtgaagcaggaactggaaattaaccagcagttaagtcagcgtctgattaccgcgactcaaaacggtaatcagttgatgcagcaaaacattaaagtcaaaaactggctggagcgtgcgctgcaatcggaacgtaatattaaggagcagattgccgttctgaagggcagtctgctgttgtcacgtatcctgtaccagcaacaacaaacactcccctcggcagatgaactggaaaacatgaccaaccgcatcgcggatttgcgtctcgaacagtttgaagtcaaccagcagcgtgacgcgctgttccagagcgatgcgttcgtcagcaaactggaagaaggtcacaccaacgaagtcaacagcgaagttcacgatgcattattgcaagtagttgatatgcgtcgcgaattgctggatcagcttaacaaacagttgggtaatcagctgatgatggccattaacctgcaaattaaccagcagcagttaatgagcgtatcgaaaaatctgaaatccatcctgacgcagcaaattttttgggtgaacagtaaccgcccgatggactgggactggattaaagcgttcccgcaaacgctgaaagatgaatttaagtcgatgaaaatcacggtgaactgggaaaaagcctggcccgccgtattcatcgccttcctcgctggtttgccgctgctgttgattgccgggctgatccactggcgtctgggctggctgaaagcgtatcaacaaaaactggcttccgctgtgggttccctgcgtaacgacagccagctcaacacaccaaaagcgatccttatcgacctgatccgcgcactgccggtgtgcctgattattctcgctgtcggcctgattctgctgactatgcagctcaatatcagcgagttattgtggtcgttcagcaaaaaactggcgattttctggctggtgtttggcctgtgctggaaagtgctggagaaaaatggtgttgccgtgcgtcactttggtatgccggaacagcagaccagccactggcgtcggcaaattgtccgcatcagcctcgcgttgctgccgatccatttctggtctgtggtggcagaactctccccgctgcatctgatggatgatgtgctggggcaggcgatgattttcttcaacctgctgctgattgccttcctggtgtggccgatgtgccgcgaaagctggcgtgataaagagtcgcacaccatgcgactggtcaccattaccgtgctgtcgattatcccgattgcgttgatggtgctgaccgccacgggttacttctacaccacgctgcgcctctccgggcgttggattgaaaccgtttatttggtgatcatctggaacctgctgtaccagacggtattgcgcggcttaagcgtagcggcgcggcgtatcgcctggcgccgtgcactggcgcgtcggcagaatctggtgaaagagggcgcagaaggtgccgaaccgccggaagaacccaccattgcgctggagcaggttaaccagcagacgctgcgtattaccatgttgctgatgtttgcgctgttcggtgtcatgttctgggcaatttggtctgatttgatcaccgtgttcagctatctcgacagcattacgctctggcattacaacgctactgaagctggtgctgcggtggtgaaaaacgtcaccatgggcagtaatgccagtcagttaagcaactga

SEQ ID NO: 31821 - DNA, 678 bp, Escherichia coli
atgtggaaccttttgcggcgaacccgaaaaaaccagaaatcaggacgtgatgtaaaagaggtgggctggaccagcctgtttcaggcggtggctgagccttttgccggtgcctggcagcagggtgtgaaagccgatccggaaaccgttttgtcctttcacgcggtgttttcttgcatttcgctgatatcccaggatatcgccaaaatgcggctgcgcctgatgcagaccgatacacaggggatccgccgtgaaaaacgacagggggatattgcccgtctctgtcgtcgtcccaatgcacagcagaatcgtatccagttttttgaactgtggctgaacgccaaactgcgtcacggcaatacggtggtgttgaaaatccgtaactcccgggggcagatcaaagaactgcgtattctggactggagccgggttgaacctctggtggcggatgacggcgaggtgttctatcgcattacaccggaccggaactgcgggatcactgaggcggtgacggtgcctgccagggaagtgatccacgaccggtttaactgtttttttcatccgcttgtggggctgccgccggtgtatgctgccgggctggcggccacgcaggggcatcatattcaggaaaattcgacgtcttttttcagaaatggcggcaggccgtccggggtgtattag

SEQ ID NO: 31822 - DNA, 225 bp, Escherichia coli
atgccagccctgctcctggtcgattttagcacgcaggcccagtgcacgagcggtggcatacgcggtggcggtggtactggcgaccgtatcccatgcgaggaaatccggccagatgaccatcagctcacgctggctgaaattctggcggtaggctttcacctcggaaatggtcttacagccccatgcgctgatatacccgaaagcgcgcagcttctgacagactga

SEQ ID NO: 31823 - DNA, 645 bp, Escherichia coli; identical to SEQ ID NO: 8435

SEQ ID NO: 31824 - DNA, 357 bp, Escherichia coli
atgctcatagatttggttttaccttacccgccgacggtgaacacttactggcgacgccgtggcagcacatattttatctcggaggagggaaagcgttatcgccgggctgtggcgcttattgttcgccagcagcagctgaaattaagcctgtccggaaggctggcgataaaggtgattgcagagccaccggataagcgtcgtcgcgacctggacaatatcctgaaagcaccgctggatgcgctgacgcatgcgggagtgttaatggacgatgagcagtttgatgaaatcaatatcgttcgtggtcagccagtatctggtggacgtctgggggtgaagatttaccccataatgcattaa

SEQ ID NO: 31825 - DNA, 708 bp, Escherichia coli
atggtgttgtgctggcactgcgacaaccagctgcgtgaccagacatccgaatcactcgagcaacttgctcatcaaaacctgtcagcatggatgattgacgtcatcggtcacgcaataagcggtacgcaggagcgtgaattatctctggctgaattatcctggtgggcggtccgcaatcaggtggcggacgcgctaccggaagcggtattacgtcgttcgctggggttgcgtgcggaaaaaatccgctcaatgtaccgtgaaagcgacatcgtaccgggagagcagaccgccaccagcatactgaaacagcgcacaaaaaatcttacgccgctgcttcacgcccaccagcaacagaacccaccacaggaaaagacggtggtcagcattgccgttgatcctgagtctccggaatctttcatgaaacgacctaaacgtcgccgctgggttaacgagaaatacacacgctgggtgaagacacagccgtgtgcgtgttgtggtaagccagccgacgatccccatcacctgattggtcatggtcagggcggaatggggacaaaatctcacgatattttcacgctaccgctgtgtcgggagcatcacaacgagcttcatgcggatccgctggcgttcgaagaaaagcatggttctcaggttgatttaatttttcgttttcttgatcacgcctttgcaactggcgtgcttgggtaa

SEQ ID NO: 31826 - DNA, 192 bp, Escherichia coli; identical to SEQ ID NO: 9355

SEQ ID NO: 31827 - DNA, 303 bp, Escherichia coli
atgtcctgttctcattcagttgtattactgaataacgccttaaaaatcgccgttatgaaaaatggcgatttgtctcttattcaactttgtcttgataaagaaaaacgcgacataactgaatctgttatcgcgatttatcagaatgaattaaacctcctgtctgatgtggtcaatttacttgttaaacgcgctgtatttcataagcaaatttcatccgtggatgaactgacaaaattaacgacagaaatcgccagctattgcgctgatgaatttaagaaactgaacgacaaaaggagctggtaa

SEQ ID NO: 31828 - DNA, 432 bp, Escherichia coli; identical to SEQ ID NO: 8375

SEQ ID NO: 31829 - DNA, 213 bp, Escherichia coli
gtgcaggaaaaactgagcgccactgagcagcgcctcgcagagatggaaaccgccttttctgcacttaagcaggaagtgactgacagggcggatgaaaccagccaggcattcacccgcctgaaaaacagtctcgacagcaccgaaagtctgacccagcagcgccgcagcaaagccaccggcggtggcggtgacgccctgatgacgaactgctga

SEQ ID NO: 31830 - DNA, 441 bp, Escherichia coli
ttgttgttttatcgcgctggggtattaagaatgaataaattttataaaggctctttctatccgaaagcactaaaagaggtatatatcagcgccggttcatggcctgaaaatggcgttgatgttgatgatgaaacaatggcaatttacacaggcgtagcgccacaaggcaaaacgctgggggctgataaaaatggtaatcctgcgtggattgatatcccgccactctccgctgaacaacagattattcaggctgaacagaaaagaacggtattgcgttctatggctgataaggaaatagcctggagacaggatgcttttgatgcggaaatcgcgacggcagaagaaaccgccgcgttatctgaatggaaaaaataccgggtcctgctgatgcgcgttgatacagcaaaacccgtatggcctgtcaatccgcaggatatttaa

SEQ ID NO: 31831 - DNA, 234 bp, Escherichia coli
atggagaatatctatttcagcccaacgaccgttggtttttatgtttctgaacaagagcgacctgatgatgcggttgaagtctcgccagaggtggaggcatttttgagggagtgtgttatctggggagcggatacatttaacgtagagcgagatgcagcaacggtgacatatccaacagaactgcttgaatatgtcaccacctacaacgcccccgttaaatatcctgcggattga

SEQ ID NO: 31832 - DNA, 342 bp, Escherichia coli
atgaagaaaatattccttctcgcagtgttgactccaacaatttgtgtaggtggaacgctgaatgatttttttgggctgcacacctcactggctgataactacatcatcaagagagagatcacaaatagggctgtttctaatgcggctatggacgctgtatctaatggtcgtgaggcggattttggtgatgagttaatgaaagaacatggtgatagttatggtgaaatagctctgcgtcaactcgcttccgagtgcggttattctttttccgatagcggccaatctcttacgactctaaaaaaagaagaatgtagattggtgctatctgaaaataagcaatga

SEQ ID NO: 31833 - DNA, 582 bp, Escherichia coli
atgacaactcaaatatctgttgaaactctctcccctatcacccataaccagattcctgttattaccaccgaacttttggcgcagctttacggcactgagccggtgcgtattcgccagaatcatcatgagaacaaagcacgcttcgttgaagggaaacactttttcaaagttgttggtaatgaccttaaagaattgcgggtagctttaaactactcacaaaatttgcaaccatctttaagagggttacaaatttccccgaaagcccgctccctcatcctctggacagaacgcggagcagcccgtcacgccaaaatgctcgaaaccgatcaggcgtgggatgtgttcgaaaagctggaagactgctatttcagacaaaaggatccgtcagcgccagcttcatgccagaaaagttacgacacgcgagttctctgttatcagcgcggcggtgtcactgtttccacaattcagttgcgggatgatgatattgttatttcccttgagtcatggctggaactggcgagagccaatggttggtttgttgttcgcagagataaactggtggaaaggctgatgcagctttaa

SEQ ID NO: 31834 - DNA, 474 bp, Escherichia coli
gtgagtgcaccggcaaccattcttgatatgtgctgtggcagtcgcatgttctggttcgataagaatgacgaccgggcgatatttagcgatatcagaaaggaagagcacacattgtgtgatggacgacgcttgattatcagtcctgatctgatagctgattttcgtgcactaccatttgcagacgcatctttttcgatggttatattcgaccctccgcatcttgagcgtgttggtgataacgcctggatgggaaagaaatatggacggctgaataaagatacctggcgtgatgatttgcggcagggatttaaagaagcctttcgtgtgttgcgtccatccggcgttctgatttttaaatggaatgaaacgcaaatacctgttcgccagatattgatactgaccgacagaaaacctgttatcggtcaacgaacaggaaaaaacgataaaacccactggattatttttatgaaatag

SEQ ID NO: 31835 - DNA, 240 bp, Escherichia coli
atgatcggtttcagtcagtactttgttcagatattcagtgacgtgtgcggggatgacctcgatcccaattggtgcttctttcacggacgcaaccacgatggcgcgggaataatccagcccgccaggcatggtgatgaatttgtcgcggaaaacagaaaagggtggtttattttcagcgataatttcctcaatgcgtttagcgtgtgccggatgaaggttatagatgtccacgtccattga

SEQ ID NO: 31836 - DNA, 294 bp, Escherichia coli
atgacgagaatgactgaaaccgatctactaaaaataattcgctgcgttaccggagtctgccaggcaacaggcaaaccggaggccaagcagccggataccgtcaccgctgaaaattacgcgcgtgtggtggctaaggtgatgcgccgtgacggtattgagcttaacggcgtggatatgcgcaacatacgaaccagagtccttgagttgctggcataccgtcgccgttctcaacaacggagggagagcgcgaaaaataattaccagtggaagaagccggaacggttgcggcggtag

SEQ ID NO: 31837 - DNA, 441 bp, Escherichia coli
atgacatgttcaaatgttagccaaatcgtaacccgcaagtcattcaaaataacccgcaacctctcccaaataacccgcaaacacatcaggaaagtggggccagtgatgccaccgatcccctttatttggggatcgcgagtaagccccaaaatctgggtgttgctcttactacccaaactacgggtagtttccgtagtttcatggtcgagttgcaaatctgcaactcacccaccagccaacccatttttgggccgtcgggaatatcaacaagttagcacagaaataactcaggcagatacaaaactcaattttgaggtttgcttattattcagttggttaacatccctcaaaactgaggactgtacccaaagctattcttatagctccggcctcagccgttggctgttcctgaaaatatcagtcagttacgttaaccgctaa

SEQ ID NO: 31838 - DNA, 1566 bp, Escherichia coli
atgacaaaattatccccccctgaacttgacataactaaactgcctgacaggtgccaggcattacttgatgaaatgcatgaagaaacgggaataagccgtgaaatactgctgtctgttatgctgacggtcaaggctgtctcggtccaggatacgcatgaagttgaactttctggagggcagcgtaccagtcttcagatatatatgtgtctttcatcagcatcaggcagtggaaaaacctctgcctgcgcaaaattaatcgcccctgttcatgaaacagaagaagaactacatcaggcatatatcgacgataaaaaaaactatgatcgcatgatggaaatgtggacaacagataaaaaaatcctggagcggagatataaaaaggaaatggaaagatccccggaaaatgctgctgctgcacgagcagcgcttgaaaagtgtatagcaaataaacccgtacctcccgtacaacaggttctcatcgtgaatgacgcgacaccagaagggatagctttgaaactcagccagtcaccttctcttctgttgctgtctgatgaaggaggaactattctggataagcgtttcgaacgcaaatcggcgctgtacaacacattatggagtgggcaaccagtcaccgtagaacgggcatccagacccgggttccgggtaaaggattcccgtctcactatgcttatactgactcaaccggtaatatttgataagttttttactctcactggcgaccagatccggggcaatggctttctggcccgggtgctattttgcgaacccggagcaaataaaataatgacgacagaaccgcatactgccactcctgttgtaacgcagcaatgtgcaacctgttttcatgagaaaagttttggcagtcagatcagagactctctgagagcgtcccgggaaaggcgtgcaaaaggtgagcaacgcatccgcatgacattatcacacgcagcatcccacgatctggaaatctttcacgaagaaaatatgagtgctgtcaggcagaacccacgtatgaccactttcgaagacattatcgtcaggaaaagagaacaggctgttcgaatagccgcacttctggagctggagaacaatccacatggtacagtaataacacgagaaagtatcaatagtgctatttatctcgttgatttttattttcagcatcttatatccaaactggaatcacttcgggaaatatctcctgcagaaaaactggataaatggctcagagaaaatatcatccgggtaaaaggatacgaatatcaaaaaagccatatactacaatatggtccatatgctctcaggaataaatgtgttcttgatgaagcacttgatatacttgcagaacagaaaaaaatcgtaattgattattcaatcggccaaaaaatcatttatatcggtgacgcgattacaccttgtgaattagcaaatgaggcaaacatcccgataatggagcgtggaatgtttatagtctgttgggaccataagctgaataagtacagaaatgaagaacagactaaaatatggaacataactacaaaaaattaa

SEQ ID NO: 31839 - DNA, 249 bp, Escherichia coli
atgtcaacccagaccggacatttttataccccctcacgcatcctgcgtatggctgaacttacccggctccttggtatatcaagatcgaccatctacgaaaaaatgaatccggcatcaaaatactacgatgccacctttccccggcctgtccggctcgggagttcggctgtaggctggcgggcatctgccattgatgagtggttaactttacatacaacaccaaccagatccgtaactaaggataaataa

SEQ ID NO: 31840 - DNA, 1773 bp, Escherichia coli
atgcgcatgtttacaaatcttttgtatgatatttgtacagtctttgagttgtttaaggaaggagagagtccgagagataagcggaagagtactgattttggagcgcatcaaagattctgggatcaacgttataatgagctcagtcacattattgatgctgaaggggtgtatagtctggaacaacggcgaattatattttcccggtatgaatatttttattacatgatgaattcttacccggtgtattcaacattaaagtccgaatatatccgtaattattttctgaaaagctttggagttgtttttattgtgctggatatatataacacatatcgtccagagaatgaaacagggttttattatcatatctataattttttgcaaaaatcatattgtccctgcctggattactctggtacagaaagcgatgaggctgctgttaaacgttatctccgggagtatcttgctgaactgggatttaacagagaagattttcgggaaaatggaaaaatgtatgagctgggaaaataccagggaactattcgaaaagggtacggtaaaagaaagagccttatgaaacaatatataaaggcctgtaagaatgaatacaaaaaggattacagagagaagaagcttgataagagtgagctggacagaatactcaacaacattgacaagttctattatgcattttattcattaagtattttgcttgatatgcaacggaaggtaaagatacttgacagtatagcatattatctcagagtgctgataagagaagggctttgggtacatgggttgtatggctacgctgcacgctatctttatgattttaatatttttgacacaacgccttatgcaagagcattacttgaacggtttcatgagtttgagagtggccccaaaggagcattaactcgttatattgtgtcacttgatgataaatcacaagaatatatcgaatctttaaaagatatggtgtttaatctttctgataagaaaagttatgatgatgtatatctgaccaggtgctacatgttactggccgtttttatttatctgattcggcggaacaaacttcacaaagctcttcggttttatgatgaatcccaaaaatacgagttaccttcggggtatctccccggtgctttttcagttctcaggatagcgctggagatcaaattaaacagggagaaaataaagcatggttcactgttcgaattacttgattatgtaaaagcttatcaggatgcatttatggacttaagggtcgtgacggatcctgcgtataatgaagatgaaatacaatatgatgcgaataattttaccctgatgcgtgtcattaaaatgtataattcgatgcttgcaaatattagtacaaagtcagatattcagcctccgtatattacaggtcttctcgataatgtagagagggcgttagataagataaatattctgatagataaagaacgtgtttacgatggtgaaacgttggctgaattaattacagagagcaaaatattgtccagtcgtgaaagtaaagaaaacctgataggattatttacgggcagacacaaatatactttactgcaatgtattgagaagcttggcgtattggttgattatgtaatatcaccggttgatgatattaaaaacgtcatgatgttgtatggaaataatgctgaaaacaagaacagacgcacactaatctacaacgcattaaccatcatttgtggtgatgatactaaaaacaaccagtcagatcctcgatga

SEQ ID NO: 31841 - DNA, 126 bp, Escherichia coli
atgtctgaaaaaataaaaaaatcgcaacgcattgatttttatgttgtttacatttttcaaatactatctctcgtttttgtgattagtatcatgttttatcgtctcgcggataaccgtgaggagtga

SEQ ID NO: 31842 - DNA, 204 bp, Escherichia coli
atggctatgattgaccctcgtacacctatcggcaaagcgacccttcgttaccgtggcctgcccacacgtcatctgctgtctctgctgagacttggagtcgaagaccctgagcgcccttactacagtcgagacgagctgatagctatgctggtggaccgtgatttagacaatcagttacgccgagcctttgctaagcagtcctga

SEQ ID NO: 31843 - DNA, 501 bp, Escherichia coli
atgacttctgacaataagcaggaatacaccattcatatcttcggtcaggacatcaccagtcaggacggattgtttcgactggatgagatacgccgggtaggcattcagattggtaaggtagaagataaccgtagtaccgaggttgctcgcttcatgaggaccaaggctggtagaagtctaaccaacccagaaaacgggtttgttaaaaagattaacatgggtcacttagggacctcgtggctggctgacccagtagccgctatagagttcggtcggtggttggaccttgggtacggactggcagtaacccgagccttcgtgtctatgacctccagcgccaccgtgcagtctgctgtagcgtctgctgaggacatcaagccggagaccaaggaattcatccagcgtcatggcacaggcctctacatctccggacgtgaagtctcacaggctgagtattcagactatcaagctgtgaccgctggtcgctgtgagtggaggtaa

SEQ ID NO: 31844 - DNA, 516 bp, Escherichia coli
atgaataccgaattaccagtaactaaccgccagttcttaatcatcctgctgaccaatgcagagtccagtgtcgattgctgtcgctataacttagacctgctgaagttatcccgatggtatgcccaggcggaagactgggactatgagaaaatccgggagatgtacgcggagcctatccagtcatacctccagacacacaccgaggaagagctgaagcgtggcctgcaggacatcttctatttcaacaatccttacacctgtgagggtgactcagaagagatggattggatagcgtcacgctctgatgccgacttgaagcacatctctaacgcgatgatgcaggtggagagcaaatggtcccgccgccttcaggtcctaactgaagattacgaaaacggcacctttgataagctggtcccacctgatgccgaacgccttcaggcgaaagctgaccaagaacagcgcttcaagtcctttgccgaagctctggcgggaggtgcctcttatgacttctga

SEQ ID NO: 31845 - DNA, 501 bp, Escherichia coli
atggctattaaaattcagtgctacaccgagtccgacaatgcggctttcttcggtgacgattccgacctccagcaccagctaccagcaccgacatatgacgaacctaaggcccgcacaggtaagcctcctgtggtcatcgacaaccgggctgtccgtgcgtggctgattgagactgggtgtctctcctatacgcagcttgttgaggcgtacccgtgggctgacgatgtgttcacaggactctcacgggctaccagtggcgctgtcggtgctggactcccggtatctaaggcgtacctgttctctgccttatatggcaccaacgacatcttctcccgtaacacagccaaatcctacgctgacatcactgggcgttcaccgtctcctcgctacctgcgccacgtcaatagcgtgcttcaggctacggctgtgaatctggctaaggttctgaaggaccgaggggatttcacatggtgggattacaacgatcagtgcctgtcctga

SEQ ID NO: 31846 - DNA, 147 bp, Escherichia coli
atgctgtacctgcggattggtacatgccgtctgaacaatatggctccagaaaaatggctgcgttacgtcattgaacatatccaggactggccagcaaactggatacgcgatctgttaccctggaaagttgatctgagcgctcagtaa

SEQ ID NO: 31847 - DNA, 771 bp, Escherichia coli
atgatttacactaatcagcttcgttacagtggcaaagatggcgtttacttccacttaagagataatgtagatgccttcttaaccttatcagctactgagaacatggaatttgacagccctatgatggtgacaactcaggctatgcaatcggggcaaactatcactgataatgttcagagagcacctaagaccatctctattagcggtgttgtagtggttgattcgacgggttcagttctattaaccagacaggggcaacttgtagagacctttatttctacggttgaacaatggcgagaccagaagcaaatcatcactattgtttgtaaagatggaatatctatcactgatagtatcattactcagtttaaagcgagtaaagagcataccattgctaatggtcttcgtattcagatgaccttccaaggtgtagaatttcgttcaatcgtaggtcagactgatatttcggctgcaactggcaaaacggctaccacaaatgatggcggtactaccagtaaaaagaacactgggaacactacaacgagtcttggaagccctatgctgacctgtaaagagctttttagctattcggcaagtgagttatcagatgaagcgttaaaagcccgtgtaacgtgctctaagagcgttagcgttaaaaatggtgagagcaccttcacagcctcagctaatgagcaagcttcaaaggtgcttaagtcgggtaatgctttacggaagtttagtgtgaatccgaataaaaagggtacttattga

SEQ ID NO: 31848 - DNA, 930 bp, Escherichia coli
  misc_feature (887)..(896): n is a, c, g, or t
atgagcaaattcacagttgatagttttattgttgagctgggcttcagtgaaaacgttgttaagggcttgcaaagggttgaaaaggcagctttgcagtcagcacaaagaattgaacgtaatttgaatagagcgtttaaggtcgataccaagcaacttgacagcaatctgacaagttctttagggcaacttgaaaggaagtttaataagacctttgacaagattgaacagagagcaagaaatactaaagctttccagtttaccaccagatttaatgacactgttaatcctccaaaacaatcaagacagccacgaattagcggaaacagagcaatcacagcagcttactcagctaatatgagcaagctaaaaggcttcgaccctattttgcagaaatacatcaaatctcagttttacgggctatctgctaaagctggtcagatggataacaccaagtttaatgaagcccttgctaaactaaattcaagtgtacgagaagcaattgctaaagctaaagttcacacatccaccagcattaacggtgacagagcagctaatagtcttgatagtctgtcttcagcagcagttaaaacagcaggtgcatttatcagctttcaggctgtattagcaagctatcagaagattatggaagttggtttacagcgtgcaagtgctgaacgttcaattgatttcgtatttgataaagatgctggtcaagtaaaagagttcacaaagtcattagctcaaacaacgggtttagatatcgctgaactgcaatcacagtttgctggttttggtgcttcagctaaagaatctatgggtattcaaggttctgaagaactttttagaaatatgattggctattctcgtttaatgggtcgaagtgaagnnnnnnnnnngagcattaacagcgctatcgcagatggctggtaa

SEQ ID NO: 31849 - DNA, 852 bp, Escherichia coli
atgagtgaacgtctgagcattaccccgctggggccgtatattggcgcacaaatttcgggtgccgacctgacgcgcccgttaagcgataatcagtttgaacagctttaccatgcggtgctgcgccatcaggtggtgtttctgcgcgctcaagctattacgccgcagcagcaacgcgcgctggcccagcgttttggcgaactgcatattcaccctgtttaccctcatgccgaaggggttgacgagatcatcgtgctggatactcataacgataatccgccggataacgacaactggcataccgatgtgacatttattgaaacgccacccgcaggggcgattctggcggcaaaagagttaccctcgaccggcggcgatacgctctggagcagcggtattgcggcctatgaggcgctctctgttcccttccgccaactgctgagcgggctgcgtgcggagcatgatttccgtaaatcgttcccggaatacaaataccgcaaaaccgaggaggagcatcaacgctggcgcgaggcggtcgcgaaaaacccgccgttgctacatccggtggtgcgaacgcatccggtgagcggtaaacaggcgctgtttgtgaatgaaggctttactacgcgaattgttgatgtcagcgagaaagagagcgaagccttgttaagttttttgtttgcccatatcaccaaaccggagtttcaggtgcgctggcgctggcaaccgaatgatattgcgatttgggataatcgcgtgactcagcactatgccaatgcggattacctgccacagcggcggattatgcatcgggcgacgatccttggggataaaccgttttatcgggcggggtaa

SEQ ID NO: 31850 - DNA, 2223 bp, Escherichia coli
atgatttttaccaaaatcattaggggattcatcagtacctggcagcttgatacgcctttatttacgctgcgctttttctccccacaggaaggtattgtcggtgtacggattgagcattttcagggggcgctgaataacggtcctcattacccgctcaatattttgcaggacgtgaaggtcacaatcgaaaacacagaacgttacgctgagtttaaaagtggcaacttaagtgcgcgtgtcagcaaaggtgagttctggtcactggattttctgcgtaacggcgaacgtattaccggtagtcaggtgaaaaataatggctacgtgcaggacacgaataatcaacgaaattatatgtttgagcggctggatcttggcgttggcgaaacagtttacggtctgggagagcgctttactgcgctggtgcgcaatggccagacggtagagacctggaaccgggacggcggcacaagtactgaacaggcgtataaaaatatcccgttctatatgactaaccgtggctatggggtactggtcaatcatcctcaatgcgtctcttttgaagtgggatcggagaaagtctccaaagtgcagttcagcgttgagagtgaatatctcgaatactttgttatcgacggcccgacgccgaaagcggtacttgatcgttatacccgttttactggtcgtccggcgctgccgcccgcgtggtccttcggcctgtggctaaccacttcatttaccaccaactacgacgaagcgacggtaaacagttttatcgatggtatggcggaacgcaatctgccactgcatgttttccactttgactgtttctggatgaaagccttccagtggtgcgattttgagtgggacccgctgactttcccggacccggaagggatgatccgccgcctgaaagcgaaagggctaaaaatctgcgtctggattaacccctatatcgggcaaaaatcccctgtctttaaagagttacaagagaaaggctatttactcaaacgcccggacggttcgttatggcagtgggataaatggcagccaggtctggcgatttatgactttaccaatccggatgcctgcaaatggtacgccgacaaactgaaaggtctggtcgcgatgggcgttgattgctttaagaccgactttggcgaacgtattccaaccgatgttcagtggtttgacggttccgatccgcagaaaatgcataaccattatgcgtacatctacaacgaactggtgtggaaagtgctcaaggaaaccgttggcgaggaagaagccgtcttgtttgctcgctcggcctccgttggtgcgcagaaattcccggtacactggggtggtgactgttacgctaactacgaatcaatggcggaaagcctgcgcggtggtttgtctattggcctttcaggttttggtttctggagccacgatatcggcggctttgagaataccgcgccggcgcacgtttacaaacgctggtgcgcgtttggtttgctctccagccatagccgtttacacggcagcaaatcttatcgtgtgccgtgggcctacgatgatgagtcctgtgatgtggtgcgcttcttcacgcaactgaaatgccgcatgatgccgtatctgtatcgtgaagctgctcgtgcgaacgcgcggggtacgccgatgatgcgggccatgatgatggagtttccggacgatccggcttgtgattaccttgaccgtcaatacatgttaggcgacaacgtgatggttgcgcctgtgttcactgaatcgggcgatgtgcagttctacttgcctgaaggtcgctggacacacctgtggcacaacgatgaactcgatggtagtcgctggcataaacagcagcacagcttcctgagtctgcccgtttatgtgcgtgataacaccctactggcgctgggcaacaacgagcaacgtcccgattacgcgtggcacgaaggcacggcattccagctctttaatctacaagacgggcatgaagccatctgtgaagtgcccgctgctgacggttccgttcttttcaccctgaaagcggcgcgtactggcaacacgattactgtgactggtgcgggcgaggcgaagaactggacactgtgcttgcgcaatattgtgaaagtaaatggtctgcaaggcggttcgcaggctgaaagtgagcagggactggtggtgactcctcaagggaatgcgctgacaattacgttgtaa

SEQ ID NO: 31851 - DNA, 165 bp, Escherichia coli
atgaagaatcttttaaagattggctcagttgcagtgatactggcgctgttgtcaggttgtagtggcagtgtttataacaaagaaaaaaactgcgaatatgattatttactgcatcctgccatctctgtatcaaaaatcattggtggatgtggtcctgttgagtaa

SEQ ID NO: 31852 - DNA, 345 bp, Escherichia coli
atggcaaaccatatatcagagattactatagaaaaaattattgagcgtattgaagctgaaattgagagaggctcccgcctttctgtcagagaagtggctctgtggtctggttatagtcacagacacctgcagcgtttgtttctgatgtatacggggatccctttgggagaatatattcgtcgcaggaggcttaatcgggtggcattgctccttcgtctttctcagcgttctttccaggatattgctctgagcacaggttttgattcccagcagtcaatgaaccgtgacttcaaaaagaatacaggtctgacaccaaaacaatatcgctacagaaagcttttctga

SEQ ID NO: 31853 - DNA, 270 bp, Escherichia coli
atgatgcatgtgcgttcattaacgcatccggtacccattaaatccgaactgtacctgtacagcgaggtaaatgatcagcaagattgtggcaacgtataccctgtttacgtctggttaaacagatccggagtgttgacgtttacggcgacaaaaagtcgccgtgtttcactggaagatatgtcagcgctaaaaaataatgtcagaaatcatttatctgacaatggaatgataagtaaatcagccggggatttattaatgagtccccgataa

SEQ ID NO: 31854 - DNA, 423 bp, Escherichia coli
atgacatataagaacatactggttgctgtttcaaataatgatgaagataacatccttttgaagaaagcatatgaaatggcgaaaaattttaatgccggcctgacggccattcatattgatgaagggttaagccacttgtatcccagcgtgtattcacacttttctgaagagatgtttgacggtctgaaaaatgcgtcagacagaagattgtttgaccgcctgaaagatttcaaaaatataagactgagaattgaacagggaacaatacctgaaacactcctcagtcttgtacaggaggaaggatttgatcttctgatatgtggccatcaccatacatttattaacagactgatgcccgcttatcggggactcattaataaatccccggctgatttacttatcattccattgtcagataaatga

SEQ ID NO: 31855 - DNA, 231 bp, Escherichia coli
atgaaactatttattttcagtctctttgtcatagttacctccatggtttcaggaattgcaattgctgagttgtcttatttcatattgcttatcattaaatacttagcgtatggggaagttaattttagatggtccgaagttttaagaggtctaaggatggggtgtgtgggaggtggaattctaggttttggtatagtcttgtttcgctttcttggcataaaaggattttaa

SEQ ID NO: 31856 - DNA, 174 bp, Escherichia coli
atgaaaatgacagaaaatcgccgtgctgataaagaattacgtgaagcaaagacccggttacgagaattagaaaaagaacttctccgtaaagataaagccctggcggaagcagctgctcttttgatgttaagggaaaatttcaatgccctctgggacaacagtgaggaaggctga

SEQ ID NO: 31857 - DNA, 885 bp, Escherichia coli
atgaatgctttacagagagtggcaggtggtaccgcgccgtatattgctgaaattatcaaacagaccaccccggacggtgcgggacgtgtggcagcccatgctgtggtgaatgctgcattagcggtggcacagggaaataacgcccttgccggtgctgcaggtgcagccaccggcgaggtggtgggaatgatagccacacagatgtacggtaagccggtgagtgaactgagcgagacagagaagcagactgtttcgacactggcaacggttgctgccggcctggccggtggtctggtgggagactcgggggcttcagcggtagccggcgcacagtcaggtaagacaacggttgagaataatgcgctgtctgagcttgtgccgcctcgcgtacagcaggatgcttccctggcttttgatctcagtggtaaaggagtcactaacgatgaaattatcaaagcggtagacaaatcacatatcggcccgtcagtaggtgatacggcaaaaatacatggagatgtaaaaggccaggtcgctggagggtatgtcgcaggagggtatctggaaggtgtactgtcagaggataaattttcaattaatggcggggtcacgaaggtattaggctggcgtgcagatgtgtctgccgggttgacttttgggccttacccgattaaagattttaatcctacttatgattattctggtgctatatcgacaggtattttttcagttgaagggagtattggtaaagacggctttggcggctctttcagagttggtggaggaattggtgcgagtattcgacaaagtgaaaacagtaataatcagccggaaattaacggttctggtagtaccgaactaatttcttggcctataaaaaaggactaa

SEQ ID NO: 31858 - DNA, 456 bp, Escherichia coli
atgatgtacttgctgttaggtattgcactttctgcttttactgtcggaacggtcatgttttatcgatttagtaaagtgacaggaagaagcgtgcaatcaccttttaccccaatgtttttttttgatgctctattttttgggctaggcagcagacgcgatatgaatattgctgcctgtgcttttatggtctttttactgagtgtttgggggttcacttatataaaattacggactaatttttggggaagccctgaaagttattttggtttagggattgtcggaattttctttctgataatgcattgtcgctacggtgcaaaggatgttgttatcaaaaatgatggtcttgcaccaataagggagttaattaatgttcatcagtctggcctcaccagcccatttttgtggttaagtagggcagggtacctcggatgtttaattggcatgataggctga

SEQ ID NO: 31859 - DNA, 309 bp, Escherichia coli
atgacgtccggggagaggagggtggcttcacgactggagagttttctgaatgatgactgccttgtctggtacgatatcccggtgggacggagaaaccggcatccggattttgtcattattgacccggagaacggactggtatttctggaggtcaaggactggacgatttccacgctgcgtgaggcaaatcaggagcaggttacactggaaaccgacggtcttctgaaatcagaaataaatccgctggtacaggttcgtcgttatgcctgtgatacggttaatgccttacctgtgcaaaatggcatctga

SEQ ID NO: 31860 - DNA, 309 bp, Escherichia coli
atgatgaatccattattcagtgacattcagatgcgtcttttttatttaaatcataatccatattcctggcactgggatgttaaattcaaaccgtgggaagctgtatacatcggaaataatgcatgtcatatcaccattactcataatcagcccgggtatcatttgacgatggatggagagagagtacgaacggaatatcatatcgaaaatattcacggactattttcggttctacaacgacgatgggatgtgacaccggcaattatccgcgcggtggaatacctttcccgggtacaggtaccacactga

SEQ ID NO: 31861 - DNA, 1869 bp, Escherichia coli
atgagatcaaaattattaaatatctttgtaaaaaatataggttgtataggtcctgagggagttaaggtaaaacttgatgatattctttgtctggttggtcctaataattcaggaaagacaacaatcttaagggcttatgagttagcatacaatccaaattcttttaatattcatagtgatcgatgtaactgggcgcagaaaaatgaactttcgcaagttattcttgaggttcatattcctgaaggtatagggaatgttgatgagaaatggaaaattattgatggcagcaatagaatcgtcagaagtttatgggtttgggatgaaacgggaaaaccaacaagaaaaacatgggatcctcagactgaagactggtcagaggacagcaaggccggtggagccgataatgtttttaaatcacgtttgccaagaccaatgcgaattagatcactggatgatgcagcgactacagaagagacattgctcactcttgcgttgactcccttagtgaaagagttgaaggctctggagtgtaataaagagtcacaaatatcaaaaatggttaaagctgtaaatgagattgctgagcctcatcaagaacgattttcttctatttcccgacaaattcagacagggtttcaacatgtctttcctgctcttggtgttcagctcagtgttgaaatgaatccacctgagcttaaaatagacaatttattaaagcaggggtctggtttattagtcaaagaggctgcgggaaactctcgcattgggcaacaggggacaggagcaagacgagctcttttttgggcaatgctccaggtccataatgaaattagccgacaaaatgaaaagcgagaagctcttcttaaatcctttagagaacaacttaaaaaagaggagaggaaaaatgtaaaaagtgaaaatataaatctcctgaaacaacaaatagatgctattgaaaatggcgcccctgttcctgaagacacagacgatccagccttacccggatatattcttttaatggatgagccagaaaatgcgttacacccaatggctgccagagcggcgcaagcgcatctttatgaacttggtaaacatccagattggcaggtgctgttaacaacgcattcaccatactttataaaccctcttgaggatcatactacgattgctcgtatgcaacgctcaacagatgggaaatcactttctccacgcttgtatgtggctgatgaagctaacttctcacctgatgagaaagataatttacaggcactacaacttacagatattggttttgctgaaatattttttgggagttatccaattattgttgaaggtgatactgaacatgcggcatttatttcagcaatcactaaagaaaaacatgagatgtcaggtaaggtaagtattgtcagagccagaggtaaggcggttctggttcctttgataaagatgctaaatcattttaaagcagattttgggattgtacatgatattgattggccttatcgtagagatggctcgaataatggttcatggacgcttaatacgatcatcagaaatgagattataaaatgcagaaataatgggcagaaagtatatcatcgttggagtattcccgattttgagcgttttttaggtggtgaggagttggggaaagataagccctacacagcatttaatcgtatttcgcgcgatgaagaattaaaagaaaaaattcaaaatcttataattaatttgtttgaaggggagtgttatgatcctgatgactttgaacccgatgatgattttaatgctcaactcatggaacaattaaaaatatgggcaaaaaataatggtgaaagtgataatgttcgcgttatgggatgctga

SEQ ID NO: 31862 - DNA, 843 bp, Escherichia coli
atgtctgatatcacagcctcccgtccggaagttgtcaacgggcatacggacgttatctgctcaaccagtatccgccacattctggctgtacgaaagagttcactgctgcaaatcgacacacttatccggcaactggctgaaatctcagcaatgacagaaagtattggcggtaaaaccgcactggactgggcgatgaaacaggattttcgctgtggctgctggctcatggagaaacctgaaacggcaatgaaagccatcacacacaatcttgatcgcgaactctggcgtgatctgatgcaacgttccgggatgctgtcattaatggatgcgcaggcccgtgatacatggtaccggtcactggagtacgataattttccggaaatcagtgaagcgaacattctgagcacatttgaacaactgcaccagaataaggatgaagtgtttgagcggggggtgatcaacgtcttcagagggttgagctggaattacaaaaccaactccccctgtaaatttggtaataaaattatcgtcaacaatctggtgagatgggaccggtggggatttcatctgaacagcgggcaacaggcagatcgacttgccgatctggaaagaatgctgcacctgttcagcggcaaaccgatccccgacaaccgggaaaacatcaccattcatctggatgaccacatccagtctgttcagggtaaagaggactatgaagatgagatgttcagcatcagatactttaagaagggctccgcgcatatcacgttcagaaaaccagaactggttgacagactgaatgatattatcgcaaaacactatcctgacatgctggcagtatag

SEQ ID NO: 31863 - DNA, 354 bp, Escherichia coli
gtgaataatgtttctcttaagaaagcatatctttacaatgataatagcaataaaaaagccaatgacagtaccgagaaacaagccaatgacagtaccgataaacaagccaatgacagtatcgagaaacaagccagtgacagtaccgagaaacaagccagtgacagtatcgagaaacaagccaatgacagtactgataaacaagccaagaacagtaccgataaacaagccaagaacagtaccgagcaacaggacagtaccagtttaaatcaagcccgtttaaagaaagaagtgaatagcagtttttccattccgggtttaacgtcttatcagccaacgtatatagttgacgaatag

SEQ ID NO: 31864 - DNA, 1083 bp, Escherichia coli; identical to SEQ ID NO: 9817

SEQ ID NO: 31865 - DNA, 369 bp, Escherichia coli
gtgtacgcgatttatcagggcattgtcttttctcatttgttgcatcaggaccgtcttattgagattgataagtcattgcaaacgattcgtttctctggcgggccaacgcattccagaatctggatgcagatgttttgtgatgccagcaacatgcctcttgaaattgtcgatattgaacagtcaggttgtagagcggctgcaatgtgtgcggcagtaggaggaggggcttattctggattcaaacaggccatgaaggccacgcatctcaacgtgattcgtcttgaaccgaatgtagaaaaagcacacatgctcaggcgacggtttgctcgctttaaacaggttgccagtgcgctgagttccgttgtttga

SEQ ID NO: 31866 - DNA, 384 bp, Escherichia coli
atgacagtatcaaaggttcttgagattcttgctgctaaaggaccagggggaacatatgggttatgtatgtcactgcaacacgataatcttaataagattaatgaatatataaaaaatttaaaagagttggccagaaaatttaactttagccgggaagacctggaaactctactccttgcgaaagataaccgtggtgtgagcgcgatttctgtagctttatcaaaaaataaaaaagaaagtgtcaaggtattgttcttggcgatagatgaatttgagaaagagtttggggtaaataaaaatgaaatgcttttttatatagggaaaaaaacatgctcaactctgagagatcccctcataatttccccaaagcgtaaccatgtgtga

SEQ ID NO: 31867 - DNA, 2310 bp, Escherichia coli
gtggctatggggatgagtgcgttcccctctttcatgacgcaggcgacgccagcaacgcaaccactgatcaatgctgagccagctgtagccgcccagacggaacaaaatccgcaggtggggcaagtgatgccaggcgtgcagggcgctgatgcccccatcgtggcgcagaacggtccttcgcgtgatgtgaagctgacctttgcgcaaattgcgcccccgccgggcagcatggtgctacgtggcattaacccgaacggcagcattgagtttggtatgcgcagcgatgaagtggtgacgaaggcgatgctcaacctcgaatacacgccatcgccatcgttactgcctgtccagtcgcagttaaaggtttatctcaatgatgaactgatgggcgtgctgccagtgaccaaagaacagttgggtaaaaaaacgctggcacaaatgcccattaacccactgtttattaccgacttcaaccgtgtgcggctggagtttgtcggtcattatcaggacgtgtgcgaaaacccggccagcaccacgctttggctggatgttgggcggagcagtggactggatttgacctatcagaccctgaatgtgaagaatgacctgtcacacttcccggtaccattctttgacccgcgtgataaccgtactaacaccttgccgatggtctttgcgggtgcgccggatgttgggctgcaacaagcatctgccattgtcgcctcgtggtttggttcgcgttctggctggcgtgggcagaacttcccggtgctctataaccaattgccggatcgcaatgccatcgtttttgccaccaatgacaaacgcccggacttcctgcgcgatcatccggcggtaaaagccccggtgattgagatgatcaaccatccgcagaatccttatgtcaaactgctggtggtgtttggtcgtgacgacaaagacctgttgcaggcagcgaaaggtatcgctcagggtaacattctgttccgtggtgaaagcgtggtagtgaatgaagtgaaaccgctgctaccgcgtaagccgtacgatgcgccgaactgggtgcgtaccgatcgtccggttacctttggtgaactgaaaacctatgaagaacagttacaatccagcggtcttgagccagcagcgattaacgtttcgctaaacctgccgccggatctctacctgatgcgcagtaccggcattgatatggatattaattatcgctacaccatgccgccggtgaaagacagttcgcggatggatatcagcctgaataaccagttcctgcaatccttcaacctgagcagcaaacaggaggcgaatcgcctgctgctgcggattccggtattacaaggtttgctggatggcaaaacggatgtctctattccggcgctgaaactgggcgcgaccaaccagctgcgctttgactttgagtatatgaacccgatgccgggcggttcggtggataactgcattaccttccagccggtgcagaatcatgtggtgattggtgatgattccaccatcgacttctcgaagtattaccacttcatcccgatgccggatctacgcgcctttgctaacgcgggcttcccgttcagccggatggcggatctgtcacaaaccatcaccgtgatgccgaaaacgcctaacgaagcacagatggaaaccttgctgaatactgttggttttatcggcgcacagacgggcttcccggcgattaatctgacggtgaccgatgatggcagcaccattcagggcaaagatgccgacatcatgatcatcggtggtatcccggacaaattaaaagacgacaagcagatcgacctgctggtgcaggcgaccgaaagctgggtgaaaacgccgatgcgccagaccccgttccccggcattgtgccggacgagagcgatcgcgcggcagaaacccagtcaacgctgacctcttccggtgcgatggcggcggtgattggcttccagtcgccgtataacgaccagcgtagcgtgattgcgctgctggcagatagcccacgcggttatgaaatgcttaacgatgcggtgaacgatagcggcaaacgcgccaccatgttcggttcggtcgcggtgatccgcgagtccggtatcaatagcctgcgtgttggcgacgtctattacgttggccatctgccgtggttcgaacgcttatggtatgccctggcaaaccatccgattctgctggcggtgctggcggcaatcagcgtcgtgctgctggcctgggtactgtggcgtttgctgcgtattatcagccgtcgtcgtcttaacccggataacgagtaa

SEQ ID NO: 31868 - DNA, 2151 bp, Escherichia coli
atgctaagaaaactgttttgcatctatgctctggcaatgggaataacgttactgccagcgacagctgctacaccgtcaacaacgagtagctcttcaactcaggatgaaatttcacgcgaggtaaaactcgcttttgcgcaaatctctccattgggacaaatgaaactcaatggggtaaatccgcatggcaccattgagttcggaatgcgtagtgacgaggtagcaacaaaagcgttgcttaaccttgaatatacgccatcgccttcactattgcctgttcagtcgcaactcaaaatctatctcaatgatgagttgatggatgtattgccgattacatcggagcaactgggaaaaaaatcctatgccagggtaacgcttaacccactgtatatgaaggactttaaccgtgtgcgagtggagttcgttggccattatcgacaagcttgcgagaacccgaccaacagtagcctgtgggtggacatttcagggaatagtgggctggagcttcgttggcaaaaaattcccctacagaacgacttagcttttttcccgataccttttttcgattcccacgatgagggacccacaattataccgatggtatttgccggatcacctgccagcgaacagcagcaggctgccgcgattgttgcctcatggtttggctcacgctccgcctggcgtgggcaacaatttcctgctcattacaatcagctgccatccagtaatgctatcgtttttgccactaacgataatcgcccggacttcctcaacaattacccggcagtagatgcaccagtggtcgggatgatgacgcatcctgcttatccgcaacataaattattgctgatcctggggcgtgatgatcaggatctactgctggcggcgaaggggattgctcagggcaatatattattccgtggcgaaagagtggtcgttaaagatgtcaaacagctggcagcacgaaagccatatgatgcgccaaattgggtacgtactgatcgtccggttacgtttgccgaactgaaaacctgggaagggcagttacagtccagtggcgtggattctgcggcaattgatgtggcactgaatttaccgccagatctctttttattgcgcaacactggtatcgacatgcaccttaaatatcgttacaccgctccgccggtggtcgatggagcgcagatggatatcagcctgaacaaccagtttctgcaatccgtacccttgaacgaccatgcacaacgtctggtgttgcgtttaccgctattacaagaattactcgatgatcatccagaagtacccgtatctgcgttaaaaccaggggaaactaatcgtctgcattttaactttgagtttaaaaatgcactgccagaacaggcagataagagctgtatgaattatcggatgattgagaatcatgcggtaattgctgatgactcgacgatcgatttctctaagtaccatcactttttggcaatgccagatttacgggtgtttgcacacacgggatttccgttcagccggatggcggatctctcagaaacgctcgttctgatgccaaaagctccagacgaagcaccggtgtccacgctgttaaatacggttgcgttaatcggagcacacactggttttcctgctatcaatctcacaataacggaggatagtcgcgctattgaacgcagagatgctgatattttgcttattggcgcgctcccggagaatctgaaagacgataacaatattgtacttaaacaaactcagacagtgcttagctcctccgctgcgatggcaatggtgacaggatttgagtcaccgtggcacgaaaagcgcagtgttgtggcgttactggcaaagaatgctcaggattatcagttgcttaataatgctctgaatgacagcgcaaaacgcgccgggatatctggctcgttggcgattattcgtgattcaggcattgaaagcctgcggtcgggcgatatttactatgttggtcatttgccatggcatgagcggttgcagtataccctggcgaatcatcctgttttactggccgtgatggcagcgagtagtgtgatgctactcgcctgggtattgtggcgaatactgcgtattatcagccgtcaccgtttgaatttgaagcagaagaaataa

SEQ ID NO: 31869 - DNA, 573 bp, Escherichia coli
ttggcagcatcaccaatcatcggtacgctgtttgctctgctgctgtatgtcttctggctgggcgtgacgatgggcaacatcagccgttcggaattcccgccgattatcgctaaaggcggcaatatcgacgtgtttgtcgaggccatcagcgggctgtttaccagccgctatatggatctgatcctgaccttcttcggcaactttgcggtagccagttccctgctggcggcaaccctcggcctgtttgactatagcgctgacctgtttcacttcccggataatggggtcggtcgtctgaaaactgcgctggtaacctacttcccaccggctgctgtgtgctttttcttcccgaatggttttgttcatgcgatcggctatgccggtctggtcttcaccatctggagcgtgatcctgccaccgttcctggtaaaagcggcgcgtaagcgtttccctacggccagctacactgcaccctgcaataacacggtgcttaacctggtgatcgtctgcggggcggttgtctatctgacggtggtgctggacgtgtttggcctgctgcctacgttccggtaa

SEQ ID NO: 31870 - DNA, 1125 bp, Escherichia coli
atggctaatgaaaacttagatattgactccaagacagcagaagaattatacgagtggtatctggatgataaattaattataaatcgaagataccaaagaaaattagtatggtccctcgaagagaaaacagcactgatttcatcaatgactcagcaataccctatccctttgctattgtttgtttccattgacaacaaaagagaaatccttgatggaatgcaaagactagaagctttaatgagttttattgagcagcgattttcattaaatggtaaatactttaatttagatgccattgcattaacaaaacaactaaaagacagtggtaaacttcaacaaaaagagccagtgctatcccgcgaaagttctacattaattgctcgctatagatttgctatatctgaatactcttcaacagaggaccacattgacgaagtgtttcgacgcataaattccaatggtaaaattttatcaaaacaagaactacgaagtgcggggtgcgttagtaatttttcagagttagtaaggaaaatatcgacaattataagaggagatactacacatagcgatataatgggactgaataaaatacataacatatcaatttgcaatgatggactcgattatggaataaatatagacaatcatttctatattagaaatcatatcattagtaggcctagcattagagactctgacgatgaagagttagttgcaaatatcttgggctatatatttttagatgataagccaacatcaggatcaacatcgctcgatacattttacggtgaaggttcgacgagtcatgcaatccatacacgaacccatataatgcgcctacttatcagcctttgggacgttgggacggtatttttcactatatacccccaagtttttagacatgaaaaaagctcgatatattataaatatatcgagcctttaagttactgtttttcaatatcgttcaaaatcttgataattacagtatacggttttatgaagtggtatatttgcaaatgcttattttgcaaggtctatttgcttgatttatcctacaatcgtaatgcaaaacccatgaccggaagcaacgaacttaggttcaatctcactcaaatccgaggatag

SEQ ID NO: 31871 - DNA, 642 bp, Escherichia coli
atgacagagattatcaaagatttataccaatttacagaggtaatggagccgattaagctttcaatgcaccaatacttattgatgacaaatgagcctgttctcattcagaccggagccgtatcacaagcgcaaactaccattcctaagttgcaagagttgctcggtgaacgcaaaataaaatacattctaatttctcattttgaatcagacgaatgtggcggacttgctttggttctcaaagaacatcccgaagctgtcgcggtttgttccgaaaccacagcaagacaactgatggggtttggtattactaacaatgtgcttattaaaaagccgaatgaaatatttgccggagatgattttgaatttcaaactatcagttacccatctgaaatgcatatgtgggaaggacttttattttttgaaaagaaacgtggtattttctttagcagcgacctcatgttcggcatgggtgagaatcacggacaagttatcgaaagcagttgggacgcagcggtaaaatcaagcggcgcagatacattgcccaatcaagaatccggacaaaagctatcctcggatttgagtgagattgaacctaagttcgttgcttccggtcatgggttttgcattacgattgtaggataa

SEQ ID NO: 31872 - DNA, 417 bp, Escherichia coli
atgattcaaaaattatttgatgcaaataatttgaactttagatcacacattctgggcaatgcatcttcatctcaagaatgtcctcgttactatcaagctgtttttcttgctttgtatgaattaatcataaatgaaaacatgcaacttgacgatgaacagaaatttatcgctcagttaggagacagtgtacaacgttcaatggtgcaaaccgaagggggccgttgggcagctagcgctcgtcagaaaagtgtcgaagatttatgtgctttaatcagacgatattttaaagaatcagaaaataaatttatcaatcatgcttggcaaacactgataagaactctacttaataactcaagaacagaacaaccaaattatgattttaaacagggaggtgatgctgccaacttactgatttag

SEQ ID NO: 31873 - DNA, 2175 bp, Escherichia coli
atgccaactatcaaagacatagcaagaattgccggtgtgtcgcatgggactgtctcaaatgtgctcaatggcagaggaaatgtaagcgttgagaagattgaagcggttcaacgtgcggcccaagaagttggctatcagttaaatgcgcaggctcaatcattgagagctagcaaaagtcagggagtggccttgattctgccaggcatcaatgcggaacgttactatcaactttatcggggattacaccaggtcttgcaaccttcactctgcgaaccgattgatctttacctgactaatgatttgcctaatctggaactggatattttacaaacgctggcggcaaagtcttaccaggctattgtcactgtgagttgcttggataacagccagccctattacgacatgctcaggctctccccggagaatgtgttttttgcgtatcgtcagcccgccagtgcagtttgttattttagccttgactacgtgaccgcaggggaagaagctgcaaggagggcactgcagcagcacccgggtcatattggtgttttctgtgaaccgctggaattttcccacagcgcgcgctttactcaagcgatacaaatggtatgccgaaagttaagcctgcacacaaagcttacaattatacccgcgcatgccagtgaagttaacactgtcgcgtttgaatttttccaaggggtcatacccgatctgtttattgttcaggacagtgagaagacgcgcgcactgacgcaggcggcttggtttggaagttctcagccctgcccgccgatagtacaactgagtgacaatcttcctgcatcttttgatggaatcaccagctatcagatggattatgcccgcctgggaacaactattgctgcatgtattcgccaacccaaaagtaaaaagaagcaccatattctgacgaattgcggtttttcttggaatggacaatgcgctccgtctcatgagaccgagacgacactgaatatgttaattttgcccagcccttcgaccgatgcgctgaagaaattgttaccccacttttatcgtcagaccggcattaaggttaatcttgcggtttatccgtatgatgaagtttttgaaattctctctcatcttcacttgcacccttattacgatttactgcgaatcgatatggcgtgttttccctggtttgcagaaaaaacattattaccgctggaatcggtctcccctgagctcccgttattgctggataacttctctgagcaacttcaacagtacttcagcctggtgaatgggactgcatgggcaattccctttgatgccagtatgcagcttctgttttatcgacgagatctgtttgaagatgcaacgattaaacggatgttttatgaatccacaggaaaagagttaactctaccagagaatttcgcacaatttgatgagattgctactttctttagtcaacggcatcagccaaaaaataaacagcgtccaatgggaactgcggtaacgttgggcagttcaggacttattgccactgagtacttgctgcgttactacgcgttaggtgggcgattggtgcgtgaaggcgagccgatacaacttgatacttcgcttgctgccgttgcactcgaagaatatctacaacagttgcctgttgccgtgaatattgccggtgagtggtggaacgatgctgttaaacagtttgagtgtggaaatctcgccatgctgattatgtatctcaatttgtttaacgatgttgcgcatacgaccatcgctcccacgatcggctatgctcccgttccagggcagcttccacaattgggtggtggttctattggaatgtctcgctacagtaagaagaaaaaacaggttgagcagttttttcattggctttattccgatgaaatttcgcgtcatctggttctgttggggggcaacagcgcttggtctggaatatgtcacgatcaaaacgttctcaatctctacccgtggtttaatttactgaatgaaaaaggcatgaagggaatacgtgagtctcagggaagtcaaggtgagccttttaacctgcgtcaggcagagattatcattgggcaaggggtgacgaatgcgattaacggcattatgaacgtcaatcaggctgtggaatatatcaatgcacggatcagaaacgaaacgggggcctga

SEQ ID NO: 31874 - DNA, 825 bp, Escherichia coli
atgaaaattcattttctgggaaccgcggcatccgaagggatacccaatcctttttgtcgttgtgagcactgtcagcaagcccgtatacgtaagggaaaaaacattcgtacacactcttccgcgattattgatgatcaactgttgattgacgtcgcgccggaatttagccaacagctgctgcgcgacgacatggatgcaactgaaatcaggtcgcttctgtttacccatactcatcccgatcatttcaacgtcggcgatcttttcagccgaatggagggttacggatttgagattacccatccgctgaatatctttggtaacgatcgtgcgattaacggtgcggcagaggttttgccgggctatagcgcagagcgctttgcctttcattgcctggtacccttcgtcaccgtagatacccgtggctatcggataactccgctgctggctaaccatgctaaatgggagctttgttatacctggtttatcgaaaaagaaggccagtcaatattttacggtcatgactctggctggtttcctgagctcacctggcagtggctggaagggaaaaaaattgatctggccgttctggagtgtacctacggctttaatggagaaaatcgtaccaataaccatatgagtttggaaacggtgttcgctgccagggacagactggcggaactggactgcctgaagaaaacaagtcaacttgtcgtctcgcatatttcacacagcggcggtctcctgcacgatgagctagtagcagcatgcgataaagagaacattcttgtcgcttgggatgggcttaacctgagtatcaaccaataa

SEQ ID NO: 31875 - DNA, 1236 bp, Escherichia coli
atggacctgaataaaaccccacgtctgctggttatgatgttcatacaatatttcatgcagggtgcctggaatatgaccatgggactggtattaagtacctatggtatggcaaccattattggctcatcttatgccttgcttggtctggcgaccattctttctccactctttattggtatggtcgccgaccgttttttctcgtcacaaaaagtcatggcaatcctgcatttaattaatgctggtgtactgttgtttgttccacaatttattgaggcacaaaacacgggtatgacgttgaccatgatcttcctagtcggtctgttgttttatccaacaactgcgctggctaacagtatcagtttcagccacattaacggggtgaaatatttcccctttattcgtgtgttcggcacatttggctttatggtcatcggttttattattggtgaaatgggctattccggaaataccatcacctggtatatagcatcagcctccggtgtcgtgcttggcctttactgctttacgttaccacacacaccaccgaaagcaaaaggtagcgtatttacactccgcgatctgttatgtctggacgctctggcactcttcaaggaccgtagtttctcggttttgatgctcagcatttttgtcctgatgatccctaaaacagcttattccgcttatatcccagtctttttaaaagcgcttggattcgagaacgccgcgtcaatgatgcaggtcggcatagcctgtgaagtcatttttatgttcctgctctcgtttttcttactgaaagccggcttcaaaattactctcatgttgggtgccgtatgctggatcatccgcaccctgttgtttgctcatgcatcactggatgccaacatgatgtttgtgctgatcggtctgatgttgcagggattttgctgggactttttctttaccgtgggcgacatttatgttgaccgtaaagccgcgccagagattaaagcgcaagcccaaagtttacgattcatcgtctcgaacggcgtcggtttgctatttgcctctaccgtatgcgggcaaatatttaacaacactgtgacggaacaaggcccacaagcgttaccgcaatgggaaacattttggctggtttcagcaggcgttgccgcagtggtcagcgtattcttcctgatattcttccgggacgatatttcaaaacgcaaagcagatctcccattgaaaaaaacgcactactaa

SEQ ID NO: 31876 - DNA, 714 bp, Escherichia coli
atgaataatctggccgccatcatcaatgagcaaggattgttgcctttaactacgatcatcaaaatcagcatttcatttattctgggtggtattataggattggaaagagaatcgaaagggaaaccagtcggcttcaaaacttgcgttattttatctgtagccagctgtgtgttaactgttgtatcaatacaatctgctgaatactatgctgaaatttcgatgaatatccgtagcgatcctatgcgcctagcggctcagattatcagtggtgttggttttcttggtgcgggagtcattctgcaccgacacgacgatgctatttcaggtctcacgactgcggcaattgtctgggcatctgccggggtgggaatcacctgtggcgctggtttttactttcatgcttttttttccacggctttatttttattggcaatcaaactaagtccattcattattttcttacagactaaagatcagtttcccggaaaagtaaaagtccgggttattcttgatgaacgcgatgcactcgaaaatctgataacacgcatccatcagcagaaaaacattattgaaaacataacaatcagggatattaagaagggtaaaattgaggttaatctcaaaatagtaattcgtaagaagatgactttgcctgacttgtaccacgatctcacccatgttgaacacgtctgcactattgcccttgaacattaa

SEQ ID NO: 31877 - DNA, 768 bp, Escherichia coli
atgaagtataatatagggtatttgtttgatcttcttgttgttataacaaacaaagatttaaaggtacgttataaaagcagcgtatttggttacttatggtcaattgcgaatccactgctttttgcaatgatatattatttcatttttaagctcgttatgcgagtgcagatcccgaattatacccttttcttgattaccggtttatttccgtggcaatggtttgccagctcggcgacaaattccttgttttcgtttatagccaatgcgcaaataatcaaaaaaacagtttttccgcgctcagttattccattgagtaatgtcatgatggaagggttacatttcttgtgtacaattcctgtgattattgcattcctgttcgtgtatggtatgcgtccatcgctctcatggctctggggcgtaccaattattgcgcttggtcaggtgatttttacatttggtatttcaatcatattttctacgctaaatctgttcttcagggatttagagcgatttgtcagccttggtatcatgctcatgttttattgcacgccgatattatatgcgtcagatatgattcctgaaaaatttagctggattattacctataatcctctggcaagcatgatcctcagctggcggcagctgttcatggatggcgtcttaaattatgaatatatttcaatcctttacattacaggtttagtcctgacaattgtgggcctgagtatttttaataaattaaaatatcgatttgcagagattttgtaa

SEQ ID NO: 31878 - DNA, 741 bp, Escherichia coli
atggaaccagtaataaactttagtcacgttacgaaagagtatcctttttaccaccatattggctcaggaattaaggatctcgtatttcaccctaaaagagcttttcagctgttaaaagggcgtaaatatcttgcgatcgaagacattaccttcaccgtgggtaaaggcgaggccgtagcgctgattggtcgtaacggcgcagggaaaagtacctccctcgggctggtggccggcgtcattaagcctacaaaaggcactgttacaacccagggacgcgttgcctcaatgcttgagctaggcggcggttttcaccctgaattaaccgggcgagaaaatatttatctcaatgcgaccctgcttgggctacgccgcaaagaggttcagcaacggatggatcggataattgagttctccgagctgggtgatttcattgacgaacctattcgcgtgtactcaagtggtatgcttgcgaagcttggattctctgtcatcagccaggtagaacccgatatacttattatcgatgaggtacttgctgtcggtgacatttcgttccaggccaaatgtatacaaacaatacgagacttcaaaaataagggtgtaacgatattattcgttagccacaatatgagtgatgttgaaaaaatctgtgacagagttgtttggatcgaaaaccataaactccgcgaaattggctcagcagagagaatcattgaactttacaagcaagcaatggcttaa

SEQ ID NO: 31879 - DNA, 1893 bp, Escherichia coli
atgaatagtatcaaaatttatacatgtcaccacaaacccagtgcttttctaaatgcctctattattaaaccactgcatgtcgggaaggctaatacttataatgatattggctgtgaaggggatgatagcggagacaacatttcctttaaaaaccccttctattgtgagctgacggcccactactgggtgtggaagaatgaatctctggctgactatgtgggattcatgcattaccgcagacacttgaactttgcagaacaacaaaatcatcctgaggataactggggggtagtcaactacccgctcatcaatgccgaatacgaaagccagtttggattaagtgatgaatccataagcacctgcgtcgatggatatgatctgctgttacccaaaaaatggtcggtaacatcggcaggaagtaagaataaccttgatcattatgcaaaaggtgagtttttacacattaaagactatcagtctgccctggatgtcgttgaagagctgtatccacaatataaagctgcgattcaacaattcaataatgcaactgatggttattatacgaacatgtttgttatgcgcaaagacatgttcctggattattctgaatggctttttgctattttgtctaatcttgaagatcggatttcgatgaataactacaacgctcaagaaaaacgagttataggacacattgctgagcgtttattcaatatctatatcatcaaatgtcaacaagataaacagctaaaaataaaagaactacagcgcacgtttgttactgctgaaacatttaatggtaaattaaagcccgtttttgacgaaagcgtaccggttgttattagttttgataataactatgcattaagtggcggggcattaatcaattcaattgttctccattctgatgcgagcagaaactatgatatcgttgttctggaaaataaggtcagtcatttaaataaacaacgccttatcaagctagttgctggtcataacaacatatcattgcgcttttttgatgtgaattcattcactgagatgagtgatgttcatacccgtgcacattttagtgcgtcgacctatgcgcgcttgttcatcccgcaacttttccgcgagtataaaaaagttgtgtttatcgattctgacaccgtggtgaaggctgatttggcgacacttctggatgtcgagatcggcactaacctggttgccgctgttaaagacatcgtcatggaagggtttgtgaagtttggtaccatgtcagaatcagatgatggcattatgcctgcagagcaatacctgaaaaagacattaggaatgactaatcctgacgaatattttcaggccgggattattgtttttaatgtcgaacaaatggttacagagaatacctttgctcaattgatgtcagcattgaaagccaaaaagtattggttcttagatcaggatatcatgaacaaagtcttctttggccgagtcaaattcttaccattagaatggaacgtgtaccatggtaatggtaataccgatgatttcttcccgaatctcaagttttcaacctatatgcgctttttgcaagccagaagaaatccaaaaatgattcactatgcgggtgaaaacaaaccatggaatactgagaaagtcgatttctatgatgattttcttgagaatgttttaagtacgccatgggagaaagaaatctactatcgccagttacctgtggccacggtagtacctaaccaacatactgaactgcagcaaaccgtgttactgcagacaaagattaaaagagctttaatgccatatgttaacaaatatgctcctgtcggttcgccaagaagaaataagctcatcaaatattattataaagttcgccgttcgattcttggctaa

SEQ ID NO: 31880 - DNA, 1155 bp, Escherichia coli
atgaagcgtaacaatattctcatcgtcggcgctggtttttcaggtgtggtcattgcccgccagcttgctgaacaaggtcacaaggttaaaatcatcgatcagcgtgaccacattggaggaaactcttatgacactcgcgatcctcagactgatgtcatggttcatgtctacggtccgcatattttccatacggataatgaaaccgtctggaactatgtcaatcagtatgcggaaatggtgccctatgtgaatagagtaaaagctactgttaatggtcaggttttttcactgccgattaatctgcatactattaatcagttctttgctaaaacctgttctcctgatgaagctcgcgcgctcattagcgaaaaaggtgatagttccattctggaaccgaagacttttgaagagcaggccttgcgcttcattggtaaagaattatacgaagcgttcttcaaaggctacaccataaaacagtgggggatgcagccttctgagcttccggcatctatactcaaacgtttgcctgtgcgtttcaattatgacgataattatttcaatcataaattccagggcatgccgaagttaggctatacccatatgattgaagcgatcgccgatcatgaaaatatcactctgcaattacagcgtgagtttgcggctgaaaatcgcgaaagttatgatcatgtattttatagcgggccgttagacgccttctattcataccagcatgggcgtcttggctaccgtactctggactttgagcgatttacctggcaaggtgattaccagggctgcgcggtcatgaactattgctcagttgatgtcccgtatacgcgcattaccgaacataaatatttttccccgtgggaaaaccacgaaggctccgtatgttacaaagaatatagtcgcgcctgcggtgaaaatgatattccttactatccaatccgccagatgggcgagatggctctgctggataaatatctatcactggcggaaggtgagaaaaatattactttcgtcggacgcttagggacttatcgctatcttgatatggatgtaacgattgcagaagccttaaaaacggccgataaatacctgtcttcattgtccaacgacgaaacaatgcctgtatttgtggccgatgtacgatga

SEQ ID NO: 31881 - DNA, 1317 bp, Escherichia coli
atgcgcaagtattattatttttttatatattccgtaatatcttttaattccatagcagcagatccacaagtgaaacaagatgatggggtgggtagtaattctttttttattacaagttcttctaacacaccaaccaagaaagaaaatgtacaggggactaattctgttgctattggcaataatgttcagattaagaagggagatggttcagatctcaaaaatatgagtgacggttcagtagctattggaaatggtgcctcaactatgtatgaaggaactactgctgtgggtaaaggggcaaaagcaactggctggcgctcaacagcaattggagtgggtgcgaccacaaatgctgaatcagctacagccatgggtaatggtgcaaatgccaataactggggggctagcgcatacgggactatcgcaaaagcaacgggtacaaactcaacagcaataggtaatgcagctcaaagttcaggagaactttctacagcattaggtgtttcatcacaaagtactgggcattattcagcagcgctaggtactttatctaaggctgaaggatatggttctgttgctaccggccttcatgctaatgcaaaatctcaatatggtattgcactcggttcatattcagtcgctgatcgtgccgcacttgatgatacaatgttgggagctatttctgtaggcggtacagctaatgacactctagggtacaggacacgtcaaattattaaccttgcagcagggacagaagataatgatgccgtgaatgtatcacaacttaagaaagaggcaggagaaagagttgcgggcgatgcagctaccttaacagcagctaagaattacagcgatgctggtaataaacaaacgctgaaaacagctaatgaatatagcgacgctggcgatgcgaaaacattacagacagcaaagaattatagtgacaccggagacgagagaacactgaacagtgctaataattataccaatactgccgttaagaaaagcaatgccaatacgctttatcaggcaaatcagtatactaatcagaagttctctgaattgcgtaaagtagttgatgaaaatcgtaaacgttcggatgccggcattgccggagctatggctatgacggcgattgcacctgtcccctataaagattattcattcggtatggctgcaggtggctatcgcgatcaaggtgcaattgcggcagggattaatatcaaaacaagtgaaagctcgttaatgaaagtaaatgcatcttgggacagccagaatggtggtggtattgcggctggttttaatgtcggatggtaa

SEQ ID NO: 31882 - DNA, 552 bp, Escherichia coli
atgaaagatatgaaagctgttgtggtttttaccgggaaggatttgaacataatgagaactgaggggggggcaggctactggcatgccagaacagacaggctcaacgatgccgattacctcatagcagtaagaaacagaagagaaacgtgggcagtaaaagacctggaacacggcacagcattcctgatcgccaaaattaccgggtgttttaaaaaccctgattacgaagacaggaacgtcataacctttgatgaatacgcagaaattcacactccaaaagcatggaaaatgctaaccgatggtcagcgctatccggttgcttacctgaacgcacaggaagcttttttacgtattggggtaacaccggaacaactggaatggaagaaattccatccttcatccccatcggttcctaatacagtggttcctggtctggctgaagagaaaacagaaaaactctcccttaacgaggcaattgaaagagccaaaaaggatattagcaacgcaacagggattgatagctcagccataacaataagcatcaagatctga

SEQ ID NO: 31883 - DNA, 213 bp, Escherichia coli
atgaaaaaagaacaaccctttgaaaacatggaattaacatggtcatacattactacttgtataagtgtaggatgccacgattgcgctcataacatgctcaaatacactgagcaacagaaagataatgatgcttttgattttggtgacatggcttcatgtccaaaatgcgggtgtataaaatttgatggagtacatcctggcctggttctgtaa

SEQ ID NO: 31884 - DNA, 264 bp, Escherichia coli
atggctgcatacactaaagaaacagcgcagtttttacaaaacgtcagtgacgatcggacatggtggcagtcccggtataatccgggagacagtgttccctattctggaatttatcgctgtacggtctgtgggaaagaaatcactagtaacggcagcgatccgttcccgccgcaaaatcatcatcaacacagtcagcaacaagcaatcacatggcagttgattgtcagaacggacacgaaaggcgaccgtttcggtgtcaaataa

SEQ ID NO: 31885 - DNA, 282 bp, Escherichia coli
atgataaaaagcatcaagcataaacgactaaaaaaatttgctgaaaccggaagcatggcaggattacctgctcaatttgaaagccggttgaagatgattttgactgcactacatacggccacaaacttacaggacatgatggacattcctgcgcttcgttgccatccattaaagggcgaccgcactggagagtatgccgtcgaggttaacggaaactggcgagtaacttttaagatcgatgaacctaatacgttcgatgtagatctcgaagactaccactaa

SEQ ID NO: 31886 - DNA, 291 bp, Escherichia coli
atgataaatctctttgaaccggttcatcctggcgattttattcgcgagatgtacatggagccatttgatatatctgccgtagacttagctgatcgcttgcacgtatcgccatctactttaagcagagtaattaatggtaaaactgatctgagtgtcgaaatggctctccggttatctaaggttttaggtagaagtcctgaatcatggattgctatgcaggcgcaacatagcttggctaagagcagaaaatctatagagaaagaacttgagacgttggttccgcttgcgtga

SEQ ID NO: 31887 - DNA, 498 bp, Escherichia coli
atgaacagtcttttaacgctggcgaaggacttagagcagaaatcgaaagcgcagcagcagactaccggcgagatgctgaaagccgcattcagcgagcacgagaagtctgtcagagcggaactgagcgaaagcgagaagagaatcagcgccgccatcctcgaccacgaccggaagctgtcctcagccatgagccagcgcacgaaagggatgctgcgcatggtcagccagacgtggctgaccatcgtcctggtctccgcgctgctgatcgcctcgagcgcaggcattctgtggtggcaggggcagcagatgctcgacaattacgcgagcatccgggagcagaaggatgcgctggagaagctgaacgcgagaacgtttggcgtgagtttccagagcgacagcaacgggcagtttctggtactgccgaaaggcatgaaagcagaaacgggctggacagtggacaacgggaagcggaacgccgtgaaactggtacgggagtag

SEQ ID NO: 31888 - DNA, 216 bp, Escherichia coli
atgacggaactggaaaaacagttgctgagcgcattagagcagctacagcaggactactcgaaaaggctggacgagtgggagaatgccttcgcggaatggcggacgatgtctggtcttatgcaacgggagaacgcggcgctgagcgagcgcgtcacgggcttgagcaggcaggtgcagagtttgagcgagcagctgcgccggttgtcacaaggctga

SEQ ID NO: 31889 - DNA, 318 bp, Escherichia coli
atgattacagataagcctgatccatcccgtaagctatacagttctttgtggttactctccagtcataatgaaaattataaatgtctggtacagacttgtctggcaaagtggcaacaggttctcacggatataattcagagtggtataaacgaacatatttttagagtcgttgatacaaagcgaatcgcacgacagcttgatgccatgttatggggttacagtgaatatctgtcaaatccggtatctgaagatatcgtgcaaaatgcaaaaggggatatcgacgatttcatacaaaaaaacttattgataataaaataa

SEQ ID NO: 31890 - DNA, 141 bp, Escherichia coli
atggataacgaaccgaaaaatgaagagaaacggcgggatgaaatcaacctgctctatgtggctgccacgcgggcccggaatacgcttgttctgaacagtgtacttcaccagattctggcaaaccgtcgcttcaccggatga

SEQ ID NO: 31891 - DNA, 339 bp, Escherichia coli
atgaaaaaatattcttcagccgtccttgcactcattctcaccagcacctgtatgacagcctccgctgccacacaagaaatctcaaaaaaagcctatgtctgtgatggaaacaagacaatggaggttgtctatatcaacaccactgccggaaactcctatgcagtgataaaccagatggatgagatgatacccatgcagcttatgaaaatagcctccggagcgaattacgaagccatcaacaaaaactactcatataaactgtacacaaaagggaaaaaagccgatctggtagaagggaatgacagacctgtattaagcaactgctcatcagcagaatga

SEQ ID NO: 31892 - DNA, 309 bp, Escherichia coli
atgattactgataaaaaagctgaagtgctcgaacagcggggattatggcgcagagccgctgcacgctggcaggaattgctgctgaactacctgcaggaagatgatcggatctgtatccagagacggatacagcactgcctgaaacgtgcaaaaatgaaatcacagagagcaaccagccaggaagagttctccttcagattattacgcagttctgcaatacagacggaaaaagaaatgggcatatacagggaccgcaaaacagcacatgatcatttatatcgccaggatggtaaaaaatctccgcactga

SEQ ID NO: 31893 - DNA, 735 bp, Escherichia coli
atgatttttgtctgttctgttgtactggctgacagggcattcaccctgcagtttgccgggaaaatgctgtccctttctgcaggagatgtgcttctgattgatgatactgatcgtgaggattttcagcctcatgctgcgcatatcactgaggtgcggctggatgaaaatatcatccgcagatatctggagagttgtggcggcaaccgggaggccgacaacatggtttcttctggtttcatcagagtggcctttgctcatcctgcgttgttgcgtgacgttatgcatcatctgaattcgggaggatttgttcatcccggattttccgagcagatgtttttttcctgcattgctgtctttgcatcaaaaaaaggctttcttcctttgttgctgggcggaatgctttctgtggccgggagagtgaggcatatcatctgtactgacctttcacgccagtggaagctgcgggatgtcagcagtcgtttgtatatgagtgaaagtcagctgaaaaagaaactgaaggaagaaggatgttcgttcaccggaatgcttctggatgcgagaatgggctatgcacgccgtctgttacaggcccgtctgccggtcaacagggtggccgcgcagtgtggttatgtaagcacatcttattttatctgcgtgttcagggaatgttttggcgtcacgcctcaccggatgctggcgcttcaggagcacgggcagcataaaagtgaatgctga

SEQ ID NO: 31894 - DNA, 849 bp, Escherichia coli
atgaaacttagcccacgtccgttgatcgccgccgtttacgcagcattgctgttcccgctttacggccaagcacagctgtacaactattcgtatactgatacacgcggcacgaaagtaaatgctgaaccgtccagagaatatctaaacccgggcagtgcaattacgttgaacctgatatcaggtctcgaccgctacgagcgcgttaccgtgacgcgttcatcagataatgtgcagatgttccggagcgtcactgaccttgtgactgtagccgacaggatcaccgccgcagatggcagtgagtactacgggaaatccataaagcttcctgtacttggcgaagggacttttgctcttaaatctgaaaccctcgacaataagtcaaatgtcgtggcatcaacgagctacgccttcagcattgataccacgccgcccgttctacctgacccgatgcagtggatcagagctggtttccagtacggtagtctggatattttcggcgacagaaccgcaacacaagccatttcgttattaaacgtatctgatgcgaggtccggtctgcataaagctgagtggttcgctatcgacagtaatggcgtccgtcgctctgttgatgcccagttgaattcgctgacgggggggtgcaggcgctggccgcagtggctgcgggaagcacggttgcacctgtcagtccggcgtattacaccgtgggttttcgtgtttatgacaaagctggtaactggactgagacatcgcaccgttctggtattgatcgtaccgtccccagctacattcaacatcaggtgcggaatgcgaaaacaggcgtctgggaagattatgttcctggcatga

SEQ ID NO: 31895 - DNA, 348 bp, Escherichia coli
atgatggcacccacaatttatcaccgtatcgacggtaccaaatacaggaatgtctgggttgttggtgatctgcatggttgctacaccagactgatgtccgaactccatcgtgtggattttgacccggcgcaggatttactgatatcggtcggcgaccttatcgatcgcggtactgaaaatgtcgaatgtctggaactattacagatgccctggttcagggcagtgatggggaaccatgagcggctgatgattgatgcgttaagtccagatggcaacgtgaataactggctaatgaatggcggacaatggttcttcatgctggacactgatcaggaaatattagcctag

SEQ ID NO: 31896 - DNA, 360 bp, Escherichia coli
atgccaaacttccagccgttggccattttccgcgagttccagccggaaggttgggtagagttcttccatgaattgatctgtaaagagatggaaagccgccgcccggaactggtccgtcgagttgagtgggcgcaagaggttatgttggcagaggcagagctgccgttcgaaccggaatttattgatgatctggcagctaaagggctgcataccctgtttgatgtggttacccgccgtcatgagcagttggttgtcgaattgggtttagaggaaactgcggcaagaagacttctcgatgtttgctatgcacgtagcgatgcatgggaaaaagagaacggcggcactatttacgttcgctga

SEQ ID NO: 31897 - DNA, 681 bp, Escherichia coli
atgagcaaatacaccgaactgatcactaactaccacgctaccaagccactcttttttgaccatatagatctgagcacccgcccgctgattgatgtgtccagcactatgtcagggcttataacagccttcgatatcgatactgctgtcggtgtacagctcgacatcctcggtctgtggatcggacgcagtcgcatagtcagccagccaattagcggagtttatttcagctgggacactgacgggcttgggtatgaccagggcatctggcaagggccatatgatcctgattctggctatacgacgctaagcgatgagacgtaccgcatcattctgaaagcgaaaatcgctatcaacaactgggacggtcggaacgactctctgcctcccatccttgacgctgctaccgcaggctcaggcctgaggatgcagatcgtcgacaaccaggacatgacgatttcggtctgggttttccctgaaactgatatttctgatgtgtctctcgaactgatcgccgctatcaaacagggctatctcaccgttaaatcagctggcgtatgggccggtgatgttgaaacgccttcggtagaaacaccgtcagaaggctctaaattctttgggtttgatatggataacgaatacatcggcgggttcgatgttggagcatgggggacaatactctaa

SEQ ID NO: 31898 - DNA, 867 bp, Escherichia coli
atggcaataaacaactttaaacctttcgcgcttgatccgaacgctaacgtcacctcacaagctgactgggaagcacttccggctctgctttcagggtttacggcaggtaaagcatccagcgcacaggtcaacaaagctattcggcaagccagctttatcgcggcagcgttggcgcagtacaccgccaacaaaagcgggctggatgtgcttgatgatggagacctgaacgggtttatatccaaaatggggaccgctttcgggaaagatttccaggcgcttgatgccacgctgtcggcattagctgggctcgcaacaggtgcaaataaactcccatatttcactggaaatgatacagcagcgcagactgatttaacttctgttggccgtgacattattgggaaaaatactattgctgacattctcacataccttggtttgggagaagcggcgaaaagggatgtcggcacgggtaatgatcagatccccgatatgtccagcttctccgcgtctgatacagcttcttcaggctggtatattctgccgaacgggcatattcatcagtacggcatcgtcactcttgcggaggtttctacctataacaaacaaactttaggtggagtcgattactacacgcgcttttataccgtgacgctcccaagagcctatccaacagcgcatatttcgacggcggtcacgttagcggggcgaacatttgataaacaaggtccagagtttggttattgggccaattgtaaccggaccgtgaattcagccgaaggggtatctacaacacaatttgtggtagaggttatttcgaaagacacaacttatgtgccggtaattcactttacgtccgaggggtattga

SEQ ID NO: 31899 - DNA, 195 bp, Escherichia coli
atgtattttagtccaaccatgcagggtttttttgtcggtgacaagcacgatgtatctgtgatgccagcagactgtgttgaagttgatagtgaaactgaaaaaaatatcagggagttaatcatctccggaaactacgtaactatatcgggagggaatgtttctgcgaccccgagaggtgacggatccagtagctaa

SEQ ID NO: 31900 - DNA, 1776 bp, Escherichia coli
atgagggtccaggccgaagtttcagcgagagctaaacgagtcaataaattcggaggtgaaccagaagttactatttttgaaatatatgatgaaattaaagagttaaacgttggcatctcaaaagaaattatcaaccaacttattcaactggaaatcagcactgaaaaagcagtattatataaaaataattcaggatataaactatttcaggcagcagtaaaaaatggttcgaaaataattataataagcgacatgtatttcccaactagtattttaaaggaattgttaatttcatgcggctataatgttgataacatccccatatactcatcaggagaaatgcgcgcatcaaaaaatagcggggaattatatactcttataaaagaacgtgagaaacctcgtcaaaattcttggctacatgttggagataatcctcgttctgatataagtaatgctaaaaaacatggaatccatacaattcaagcggactggtctgaatacgagcatggcacatcttttcattggagagcaaaagatgttgttggcgaatcattatataaagctttatcacttaaacaaacctcatcattttacacaaaagatccattaactgagattggttttaaagtatttgggcctttacttttaggctatatatcatggatgtcaaaccagttaaaagtccataaaattgataaagctcttttccttgctcgtgacgcacacttaatttacaaaatttataacaaatacttttcagacgatcagatagaaagcgaatatgtgtatatttctcgtgcctcttcttatatgataggtatgacagactggccaatgcatagaatatggcatctttttggcggtaaaaataaaaagagtctaaagaaaattctttctatagctggattagacgccaaaaaatatatttcagatatacacaacgttggttttcccaacgaggaatatatacctaaacaaggtgatgaacataaagttcactggctaataaataaactattttctaatatcttattaaaaaacactcaaaatagaaatgagtattctggttattttaaaaaagcttgtggtgaacataaaaatattgcattgatagatgttggctggatggggaatatacaatccgttttcgctcgctcacttagcgatggctgggctactaagaatatacacggattttatttggcaacatttcatggtgcaaatgataaccgctcaatatacaataaaatgtttggttggttagcgaactacggtatacctcaagaaaaatgtgatcttttctttgctggtggcattgaactgatggagttcgctatggctgacaacacaggctccacaataggttataaaaagactgctgacggcattatccccgtaagagaaaaaaacagtgattctgaggttagctatttaaataaagcacagcgacttcagtcaggaattattgcttttttcgaatatttacatcctttattaaataaagaaaatattgatgagttaaacagtacaacactgtctgagccattctttcaattagtctctaatccaacaacctaccaaattgaggcattgtcgtcactcactcattcagaatcggttggaggtaacgcggaaaggattatgctggcaaaaaaactacctttaaaagaaaggctgttccccggtaaaatttacgcatcagaattagagaccagttactggaaagagggcttcaaaagattaaacagaaagaaattttgggcaaaatacaactaa

SEQ ID NO: 31901 - DNA, 531 bp, Escherichia coli
atgagtggtttcataccatttgtcggtagcaagtatgagaacagtatctatgggctaaaattactggtcttaggtttgtcgcattatggtgatgctgatgataactatccagattttactaaggatgttattgcagagaatgcctatacaacaggtaaccgattcttcacgatactgactaatgtacttcgattgtctagggaaagcataactgatgatcaaaggaagataacttgggaaaacatagcgttctacaactacatacaacaaattgttggagaaaaaggtcgaatatctcccactaaagaaatgtgggatagtgcccgagagccattcctaagtgtaattaagcaactccaaccaaatgtgatcctcgttctcggtactgaactttgggatcatcttcctgaagttgatggtgttgaatggtgttggattagacatccaagctctagtaatttctcatatgatcaagcatttaataacctcaaaaaatcaataggcatggaaaatatcgtttatttaccataa

SEQ ID NO: 31902 - DNA, 1497 bp, Escherichia coli
atgggggcattaggtattctgggtactttcattggtattattattggtttactcaattttaataccgaaagtattgataccagcatccccgtattattaggtggcctaaaaacagcattcattacaagcattgtaggtatgttttttgccattttatttaatggaatggatgctttcttttttgccaataaacgaagtgcgttagcagaaaataaccctgaatctgttacacctgaacatatctatcatgaattaaaagagcagaaccagactctgactaaattagtctcgggtattaacggtgatagtgaaggttctcttattgctcaaataaaattactacgtactgagattagcgattcctcgcaggcacaattagctaatcacactcatttcagtaataagctttgggaacaacttgaacaatttgcagatctaatggcaaaaggtgctacagaacaaattattgatgctttgcgacaagtcattattgattttaatgaaaatttaactgaacagtttggtgaaaactttaaagctcttgatgcctctgtaaaaaaacttgttgagtggcagggaaattataaaacgcaaattgagcagatgtcagaacaatatcaacaaagtgtcgagtccctggttgaaacaaaaactgcggttgcagggatttgggaagaatgtaaagaaattcctctggctatgtctgaactgcgtgaagtgcttcaggtgaaccaacatcaaatcagcgaactctcccgccatttagaaacctttgtcgccatccgcgataaagctacaaccgtattacctgaaatacagaacaaaatggctgaagtgggtgaactgctgaaatccggagctgcaaatgttagtgcatctcttgagcaaaccagccagcaaatacttcttaatgcagattcaatgcgcgttgccctggatgaaggtaccgaaggattcagacaatcggttacccaaacacaacaagcatttgcctcgatggcgcatgatgtcagcaattcctccgaaaccctaaccagcacgttaggtgaaacaattactgaaatgaaacaaagtggtgaagaattcctgaaatcactagagtcgcactcgaaagaattgcatagaaatatggaacaaaatacgacgaatgtgattgatatgttcagtaagactggtgaaaagattaaccatcaactatccagtaatgccgataatatgtttgattcaatccagacatcatttgataaggctggtgcagggctgacttctcaagtcagagaatcaattgaaaaatttgctctatccatcaacgagcagttacatgcttttgagcaagcaactgaacgtgaaatgaaccgtgaaatgcaatcattaggtaatgctctgctttcaatcagcaaaggttttgtcggtaactatgaaaaacttattaaagattaccaaatagttatggggcagttacaagcattaatttctgctaataaacatcgagggtaa

SEQ ID NO: 31903 - DNA, 777 bp, Escherichia coli
gtgcaatacgaatggcgaaaagccgagctcatcggtcagcttctcaaccttggggttacccccggcggtgtgctgctggtccacagctccttccgtagcgtccggcccctcgaagatgggccacttggactgatcgaggccctgcgtgctgcgctgggtccgggagggacgctcgtcatgccctcgtggtcaggtctggacgacgagccgttcgatcctgccacgtcgcccgttacaccggaccttggagttgtctctgacacattctggcgcctgccaaatgtaaagcgcagcgcccatccatttgcctttgcggcagcggggccacaggcagagcagatcatctctgatccattgcccctgccacctcactcgcctgcaagcccggtcgcccgtgtccatgaactcgatgggcaggtacttctcctcggcgtgggacacgatgccaacacgacgctgcatcttgccgagttgatggcaaaggttccctatggggtgccgagacactgcaccattcttcaggatggcaagttggtacgcgtcgattatctcgagaatgaccactgctgtgagcgctttgccttggcggacaggtggctcaaggagaagagccttcagaaggaaggtccagtcggtcatgcctttgctcggttgatccgctcccgcgacattgtggcgacagccctgggtcaactgggccgagatccgttgatcttcctgcatccgccagaggcgggatgcgaagaatgcgatgccgctcgccagtcgattggctga

SEQ ID NO: 31904 - DNA, 222 bp, Escherichia coli
atgacgttggaggggcaaggtcgcgctgattgctggggcaacacgtggagcggatcggggattgtctttcttcagctcgctgatgatatgctgacgctcaatgccgtttggcctccgactaacgaaaatcccgcatttggacggctgatccgattggcacggcggacggcgaatggcggagcagacgctcgtccgggggcaatgagatatgaaaaagcctga

SEQ ID NO: 31905 - DNA, 1026 bp, Escherichia coli
atgaaaaagcctgaactcaccgcgacgtctgtcgagaagtttctgatcgaaaagttcgacagcgtctccgacctgatgcagctctcggagggcgaagaatctcgtgctttcagcttcgatgtaggagggcgtggatatgtcctgcgggtaaatagctgcgccgatggtttctacaaagatcgttatgtttatcggcactttgcatcggccgcgctcccgattccggaagtgcttgacattggggaattcagcgagagcctgacctattgcatctcccgccgtgcacagggtgtcacgttgcaagacctgcctgaaaccgaactgcccgctgttctgcagccggtcgcggaggccatggatgcgatcgctgcggccgatcttagccagacgagcgggttcggcccattcggaccgcaaggaatcggtcaatacactacatggcgtgatttcatatgcgcgattgctgatccccatgtgtatcactggcaaactgtgatggacgacaccgtcagtgcgtccgtcgcgcaggctctcgatgagctgatgctttgggccgaggactgccccgaagtccggcacctcgtgcacgcggatttcggctccaacaatgtcctgacggacaatggccgcataacagcggtcattgactggagcgaggcgatgttcggggattcccaatacgaggtcgccaacatcttcttctggaggccgtggttggcttgtatggagcagcagacgcgctacttcgagcggaggcatccggagcttgcaggatcgccgcggctccgggcgtatatgctccgcattggtcttgaccaactctatcagagcttggttgacggcaatttcgatgatgcagcttgggcgcagggtcgatgcgacgcaatcgtccgatccggagccgggactgtcgggcgtacacaaatcgcccgcagaagcgcggccgtctggaccgatggctgtgtagaagtactcgccgatagtggaaaccgacgccccagcactcgtccgagggcaaaggaatag

SEQ ID NO: 31906 - DNA, 753 bp, Escherichia coli
atgattttgaataccattgccgaaaagctgaagcgccagtcgaaggatgatttcaagggcaggcatttcgaggcctggctgattgtacaggcggttgcctggtacttgcgctacccgctcagctatcgtgacttggaagagatgtttcgcgagcggggcttcgaggtcgatcatagcacgatcaaccgctgggtattggcttatgcacctgtcatcgagaaacggctgcggcagtttcgtcgaccccattgcggctcggtccggattgatgagacctatgtcaagatccgcggcaaatggcgctatctgtaccgagccatcgataagcatggcaatccggtggatttcctgctgaccgctaagcgcgatctcgacgctgccaagcggttcttccgaaagatgcttaaagatgaacccttgttgtcgccgaacaggattgggacggacggggccaacaccttcccgtcaacgatcaaaacgtcggttgatgatgggcttctccatcccgatcccgtgcattatgtgaccaaacatctccagcaggggattgagagcgaccatttccgggtgaagaagaacatgccgaagatcggcggtttccaatcctttaacacggcgcggcgaaccatcgcgggtttcgaggcgatgctgtggctgcggaagggctttggcttttcaggcggctggaccgtcaatgaccagaatgatttgcttgcgcgcctcttcggactgcaaaaggttaacaaagcatga

SEQ ID NO: 31907 - DNA, 135 bp, Escherichia coli
atggccttgtcgcaaattcttcaggttaactcgatgttgaccatggggagagaagttgccgctcctgatattgcggagcgagccgatgattttgaataccattgccgaaaagctgaagcgccagtcgaaggatga

SEQ ID NO: 31908 - DNA, 189 bp, Escherichia coli
atgttttcaggtgtttttatcgttatggccggaatcctgtctcttctggagagtttcggtttcatatcttctgacgtaaaatggggagtgccgttagccattatctgttttggattacacttaatttatgaagcattcagcgccagaaaaactcatgtgaacgacaaagaaaattcctcccggacgtaa

SEQ ID NO: 31909 - DNA, 207 bp, Escherichia coli
atgaaattcatcgtaaaagcacttatctgttttgctgcgttgtgcgtgactacagtttatgcattcgataataaagaaatttcacgtggtgaaataaaatatagcgattatcttcctggtaatggctggacgttaccggagggttacacgcaagagcggtttattagctctatttataaatcgcataagcttaacgattttccctaa

SEQ ID NO: 31910 - DNA, 885 bp, Escherichia coli
atgccattcagcaattcttccctctccgcgcaagtgaaatcatatctgacgtttcttcctgaagaaatacgccagaaaatccttgaacatctccacggtgttattcattacgagcccgtgattggcattatgggtaaatccggcaccggcaagagcagcctgtgtaatgccatttttcagtcccgtatctgcgccacgcatcccctgaacggctgcacccgccaggctcatcgtcttaccctgcagctcggtgaacgcagaatgacgctggtcgatctgcccggcattggtgaaacaccgcagcatgatcaggaataccgagcgctttatcgtcagttactgccggaactggatctgattatctggatcctgcggagtgatgaacgtgcgtatgctgccgatattgccatgcatcagtttttactgaatgagggcgcagatccctcgcgctttctgtttgttctcagccatgccgatcgcatgtttcctgctgaagaatggaatgccacagaaaaatgcccgtcccgtcaccaggaactctcactggcgacagtaacagcccgggtggccaccctgttcccttcatcatttccggtactccctgtagccgcacctgcaggctggaaccttccagcgctggtgtcactgatgatccacgcgctgccaccacaggcaaccagcgcagtttattcacatatcaggggggaaaaccgctctgaacaggcccggaaacacgcacaacagacttttggtgatgccatcgggaaaagttttgacgacgccgttgcccggttcagttttccggcctggatgttacagcttctgcgtaaagcccgggaccgcattatccacctgctgatcacactgtgggagcgtctgttctga

SEQ ID NO: 31911 - DNA, 1161 bp, Escherichia coli
atgtctgaaaaagagagtatagctgtttccgttattatccctgtgcacaatgcggcgggatatatttccgacacattgagcactgttttgtcgcaaacattaaatgatattgaaatcattattgtcaacgattgttctgacgataataccttagagattgtctcggcgctggctgaaactgattcacgaattagagtcattaacaacacgacaaatcttggtgggggaggctcaagaaacatcgggttggatgctgctaccggtgagtacgttatttttcttgatgacgacgattatgtcgataacatgatgttggagcgcatgtacgcacgtgctagcgatatacaagcggatgtcgttatctgtcgcagccagtcttttgatcccgccttgcaggtttatgctccgatgccgtggtcagtgcgccaggagctgttacctgatctcaagtttttttcatcccaggatattccctctgactttttccgcacctttgtctggtggccatgggacaagcttctcaggcgtcaatttattactagtcatcagcttcgctttcaggaaatcaggacgaccaacgatcttttcttcgtctgcgcatttatgctcatggcgaacagaatttcggtcttaaatgaaacgttaatttctcataccatcaaccgtagtgaatccctatccgccacgcgagcagagtcgcaccgctgtgctgttgaagcattggtggcgcttaaagcgtttatctgtcagcaggggatgatggaacaccgtctcagagattataaaaactatgttgtcgtgttccttgagtggcatttaaacacgatttctggtccggcatttcacccgttttatcagcaagtgaaagagtttgttgttgccctggatgcaaagagtgatgatttttatgatgaatttatcgccgccgcccatcataggatcaccacgctgtcagctgaagagtacctattctctcttaaagatcgggttctgaaggaacttgagtttttccaggccaggagctccgcattacagcaagaagttgagacgcttacccactcattagccgggcaaaaggatgaaaatgcgatattgcataatcaattgcatgagattgaagagcgggtaacggctttgttgaataaatcgaacttttgctga

SEQ ID NO: 31912 - DNA, 1134 bp, Escherichia coli
atgaaaaaactgtgttatttcataaattcggattggtattttgatttgcattggaccgatcgtgcaattgccgcccgagatgccggttatgagattcacattattagccattttgtcgatgataaaatagcggaaaaattcaggacattaggttttgtttgccataacattccacttgtcgcccaatcattcaacgttttgattttctttcgggccttttctaaggctcggaaaattattcaaaacatcaatccagatttgttgcactgcattaccatcaagccctgtttgatcggcggttttctggctaaaagtacccatcgtcctgttattctgagttttgtcggtttgggccgagtattttccgcagagtctgcctgtcttaagctgctgcgaagttttactgttatggcatataagtatatcgccagtaacaaatgcagtttgtttatgttcgaacatgataaagacagagctaaacttgccgatctggttggtatcgattacaaacagactattgttattgatggcgcgggtattaatccagagatttacaaatactctctggagcagcagcgtgatgttccggtcgtcctttttgccagccgtatgctgtggagtaaaggactgggtgacctgattgaagccaaaaaaatactgagtaataaaaatattcactttacgctgaatgttgccggtattttagttgagaatgataaagacgcaattccgctggcgacgatacagaagtggcaaagcgaaggcgtgattaactggctcggtcattgctctaatgtatttgatttaattgaagaatcaaatatcgttgctttgccgtcggtctacgccgaaggcgtaccgcgtatcttgctggaagcttcctctgtcgggcgcgcttgtatcgcttatgatgttggtggctgtgatagcttaattatcaataactataatgggttgattgtaaaaagtaaatctgtcgaggaattagcggagaaactcggtttcctgttggataacccagaaacgcgcgtcgcaatgggtatcaatggcagaaaacgcattcaagataaattctcgagtgtgatgatcattaataaaacattaaaaacatatcgtgatgttgttgaagagtaa

SEQ ID NO: 31913 - DNA, 822 bp, Escherichia coli
atgaaaggcttttcggtacttatgtctgtttataaaggagaaaaggagaactatcttgatgagtgttttaaaagcctgcatgaacagacaattaaagctaatgaaatcatcttggttattgatggcccagtttctaaagaattatatcaggttatagataaatggggggagattctgcctattataaaagttaaacttgataaaaatgtagggcttggacaagctttaaatataggccttaaacactgtaattttgaattggttgcaagaatggatactgatgattattgtgtaaaggatagattttcattacagatgaaattcttcgaagaaaacaatgatataatggtcttggggggcgagatagaggaatacgaccaatccttaagtattccattaggcaaaagaacaacagcattatctcacgaagaaataattgaagttgcaaaaaaaagaaatcctctcaaccacatgacagtcatgtataaaaaaagttttatcttaagtattggaggttatcaacatcatttatatatggaggattataatctttggttgagagtattagcttctggtggttgtatttgcaacttacctaaggtattagtgcatgtaagagctggggaggaaatgatcaaaagacgaaaaggctggatatatatcaagagtgaaatacagctggcacgtttaaaaagtaagttaaatataaccggtttctgtaataactactatacaatgacacttaggatccttgccagactaatgccgacgccacttctaaaatttgtatattctaaacttagaacgtcaaaattagcttga

SEQ ID NO: 31914 - DNA, 165 bp, Escherichia coli
atgaaaggcgttcttttccgtgctaaagacgcaatcaaggaaaaattcggcgctcgctggctgccagcgaaggcgaagaacagcgatttcccgggcaactggtggattatcgagacaaaacacaacgtggcggacgttctggccgtcatccaacaatacgcataa

SEQ ID NO: 31915 - DNA, 1203 bp, Escherichia coli
atgatcttacgggcacttagggaaagctatgcagctcgtaatcctttaaaaagcggaacaattcaatatcttcattactatggaaatgagcgtcctgatattgagccagaaagtggatattttaaatcccaggctgaaactattacgatagttggaatgagtggttctggaaaaactaccatgattgagcaagtcatggatcatttccctcagattatagaacacagcagctataaaggagtttttcccggcttcagtaagcaaattgtatgggtaaagattaattgtccatacaattcaagtgtgagagacctttgtgaagagattttacaaaaattagatgatgcaattggtattgaacgaactacacctgagattagaaatggtgctctggctcgccagattgcacaaagaattaaatcatcatttttgggtatccttgttattgatgaaatgcagaggcttaaattttcaagaaccgggggtgagagtaagttgattgattttttacatgaaattgtagattccatgggggtatctatggttttttgtggaaatcatccttttgacgagacgctgacaaagaaaatgagaattgccaggcgggcagagtctggtggttacatgaaaattaagaatgttagatacgattcacaagactggcaatcgtttattcattatttatggccattacaatggacaaatgttgaaactccattaaatgatgagttaaacgaaaaattattcattttatctaaaggcaatattggattggctcagatgatttatcggggggcacaattaaaggttatcggtagcggcaatgaaatcatcactggcgcagtcttgtcggcctctgtaccggtactcgtgagtcatacggaggaatataaggatactccactcccgggggccgcgactgaagatgaggaagctaaatggctctctgcatctaatgagggtgatgcttcggctaaaatcatggcagagaagtccctaaagtctttgatccctggggatatagacaggccacagcacaaggaattcgtaggaaaaatagacgaggttttgcgcaatttcgacgagaaaatactgtctcttgaccacgatcttgttatcaacagaacagctgaaaagaaaaatacctacgatgctcttcagcgttgcgggcttataaatatagatccacttaataaattgtaa

SEQ ID NO: 31916 - DNA, 1239 bp, Escherichia coli
atgctatttagcgcagttactgttaatctcaataaaatcggttttaatttcactaccgaacaactctttttattaaccgcattaccctccgtttctggcgcattattgcgtgtcccctactcctttatggtgcctatatttggtggacgccgatggacggtttttagtactgcaatcctgattattccttgcgtctggctcggaattgccgtgcagaatccgaatactccttttgggatatttatcgttatcgctttgctatgcggttttgcaggtgcgaactttgcttcgagcatgggcaatatcagtttcttcttcccaaaagccaaacaagggagcgcacttgggattaatggcggattaggaaacttaggtgtaagtgtgatgcagctggttgcaccgctggtcatttttgtacccgtatttgcctttctcggcgtcaatggcgtaccgcaggccgacggttcggtgatgtcgctggcgaatgccgcatggatttgggtgccattactggcgattgccacgatcgccgcctggtcagggatgaatgatatcgccagttcacgcgcgtcaatttccgaccagctgccagtgttgcaacgcctgcatctctggctgctgagcctgctttaccttgccaccttcggttcgtttatcgggttttctgcgggttttgccatgctggcgaaaactcagttccctgatgtgaatattctgcgcctggcgttctttggcccatttattggtgccatcgcgcggtcggttggtggtgctatttccgataaattcggcggcgtgcgggtgacgttgatcaacttcatttttatggcgattttcagctccctgctgttccttaccttaccgggcacaggctccggtaatttcatcgcattttacgccgtatttatggggttgtttctgaccgcaggtctgggaagtggttctactttccagatgatcgccgtcatctttcgccagataaccatttatcgggtgaagatgaaaggcggtagtgatgagcaagctcagagagaagccgtcaccgaaacggcggcggctctgggctttatctcagccattggcgcagtgggcggctttttcattccgcaggcgtttggcatgtcgctcaatatgaccggctcgccggtcggcgcgatgaaagtgtttttaatcttctacatcgtttgtgtgctgctgacctggctggtttatggtcggcggaagttcagccaaaaataa

SEQ ID NO: 31917 - DNA, 249 bp, Escherichia coli
atgctcgtgccgtgtttcctcgcgggcagcatagtctacgagatcgtcggcacccaggccaagctgcgctccgataaattcgatgacctctgcagggatcagttcgcctggagccagcacccggccgggatagcgcaggacacacaattgcagggcgaagccgaacctgttgtgagcgcgccgacgcagcctgatatgcccaaggtcttcatcactcagcgtatagtgcttgagcaaatccgtctgtga

SEQ ID NO: 31918 - DNA, 429 bp, Escherichia coli
atgggcaggaacgccggcaagcagatcctcggggagatcgatgcgttgcagatattcgagccggtcgagcagccggttggccgacgaagagttcgagccaggctcgaactggcgcagccacacaaaacgggtcacccgatcatcagccgtctcctcgagcaatgccagcaactgttctcggatcgacataggcagccgactggcgatcctcgtctcgatgcgtcgctcggcatcgacgagagccgcggcacaaagccgctcgatcgtggatgtcgcgggaaggacagtgcgggtgcgtcggcactcggctacgaagcgacgggcgatatcctcgttcgacaccgccatctcggcttctcggaacaaccattccttcagctcgctcgcaccacgtccggagaaggtgcggaagccgtagagcccccgtaa

SEQ ID NO: 31919 - DNA, 198 bp, Escherichia coli
atgcccggtttggtttcgacgttgttaaaccatgcgtactccatgccttcgcgtccggtccagacgtttttacaggtcaccgaacaggtatggcagccgatacatttatcgaggttaagcaccatgccgacttgcgaacgtattttcattttttcgcctcctgtacctgatcgcgaccttcatcatccagccagttaa

SEQ ID NO: 31920 - DNA, 753 bp, Escherichia coli
gtggcattactgagccttgtgcgtgaagtttatcacgaaagtaacggttcagcaggagcgcgaagcattgccgcaatggtcaccaccaaaggtataaaactgagccgctggcgggcaacaaagctgatgaaagcgctcaatattatcagctgtcagcaaccaggccatcgttataagaaggcgtctaaggaacacattgagatccctaattatctggatcgccagtttgctgttaccgagcctaatcaggcttggtgcggtgatgtgacttatatctggacgggaaaacgctgggcttatctggctgttgtactcgatttgttttcccgtaaaccggttggctgggcgatgtcatttttccctgattccgcactgacaggtaaagctctgtcgatggcctgggaagcacgggggaaaccggctaatttactgtatcactcggatcaaggcagtcactataccagcaggaatttcagacagttactgtggagatatcagataaagcaaagcctgagtcgccggggaaattgctgggataacagcccaatggaacggttcttcagaagcctgaaaacagagtgggtaccggataatggctacgcgaattttagcgaagccagcacggcaataacgaattacatcacaggatattacagccagctcagacctcatcaatataatggtggtttgacgccgaatgaatcagaacgattgttctggaaaaactctaaagctgtggccagtttttgttga

SEQ ID NO: 31921 - DNA, 510 bp, Escherichia coli; identical to SEQ ID NO: 9981

SEQ ID NO: 31922 - DNA, 753 bp, Escherichia coli
gtgctcaagggtgacgttaagatcctgctggcgatagaggtctgccgcatcgctgcgcacgccgcgtttcagccagtcatctttctcgtcattgcgggtcagccgggtaaaggtgtcgttatcctgcggacgcgtcgaggtcacaccggatgcgaccatagcgtctttgtaaatttccagcgcctgcgttgggtctcccgcctgcgcttcaaacttcgcaccatcgcgcagtaccatcgcgctttccatcgacggtggctgagattttgccagcgggatcagcttgttaaatgtctgctgcgccgcagcggtatcgccaagctgcgcctgcgccagtgccacgcgccgctgtgtgttcagcgaggcgttatcggtggcaggcagtttcgccagctggctacgtgccgccactttgtcaccggcagcaatatccacttccgtctggccaagaatggcatcagcgttagctggctcccgcgtcaggacattctgatatgcagcacgggcggcggcgtaatcacgtcgctgctgcgcccagtcagccagcgtgaggtcaatacgcgaggaaggcggttgctggcgcagcatcgcttccgcttctgtctctttaccgctttctcgcaggcgattagcggtttccagcacctgattgctttgcagccgattaaccagctcctgaatattgctgttccactgcgcgcgcggcaggctgttgatatgcgtcagtgccgccctgtcctggtcgtgacctga

SEQ ID NO: 31923 - DNA, 387 bp, Escherichia coli
atgttttttagtgatagagaaaactgccttaattgcatcagtcaggcggagcagggcggcattatccagagttgtcggttctgccatgccgcgtatggccaacagcagattctggacatagctgttttcctgatccatctcaagagcagtaatgtgttcgcgttgttctcgggtggcatgatgcaggtatttccgatccccggccgcatacgtaaaaatgtgcagaagacgctgtgtgaaccgcaaagtggctacagagacttcgcaatcctggcaatcctcgtgggcgtctgcctgcgcgttttcttcctggcctcccgccagttcgttggtttcttgagcattatcctggtggtgaacgtcgtctggcgctgctcccggttttag

SEQ ID NO: 31924 - DNA, 720 bp, Escherichia coli
atggaaaagatattaacgatagtacgacataaaccaggtaggttccgttttttattaagagcattacattctgtttataaccaaacattcaaggaagtaaaagtagcaatatattgcatgggtgctgaacaggatctctctaaagatgagtattcgtatattaacacaatccaggaaaaatataaccttagtctaataccgttcaatcaagatgtatcagaaataattaaaaaaagtgattgtgaatatatatgctttttagatgatgacgatacctgggctccagagtatctatctcgcatttcaagtacgcttacagcgacacgtcttaaatacccgtcaatcaatgccatagcatgccacagtaataaagtggtagaggttgcggagagaaatagaataattattaacacaacatacccatggaatcattacttagcagttggcccgcttagttttgatgtaattcattacaagaatagccttccaatttcatcatgtttttttgttaagaactcaatatttaatattataaataaacataacttttcttcgccatctttcttttggcccttcttaattgattatttatcacaaaatgatctttggattcttccagaacccttagcattctatcattttagagaaagtaccgatttcaagtacggcaatttcacagagattaacagagaagaatgtgagatgaagcatgaaatttga

SEQ ID NO: 31925 - DNA, 681 bp, Escherichia coli
atgattcagtatctgaacgtctttttttacgatatctacccgtacatttgtgcgacggtgtttttcctcggcagctggctgcgctacgactacgggcagtatacctggcgcgcctcctcgagtcagatgctcgataaacgcgggatggtgatatggtcgaatctgttccatatcggcattttggggattttcttcgggcacctgttcggcatgttaacgccgcactggatgtacgcgtggtttctgccggtggcggtaaaacagcagatggcgatggtgctcggtggtatttgcggtgtattgacgctgattggcggcgcaggactgctgtggcgcaggctgacaaatcagcgcgtgcgtgccacttccactacgccggatattatcatcatgatcattttgctgattcagtgtctgctggggctaagtaccataccgttttcagcacagtatcctgatggtagcgaaatgatgaagctggtgggttgggcgcaaagcattgtcactttccgtggtggatcgtcagaaatgcttaacggcgtagcgttcgttttccgcctgcatctggtgttgggaatgaccatcttcctgctcttcccgttcacccgactggtgcatgtgtggagcgcgccgtttgagtactttactcgtcggtatcagattgtgcgctcgcggcgataa

SEQ ID NO: 31926 - DNA, 924 bp, Escherichia coli
gtggcaaagcaaaagttcaaaatcaccaactggcccacctacaataaagccctcatcaaccgtggctccataactttctggctggatgatgaagctattcaggcctggtatgagtcagcaacaccttcttcacgaggcagacctcagcgctattctgaccttgccatcactactgtgctggtcattaaacgcgtattcaggctgaccctgcgggctgcgcagggctttattgattccattttttctctgatgaacgttccgctacgctgcccggattacagctgtgtcagcaggcgggcaaagtcggttaatgtcagtttcaaaacgcccacccggggtgaaatcgcacacctggtaattgattccaccgggctgaaggtcttcggtgaaggcgagtggaaagtcaaaaagcatggccaggaacgccgccgtatctggcgtaagctgcatctcgccgttgacagtaaaacacatgaaatcatctgcgctgacctgtcgctgaacaacgttacggactcagaggccttccccgggttaatccggcaaacccaccggaaaatcaggtcagccgccgccgatggcgcttacgatacccggctatgtcacgatgaactgcggcgtaagaaaatcagcgcgcttatccctccccgaaaaggtgcgggttactggcccggtgaatatgtagaccgtaatcgtgcagtggctaatcagcgaatgaccgggagtaatgcgcggtggaaatggacaacagattacaaccgtcgctcgatagcggaaacggcgatgtaccgggtaaaacagctgttcgggggttcactgacgctgcgtgactacgatggtcaggttgcggaggctatggccctggtacgagcgctgaacaaaatgacgaaagcaggtatgcctgaaagcgtgcgtattgcctga

SEQ ID NO: 31927 - DNA, 888 bp, Escherichia coli
atgactagtctaaaaactagtattaagactatcacttatttaagtgatattggttgtctggagattcagggggccagtctattagcgtgggaggtgctcctgttcttggtactgatggcactccagttaatggccaaagcagctgataatgcagactggaaggcccgctggggtagcgtccatcacacagaccgtacgttgttagcacattatcgcgcgtcgttgaaaagcgccattcagcgcaaggctaatatcactcaagccatctcccgctatgagaaattattgaaccgtactcagaaggccgcgacggatatcaaacgcctgcgcccgctggtggaggatgcaataaataaaggcattctggatgttgatcctgatctggttaaccatgcgaatgagttccttgttatcggcgatcgctcatggcgtgtaggccaatactacgattgtgccggtgatatcgttcgcattaagtcgctggacttcgacagccagcgcgcagacgtggagatcatctttaccttcaaaggcaccaaatcgggtaactgggatgtgaagacgctggataaacaggtggatgtaactcccgatgaagatgctgttatgcagaaaatcagtggtggcgtctccatcgccgggattaacgacatcatttcctgtgacgatttctaccgtttccagcagcgcggcatgatcaaaatcactgactcatacggcgttcagactacagagtcaggctatagcattgattttgttggtacctatacggacccactgaagcatgcggtttacccggatcgccgtgacggcgcgctgaagtcgtcaattgcaaaatgggtgcttggtactgatgaatcccctaatgattttggtaaaaatcattaa

SEQ ID NO: 31928 - DNA, 336 bp, Escherichia coli
atgcatatccgaggtgttcatatcgtctttttcgtaccaggtggcggtgggcagaacgatatcggagaacaggcaggtactggacatgcggaagtcgagcgtcaccagcaggtcgagcttgccttcaatcgccgcagtttgccactcgacttcttccggtttgatcccgtcgctggcaccgagttcctcgccctgaatcccgctttcggtccccagcagatacttctgcatatactcgtggcctttgccggaggagccaagcaggttagagcgccagacaaacaaattacgcggatgattgctgccgctatcgggttgttcgcaggccatgcgtaa

SEQ ID NO: 31929 - DNA, 147 bp, Escherichia coli
atgatgggcgaagaagcaaaactggcaggccagcaggaatatcaccgcaatctgaggaccctggctgactgcctgaataccgatgaatggccagctattaaaacgttatcactgccccgctgggctaaggagtatgcaaatgactaa

SEQ ID NO: 31930 - DNA, 432 bp, Escherichia coli
atggcactgggttacaaggcgacgcaagccggcatcaagacgcgcttcacgactgcggccgacctgatgctggcgttgacgacggcgcatacccagaacaatctgaaggcggtgatgcaccgcgcgatcaaggcatatcggctcttgatcatcgacgagataggttacttgccgatgaaccgggaacaggcaaacctgttcttccaggtgatcgcagccttgtatgaacgcagcagcctgatcgtgaccagcaacctgccgttcgggcaatgggacacgaccttcgcgcaggatacgacgctgaccgcggcactgctcgaccggctgctgcaccatgcgcacatcgtgccgattgccggggaaagctatcggctgaagcaccagcgacaggccgggatgatgagggggagcgatgttgcagaaattggctga

SEQ ID NO: 31931 - DNA, 342 bp, Escherichia coli
atggaatgtcaaaaccgttctgataaatacatctggtctccccatgacgcctacttctataaaggactatctgaactgattgtggatatcgacagattaatttatctatcgctggagaaaatcagaaaagatttcgtgtttatcaatctcaatacggattctttaactgagtttataaaccgtgataatgagtggttatccgcggtaaaggggaaacaggtcgtattgattgcggccagaaagtcagaagccttagcaaattattggtattacaacagcaatattaggggcgtggtactgagagatcccctcataatttccccaaagcgtaaccatgtgtga

SEQ ID NO: 31932 - DNA, 462 bp, Escherichia coli; identical to SEQ ID NO: 24245

SEQ ID NO: 31933 - DNA, 291 bp, Escherichia coli
atgaattatcagaacgacgatttacgcatcaaagaaatcaaagagttacttcctcctgtcgcattgctggaaaaattccccgctactgaaaatgccgcgaatacggtcgcccatgcccgaaaagcgatccataagatcctgaaaggtaatgatgatcgcctgttggtggtgattggcccatgctcaattcatgatcctgtcgcagcaaaagagtatgccactattcaagcggtttttgtaccgattcgccaacggctttcagcccggcgaagtggatcacggtgtcgatag

SEQ ID NO: 31934 - DNA, 264 bp, Escherichia coli
atgatgaacatcgaagaactgcgtaaaattttttgtgaagatggcctctatgctgtgtgcgttgaaaatggaaatattgttagtcattgccgcgttctgtgtttgcgaaagaagcaaagaaagagtggggctgcgttaattaattttgtggatgctcgggtgacggacggatttatcttgcgcgacgatgagtttgccacttcattacaggcattgaaagagatcggaataaaagctggcttttctgctttttcagaagaataa

SEQ ID NO: 31935 - DNA, 279 bp, Escherichia coli
atggttgcagtgactgcactgactcccgccgtctggctggtgacactgatttccaccgtgccgtccggctgcgtggtgaccaccggagcaaccgttgcgccgttgcctgccgtcacgctgaccgtctgcccggcaagtgcattcccgaacgcatcggtcaccctcgcccgcagcgtattcgccattgcaccgtctgccactgagttatcccgggtgaccaccagatcagcgatcttcgccgtcctgacatccgcgataaacgtcacgtcccggctctga

SEQ ID NO: 31936 - DNA, 1437 bp, Escherichia coli
atggtcgcagtgactgcactgactcccgccgtctggctggtgacagggatctccgccgtgccgtccggctctgtaatcaccgttggggcaaccgttgcaccgttgcctgccaacacgctgaccgtctgtccggaaagtgcattcccgaacgcatcggtcaccttcacctgcaacgtgttcgccattgcgccgtctgccaccgcgttatcctgcgtcacctccagcatcgcgatctgcgccgtgctgacatcggcaataaacttcacgctctggctcaggctgctgttgttgatgctggcggtgaccgcactggtgcccgccgtctggctggtgacactgatctccaccataccgtccggctctgtgattaccgtcggggcagtcgttgcgctgttgtccgccaacacgctgaccgtctgcccggcaagcgtattaccgttagcatcggtaaccttcacttgcagcgtgttcgccattgcgccgtcagccactgagttatcccgggtgaccaccagatcagcgatcttcgccgtcctgacatcggcgataaacatcacgttctggctcgcggtgctgttgttgatggttgcagtgaccgcactgattccggcggtctggctggtgacactgatttccaccgtgccgtccggctgcgtggtgaccgtcggagcagtcgtggcaccgttgtccgccaacacgctgactgtctgcccggcaagcgtattaccgaatgcatcggtgatcttcacccgcagcgtgttcgccattgcgccgtcagccactgagccatccttaatgaccaccagatcagcgatcttcgccgtcctgacatctgcaacaaacgtcacgttccggctcgcggtactgctgttgatactggcggtgaccgcactggtgcctgccgtctggctggtgacactgatttccaccgtgccgtccagccctgtgatgacagtcggagcgaccgttgtgccggtatccgccaatacgctgaccgtctgcccggcaagcgtattaccgaacgcatcggtcaccctcaccagcagcgtattcgccattgcgccgtctgccacggcgttatcctgcgtcacctccagactcgcgatctgcgccgtgctaacatcggcgataaacgtcacgttccggctctggctgctgttgttaatgctggcggtgaccgcactgattccggcggtctggctggtgactgagatctccaccgtgccgtccggctgcgtggtgaccgtcggagcagtcgtggcaccgttgcctgccaacacgctgaccgtctgtccggcaagtgcattcccgttagcatcggtgaccttcacttgcagcgtgttcgccattgcaccgtctgccactgagtcgtccttaatgaccaccaggtccgcgatcttcgtcgtcctgacatcggcgataaacatcacattctga

SEQ ID NO: 31937 - DNA, 771 bp, Escherichia coli
atgaataatataatctttgaagatgatgatctcttaataatgatctcgaattactgtaaggaaaataaacatgctgtcatttgtttttctccacgtattgctaatgttccggaacaagtcattgattcaaatttggcgttttcaaaggttttttttgataagtacccctttactggtatatatataataccaaaatggaatcattggtatgaaacagaaaattttgataaagcaatctcagctattaacaattatacaaacttgcaggatatctggacatatggtgtctccatgggagcatatggtgctatgcgatatgctgagcagcttaatgcatcaggtacaattagtatttgccctcaggcaagcattaataaacatttaattccatttgagaaacgatggggcactgaattagcaaaattaaatatttcagaaaattggatgaaactacataaacttgctaaaaatacttatgtcttttatgattccaagtacatacctgataaaagacatgtcgacttattaaaagataactactcgtttattacagaggtaaaagttgattttgcagaacatgctgttgcaggtgttctacttgaatgcggtttactcaaggaaactgtattgaatttaatatatggaaatttctatatagagagttttttgtccacattaaaatctcagagaactagttcaccacctataaaagtatcatttgactcaacgaattttcccgattcaacgtttttgatagttactgaatgctga

SEQ ID NO: 31938 - DNA, 600 bp, Escherichia coli
atggaaaatatattcagtgaatttgaaagtggtaatgaaataaatgtacatccatcagtactcattgacaaaagtgttaaagttaatgtgcagggtagcgggcataaaattacaatagatgaaggtgtagttcttagaaatttaagaataaacatcattggttggaataataccttacatattaaaaaaagagccaatataagaggctgtattgatattcggcaaaacagttcaaagttaattattggaagcgggacgaccaccgctggtgtgcatttcttcgcaatggaaggtaaatcaattacaattggtgacgattgcatgttctctagttctatttatattagaacttcagatgagcatcctattattgatattgaaagtggagagaggataaatcacgcaaaagatattgttatctcagaccatgtgtgggttggtgaaggtgtcacaataaacaaaggttctgtaataccatatgggtgtattattggcactaagtcattagttggtaaaaaactatcaagaccatcatcatcttatgctggaataccattgagactcatccgtgagggtgttaggtgggagcgaaaattataa

SEQ ID NO: 31939 - DNA, 1806 bp, Escherichia coli
atgacagacattatacctaacattatagtttccatgcctaatcaattgttcacaatgtcaagaacatttaaatcagtatcgaatggaagcatttatatcgggaagcctgataccgatccgactaatccagataatcaagtggatgtttattttgagaatgagaatggaaaatatattaaggtttctcaaccaataaaaataagtcaagctggacaacctgtattgaatggtcaattcggtaagtttgcgactataaaaaatcactcaatggcgatttttgatgcgtatggctctcagcagcactatttcccaaatgtaatgaaatatgctccagatcagttaaggcaggaattaacaaatttttctggtgaaaattctcctggttatgctgacccaagtaatacggtatggggaattgatgcattttcttctaatgaatatgcgaaaaataatgcttttttcggagttggagcaggatcatcaattataggtaacgagtcagatgaggctgttggtgcggaaaatactggtattggtagacgagccggtgcaagccttacaacaggacagcgcaatgttctacttggacatgaggctggagcactgttaactacaggtagttgtaatatttttatttacgctcaaagttcttcttatgccaactataaaaccggtagttataatgtagtggttggttataacgctggcaaactattaacatcaggagagagaaatgtttcagttggtacggatgctgggtcacgaacaacaacaggaagagataacgttgctgtcggtcaagcagcaatgcaaaataactcaactggtggtggtaatacctatataggagcattctctggtgctgagacgggaactggcggtaataatcttgctgcaggtcgctctgccttatttagaaatgtggatggttctggaaacgttgcactaggacgtgaggcttctcttggtttgtcttcatatggggaatctcccaataatattgttgctatagggtatcaagctgcatggtcacagaatggattaaatggtgttgttttttgtgggatgcaagcaggatataaagcaacaaaaatgaatgattcagttcttattggtagggcttccggctttaatttaacaacaggaagtgataatgtttttgttggtgcagcgtcaggagatagtgagactactggaacccaattagtatatcttggacatcaagctggtaggtttttgattgatgggacacctgcaaaagagaaattaaattgtgtagctttaggctgccgtgccagagttggtggagatcatgagattcagttaggaaattcttctcagacagtttatgtatatggtacggtgcaaactcggtctgatgagcgtgataaagcagataaacgaataatagacggagaacttgctgtatcattcgtccgtggaataatcccatatttttataagtgggattttcgtgatgattatatagaagaatacaatgtaaaaattggtgatgattctaatggcaatccgatttttgaaactagaattcatcaacatgaaaaagatggcagtagaaaaaggaaaagagaacatgccgggtatcttgcacagcaagttaaagaattacttgatcgacttggaattgactgtggtatatatcaagatcatctagtaaacaatggatgcgatgtaaaaacaattgcctacgaacaggttataccgtttgttacaaaggctatagatgttgcattttcaaggatagaggggttagagcaaagattgaacaaactcgaaaacctataa

SEQ ID NO: 31940 - DNA, 207 bp, Escherichia coli
gtggctgagttaattttctctgcattgaggcttctcggtgctctgtggatggtggcgacgttcattgtggttgctgtctgttttgtccggttggtaggcgaaggtaaagacctggcgggtgtgcttttcggtagcattctcatgtgggtgattatcggtgttgcgcctgtcgctgtagcaaaaatggcgtggtgttttgtgagttga

SEQ ID NO: 31941 - DNA, 1044 bp, Escherichia coli
atgagcactgtagttgagtcagtaatggcacgctatgcacaagttgttgaggaaggttacgtcgtagatggcgggccaaaattcaaaagttatgcagtttccaatctgcgcggtggtgttggtaagtccacgatgacattcaacctcgcctatgagctgtcacgacgtaactccgtattagtggctgacttatgcccgcaatgtaatttaacggagacactattgcgtggtgaaaaaccggttgtaacaatagctaatgcactgacaccaaaaatgctgggtccagcttttggtgagcagccagaagatatttcatatcgagtaagtaatttctgcccagattttaaaggtggtaaggcatgttatgcgattccaggtgatcctgagctattcgctttcccatcaagcatgtatcaacaactacaagtagcgctatctcgcggagaaccaaaagcagtatcaacactattaaattctcttcgcgcaataatgaacgatgaagcgaaagacaaaaaatgcgaaattttattgatggatacaagccctttctatgctggaggaacacacctagcatggtgcgcgtctgaggcattgattatccctgtacgcgtagatgaacactcaattgagtcacttcatctcacaatggaaatgctggcaaataaatcaaaagattttgtattatggaatgagcgtgcgggtgggcttggggctccaaaagtagcagcgatcgtaatgacaatggctggttcaaaaagccgtaaatcatcaacaccaggtcgcgcatctcaaatgtacatagagagagctgtaaaaatcgctgaaaaatacagtcatctctttgccgatgaagatgttagcaaagcaattgtggttacagatgattttgtatcaagcgggcaaattagtggggctgaaagcataccaatatcacagctaaaagttggtcgcttccatacagtaagtgaagggaaaaggttacaagttaaccagtcggttactcgatatcaaagacaacttaagtatctggcaagtattctttaa

SEQ ID NO: 31942 - DNA, 327 bp, Escherichia coli
atgctgtctcggcagtcgtgggatgcgacgtacaatgatgcttccagcttcctgaacacgctcaaaagcgatagtgaagaaaacgtcggtcactggaaaaatgcgcagtatgacgccttactaaaccaggccacgcagatcactgatgcgacaaagcgtaatgcgttgtatcagcaggcagaagtgatcatcaaccaacaggcaccgctgattcctatctactatcagccgttaatcaaactgcttaaaccctacgttggcggttttccgctgcataatccccaggattatgtctacagcaaagagttgtatatcaaggcacattga

SEQ ID NO: 31943 - DNA, 375 bp, Escherichia coli
atggaagaccatcgcggaaagaccgtctatgaaacgaaaacgggagcagccatttatatttctgaacttggcgtattacctccagacgtgacagccatttccccggagggggattatcagaaatggaacggcaatgcgtgggtgaatgatgagaatgcagagcgtgatgcgcttgtcagagcggctgactctcagaagaaagagctgattgcatatgcaggtgaaattattgccactctgcaggatgctgtcgatttagatatggctaccgaggaagaaaagttaagcctgacacactggaaaaaataccgtgtgctactgaatcgcgttcagccggaaaatgcccctgatatcgaatggccagaattagtgtaa

SEQ ID NO: 31944 - DNA, 159 bp, Escherichia coli
atgtttattagcggttttgcattaagtcaaaacaaccctttaacggagctggccgcgctgttaagggatgatgtcaccttatctttgaagccggacagcatattgctgaacgatgagtttaccgcaggtttctggctgggaatcattgactggagttag

SEQ ID NO: 31945 - DNA, 339 bp, Escherichia coli; identical to SEQ ID NO: 5805

SEQ ID NO: 31946 - DNA, 1083 bp, Escherichia coli
atggacggaaagaatcgggcagcatcctcttatctgagtccgggaaatcccccggcagataaagagcagaatgatccgctggcacaggttttccataatgcctgctcttacaatttttttgcgatggcggagctgttgcaccgcctggcaaagggtgaaaaggggacgccagaattatccctgcgtgacgatccggcacaggaaaccctgcgtttcagcgccgatgccagccttgccttcccgtgcagtgatatcagtgcgctgaaacgggatacatcaggggcattcaggatgaccaccacctttatggggttacaggggagccagtcgcctctccccggttattacctcgatcacctggcctggaaagcggtacatgaacaaagtccggtaggtgattttctggatatgttcagccaccgcctgacccagtttgtctggcatatctggcgtaagtaccgctatcacatcagttttcgtaacggcggtgtggatgcgttctcgcagcgcatgtactcccttgtcgggctgggccaccgccagcttcgcgataagctggcgattaatcacagcaaaatgctggcgtattccgggatcctggcaaatccgggacgatccccggaaataatctgtggcctggtgtcccactgctttgatttgtcagaagtgacgctgcaaaactggcaacgtcgcaaggtggatattgaaccggatcagcaaaatagtctggggagctattctcttaaaaatggcgaaaaactggcgggaagatcggtactgggcaactttgttctgggtacacgagtgcccgatctcagcggaaaattccagctcagtattaccagcctgacccgaaaacagttcctctcttttctgccgtccggcgaaaacttcctgccactgacgatgttcgtgtccttcatcctgcgcgatcagcttgcctgggacttacatctggggctggcgccggagcaggtgggcgcaatgcgcctgggtgataacaaaagtgcgctgctgggctggaccagcttcctcggcacaccggaagaacgaccctcagtcaccatcagggtacggtcgtaa

SEQ ID NO: 31947 - DNA, 324 bp, Escherichia coli
atgctccgacgtgctttcagtaacctgctttccaatgcaatcaagtattctcccgataacacctgtacagcgatacaccttgagcgtgacagtgactgtgtgaacgtgatgattacgaatacgatgtccggccaggttcccgctaatctggaacgtttgtttgaccggttctatcgcgcagactcatcaaggttctacaacacggaaggcgcggggctgggattatcaattacaaggtcgatcattcatgctcacggcggcgagctgtcagcagaacagcaggggcgtgaaattgtgttcaaagtgcgcctgttaatggattaa

SEQ ID NO: 31948 - DNA, 189 bp, Escherichia coli; identical to SEQ ID NO: 29657

SEQ ID NO: 31949 - DNA, 1695 bp, Escherichia coli
atgagcactctcaaaatcaccggcatgacttgcgactcgtgcgcagtgcatgtcaaggacgccctggagaaagtgcccggcgtgcaatcagcggatgtctcctacgccaagggcagcgccaagctcgccattgaggtcggcacgtcacccgacgcgctgacggccgctgtagctggactcggttatcgggccacgctggccgatgccccctcagtttcgacgccgggcggattgctcgacaagatgcgcgatctgctgggcagaaacgacaagacgggtagcagcggcgcattgcatatcgccgtcatcggcagcggcggggccgcgatggcagcggcgctgaaggccgtcgagcaaggcgcacgtgtcacgctgatcgagcgcggcaccatcggcggcacctgcgtcaatgtcggttgtgtgccgtccaagatcatgatccgcgccgcccatatcgcccatctgcgccgggaaagcccgttcgatggcggcatcgccgctaccacgccgaccatccagcgcacggcgctgctggcccagcagcaggcccgcgtcgatgaactgcgccacgccaagtacgaaggcatcttggagggcaatccggcgatcactgtgctgcacggctccgcccgctttaaggacaatcgcaacctgatcgtgcaactcaacgacggcggcgagcgcgtggtggcattcgaccgctgcctgatcgccaccggcgcgagcccggccgtgccgccgattcccggcctgaaagacactccgtactggacttccactgaagcgctggtcagcgagacgattcctaagcgcctggccgtgattggctcatcagtggtggcgctggagctggcgcaggcgttcgcccgactcggagcgaaggtgacgatcctggctcgcagcacgctgttcttccgcgaagacccagctataggcgaagccgtcacggccgcattccgcatggagggcatcgaggtgagggaacacacccaggccagccaggtcgcgtatatcaatggtgaaggggacggcgaattcgtgctcaccacggcgcacggcgaactgcgcgccgacaagctgctggtcgccaccggccgcgcgcccaacacacgcaagctggcactggatgcgacgggcgtcacgctcaccccgcaaggcgctatcgtcatcgaccccggcatgcgtacaagcgtggaacacatctacgccgcaggcgactgcaccgaccagccgcagttcgtctatgtggcggcagcggccggcactcgcgccgcgatcaacatgaccggcggtgacgcggccctgaacctgaccgcgatgccggccgtggtgttcaccgacccgcaagtggcgaccgtaggctacagcgaggcggaagcgcaccatgacggcatcaaaactgatagtcgcacgctaacgctggacaacgtgccgcgcgcgctcgccaacttcgacacgcgcggcttcatcaaactggtggttgaagaaggcagcggacgactgatcggcgtgcaggcagtggccccggaagcgggcgaactgatccagacggccgcactggcgattcgcaaccggatgacggtgcaggaactggccgaccagttgttcccctacctgacgatggtcgaagggttgaagctcgcggcgcagaccttcaacaaggatgtgaagcagctttcctgctgcgccgggtga

SEQ ID NO: 31950 - DNA, 2472 bp, Escherichia coli
atggctatcagttggatccagcccagctttgccggtggtgagattggaccgtcgttgtacgggcgtattgacatggcgaagtaccaggtggcattgcgcaagtgcgataactttatcgtgcggcagtatggcggcgttgagaatcgacctggtacgcgttttgtcggtgccgccaaatatccaaatcggaaatgccgcctgatcccgttccagttctcgacggttcagacttatgctctggagttcggacaccagtacatgcgcgttatcaaagatggtgcgttggtgctgaacagcagcaatgttatttatgaaatttccacgccatatactgaagccgatctgttccgaattaaattcacgcaaagcgccgacgtgcttacgctggttcatccggcatacccgccgaaagagttgcgtcgctatgcgcatgacaactggcaactggttgatgtggtaacgaagaacggaccatttgaagatatcaatattgacgagtcagtgacggtttatgccagcgccagcaccgggacaattacgttaacggcaagcgcctctatttttggcgcggagcaggtaggcaaattgttctatctggaacagccagcagtggattcagtaccggtatgggaaaccagtaagagtacgtcgattggcgatattcgccgtgcagacagtaactactatcgcgccgttacagcaggcaaaacaggtactttgcgcccttcgcatacagaaggcacatcatgggatggctggggcggatccggtgatgatgatactggcattgagtgggagtatctgcacagtggttttggcattgcccgtatcactgctgtaaacggcactactgcaactgccgaggtgatttcctatatcccttcgcaggtcgttggcgaggataatgccagctataaatgggctaaatatgcctggaacagtgttaatggttatcctggcactgttgtttattatcaacaacgtctttacttcgccgcatcgactgcgttccctcagactatctgggccagccgtactggggattataaggattttggcaaaagcaatcctacgcaggatgacgacagaattatctacacctatgccgggcgtcaggttaatgagatccgtcacctgattgatgttggttcgctggtggcgctgacttccggaggtgagtacgtcatcactggcgaccagaacaaagtgcttaccccatcatcatttgcattcagctctcagggatcaaatggctcgagcaatgtcccaccaattgccgtggcgaatattgctctgttcgtccaggagaaaggcagtgttgtccgtgatctcgcctactcattcgatgttgacggctatcaggggaacgaccttactatccttgccaatcatctttttcagaagcacagcattgttgactggtgcttctcaatagtcccttactccagcgccttctgcatccgtgatgacggtaaattactggtgatgacctatttgcgtgatcagcaggtttttgcatgggcaccacaatccagtaccggaaaatatgaaagcacatgcagtatcagcgaaggcaatgaagatgcggtgtatttcgtcgttaaccgaaccgttaacgggcaaacagtgagatacatcgagcgactgtccagccgtttatttaccagcgatgaagatgctttctttgttgattctggccttagctatgatggaagaaatacgtctgacagaacgatgatcatcactggtggttctggcgaatgggattaccgcgcggaatatacaatcagtgtttctggtggtgcgtacttcaccagtagtgatgtcggcgcgcaactacagttcccttataccggaactgatcctgatactggcgatgaggtgtcaaaagaattacgttgcgacattatttctgtaaccagtaataccgctgtagtggttcgtgttaacaggaacgtcccgccatccctcaggaatgtggccaccacgaactggcagatggcgcgccggacatttggaggcctgtctcatcttgaaggccagaccgtaaacattctctctgatgcgaacgtggaaccacagaaagtggtttccggaggtgccgtcacgctggaatctccgggggctgtagtgcacatcggcctgccaataactgctgaattcgaaacactggatatcaacattaacggacaggaaacgctgctggacaaaaaacaggtgatcccatccgttactctggttgtgaatgccagtcgcggcatctgggcgactacgcctggcggtaaatggtacgaatatccacagcgtgaattcgagttctacgatgatcctgttgatgatgctaccggaaaagtagaagtgaaactggacagtaactggggcaaaaacgggcgtgtaaaaatccgtcagcttgacccgttgccgctgtctgttcttgccgttattcctcgccttactgttgggggattctga

SEQ ID NO: 31951 - DNA, 138 bp, Escherichia coli
atgctgctagttgggcaactggtctttctgctccaaattataacagagaccagttatagtttcggtgctgtgttttttttacaatattgtgataacacattgctggcgggagttttgatatttcttggcaggggctga

SEQ ID NO: 31952 - DNA, 807 bp, Escherichia coli
atgttcaaattaaaattactcagcattagcacgatattcatcctggcaggctgcgtgtcgcttgcgcctgaatatcagcggcccgcagcaccggtaccccagcagttttcactgtcccataacagcctgacgccagcggtaaatggctatcaggatacgggctggcgtaacttttttgtcgatccccaggttacccggttgatcggtgaagctctgactaataaccgtgatttgagaatggctgccctgaaggttgaagaggcccgagcccagttcaacgtcacggatgcagatcgttatccccagctgaatgcctcatccgggataacatacagcggtggtctgaaaggtgacaagccgaccacacaggagtacgacgcgagactggagctcagctatgagctcgattttttcggcaaacttaagaacatgagtgatgctgatcgccagaactactttgccagcgaagaagcccgtcgggccgtacacatcctgctggtatccaacgtttcacaaagctatttcagccagcaactggcgtacgaacaacttcgtattgcgcgggaaacgctgaaaaattatcaacagtcctatgctttcgttgagcagcagctcgtgaccgggagtacgaacgttctggcacttgaacaggcgcgaggacaaatcgaaagtacccgcgccgaaatagccaaacgagaaggcgatctggctcaggcaaacaatgccctgcaactggtgctgggaacgtaccgtgcacttccgtcagaaaaagggatgaaaggcggggagatagcccataagcgctaa

SEQ ID NO: 31953 - DNA, 204 bp, Escherichia coli
atgaaaaaagaaagtaggctaccaccgacgttccgtggcagaaacggcgatgttccgtatcaaaaccttgctgggcggacacttgagcctgcgagactacgatgcgcaggtggggacgcgcaggtgggcgaagcgatggcgatggttaaagcgctaaaccggatgacgttgttgggtatgccgcatagtgtccggatcgcataa

SEQ ID NO: 31954 - DNA, 561 bp, Escherichia coli; identical to SEQ ID NO: 10418

SEQ ID NO: 31955 - DNA, 216 bp, Escherichia coli
atgctgtgctttctgattttgactggaactttgctaccaaacgcgtggcgcttgcagatacgagcaatccgccgccagactgggaatacgcataccagtacccgtccgattgtctgcgcattactgaaattatgcttcctggtgtacgcaatccaacagcagcaatgcgcgttcagtacgaagttggtgcagacaccgacggaacaggaaagttga

SEQ ID NO: 31956 - DNA, 726 bp, Escherichia coli
atgctggaaacctatgctgaagtcgataagtctctggctgatctgaacggtaatactgccgaattccgcctgtctgaagaccgagcatttattgaagcgatgaatcaggcgatggcgcagacgctgttttacggtgattccagcgttaaccctcagcagtttatgggactgtcctcccgctattccagcctgtctgcgggtaatgctcagaacatcattgatgctggtggcacgggtacagataacacttcaatctggttagtggtgtggggcgaaaacacagtgcatggcatcttcccgaaagggcagaaggctggcattcagatggaagataaaggccaggtgacactggaagatgctaatggcggcaagtacgaaggctaccgtacccattacaaatgggacaacggacttgctctgcgtgactggcgttatgttgttcgcattgcaaacatcgatgtcagcaatctttcagaaccttcctctgccgcaaatattgcgaagttgatggttaaagcactgcatcgcattccaaatcgtggcatgggtcgcccggtgttctacatgaaccgcactgtaggccaggctcttgatctgcaatctctggagaaaacatctctggcgatcagcgtaaaagagacagaaggcgagtggtggacttcattctgtggtgtaccaatccgtgaaactgatgcgcttctggaaacagaagcccgcgtggtgtaa

SEQ ID NO: 31957 - DNA, 822 bp, Escherichia coli; identical to SEQ ID NO: 13217

SEQ ID NO: 31958 - DNA, 297 bp, Escherichia coli; identical to SEQ ID NO: 5319

SEQ ID NO: 31959 - DNA, 1062 bp, Escherichia coli
atggaactggcacgaattgcactggcctcgcttgaggcagagccagttggtgcattccacattgctgaacagcaagttgacggcacaagtgactacatcaaggatggagagtggcctattgataatgggattattgaagtctacgccgctccgccagtaccggtagtacctgctgcattacctgagaacgacgatgaggacgggcatgacattgattatcttgagccatctgaagtttacgcgcttgggcgaacagctggatggaacgcctgccgcgccgccatgcttcagtccggaaactttcgggaaaacaagaattcgtcaaccaataattttcgggaaatcgcggaaacgtcaaccaactatccggtaattcctagtgaggtgttgtccgcaatcctgaaggttgccaagattcgtgccgatttcgatgattttgacggtgacaggcgaggtatcggtgattgtctggatgaggctgagcaagagcttatcgttaccattaacaaatatgccagtcagttggcagcagaaccgatagcgactaatgacgttcgagagcaaacagccgttccgccagttcctgtaatacaggctgatgtcgcgcaggcaattgaaaaactcaaacggaaattagtggaatgcaatcgctataactactgcgcagatgcagttaagggcgttgagtatgcctgccgcgtcttggcactccaaaatcaaaatatgtcagcgccgataaggccggaggctattgaaaacgcaatagaatacatccgcagtatcgcttttcacatcgatgaagacgattaccacggcaaacatattgcgtatttcatgcgacaagcattggcatggctggaagggcattcatgcagcgcagaaagtcagggcaaatccgataattcaccattgccgcgctaccaggttatcgaattaacagtgctggttaaacaattggtcagccaactgaaaaaagcaaaacctgattgcaaattaccagatagggcgatggattatcttttgcgaaacggactggtaagtgcggagggtgttttacgatga

SEQ ID NO: 31960 - DNA, 336 bp, Escherichia coli
gtggccctggagccccgtgtcttcggctggatggaccgtctgtgtgaagactactgcggtggtatctggaatctgtacaccctgaacaacggcggggcatttatggcacccgaaccggatgacgatgatgacgaaacatgggtactgttcaatgccatgaacggtaaccgcgctgaaatgagcccggaagccgccggcattgctgcctgtctgatgacgtacagtcatcatgcctgtcgtacggagtgttatgccatgacggtccattattaccggctgcgggattacgccctgcagcatccggaatgcagcgccattatgcgcatcatcgactga

SEQ ID NO: 31961 - DNA, 423 bp, Escherichia coli; identical to SEQ ID NO: 4706

SEQ ID NO: 31962 - DNA, 171 bp, Escherichia coli
atgcgcgggtgcgcaattgtaataaaacttcgccggagtggcggtatcaatactggcaaagacaacttcttttgcacctttaccaacatacagggcgtcgcggtgaccgatttcatagcattgaccatcgacagtaatcgtaccggcaccgccaatattgataacacctaa

SEQ ID NO: 31963 - DNA, 363 bp, Escherichia coli
gtgtacacccgtcagtgctccacgctcatcaatactattgaactggcaacgcttggcgcgacgctggcggcgggtggtgtgaatccgctgacgcataaacgcgttcttcaggccgacaatgtgccgtacattctggccgaaatgatgatggaagggctgtatggtcgctccggtgactgggcgtatcgcgttggtttaccgggcaaaagcggtgtaggtggcggtattctggcggtcgttcctggcgtgatgggaattgccgcgttttcaccaccgctggatgaagaaggcaacagtgttcgcggtcaaaaaatggtggcatcggtcgctaagcaactcggctataacgtgtttaagggctga

SEQ ID NO: 31964 - DNA, 519 bp, Escherichia coli
atgttagatgcaaacaaattacagcaggcagtggatcagacttacacccaatttcactcacttaacggcggacaaaatgccgattacattccctttctggcgaatgtccctggtcaactggcggcagtggctatcgtgaccagcgatggcaacgtctatagtgcgggtgacagtgattaccgctttgcgctggaatccatctcgaaagtctgtacgttagcccttgcgttagaagatgtcggcccgcaggcggtacaggacaaagttggcgctgacccgaccggattgccctttaactcagttatcgccttagagttgcatggcggcaaaccgctttcgccactggtaaatgctggcgctattgccaccaccagcctgattaacgctgaaaatactgaacaacgctggcagcgaattttacatatccaacaacaactggctggtgagcaggtagcgctctctgatgaagtcaaccagtcggaacaaacaaccaacttccataaccgggccattgcctag

SEQ ID NO: 31965 - DNA, 183 bp, Escherichia coli
gtgagcaacattaactatcaagaactgcgcgaggcggcggaacaggcaacgcaagatgaatgggtagcatatattttgccggtcataacggcatttatcctgcgcgcacgtctgagggtaggcattgcggatactttattgactggcctggcgtctgtcaggggcgggagagcatcagcatga

SEQ ID NO: 31966 - DNA, 210 bp, Escherichia coli; identical to SEQ ID NO: 9340

SEQ ID NO: 31967 - DNA, 504 bp, Escherichia coli; identical to SEQ ID NO: 9343

SEQ ID NO: 31968 - DNA, 582 bp, Escherichia coli
atggcgaacagcatcacggcggatgagattcgggaacagttttcgcaggcaatgtcagccatgtaccagcaagaagttccgcagtacggcacgctgctggaactggtagctgatgtgaatctggctgtgctggaaaacaatcctcaactgcacgaaaaaatggtaaatgcagacgagctggcgcgactgaatgttgaacgtcatggggcgattcgtgttgggactgcacaagagcttgctactcttcggcggatgtttgccattatggggatgtacccggtgagctattacgatctctcgcaggcgggagtgccggtacattccacagcatttcggcccattgatgatgcttctctggcgcgtaatcccttccgcgtttttacctcattactccgccttgagcttatcgagaacgaatttttgcgccagaaagcggcggagattctgcgtcagcgcgatatcttcaccccacgttgtcgacaactgttagaggaatatgagcagcggggcggcacaggcacaggagtttgtgcaggaagctctggaaacgtttcgttggcaccagtcagcaacggtagatga

SEQ ID NO: 31969 - DNA, 501 bp, Escherichia coli
atgcaacagcaaaaaccgctggaaggcgcacaactggtcattatgacgattgcgctgtcactggcgacattcatgcaggtgctggactccaccattgctaacgtggcgatccccactatcgccgggaatctgggctcatcactcagtcagggaacgtgggtgatcacttctttcggggtggcgaatgccatctcgatcccgcttaccggctggctggcaaagcgcgtcggggaagtgaaattgttcctctggtcaaccatcgcctttgctattgcgtcgtgggcgtgtggtgtctccagcagcctgaatatgctgatcttcttccgcgtgattcaggggattgtcgccgggccgctgatcccgctttcgcaaagtctattgctgaataactacccgccagccaaacgctcgatcgcgctggcattgtggtcgatgacggtgattgttgcgccaatttgcggcccgatcctcggcggttatatcagcgataattaccactga

SEQ ID NO: 31970 - DNA, 720 bp, Escherichia coli
atgagccatcaactcaccttcgccgatagtgaattcagcactaagcgccgtcagacccgaaaagagattttcctctcccgcatggagcagattctgccatggcagaatatgaccgctgtcatcgagccgttttatcccaaggcgggcaatggccgacggccctatccgctggagaccatgctgcgtattcactgcatgcagcattggtacaacctgagcgacggtgccatggaagatgccctgtacgaaatcgcctccatgcgcctgtttgcccgattatccctggatagcgccctgccggatcgcaccaccatcatgaatttccgccacctgctcgagcagcatcaactggcccgtcaattgttcaagaccatcaatcgctggctggccgaagcaggcgtcatgatgacccaaggcactttggtggatgccaccatcattgaggcacccagctctaccaagaacaaagagcagcaacgcgatccggagatgcatcagaccaagaaaggcaatcagtggcactttggcatgaaggcccacattggtgtcgatgccaatagtggcctgacccacagcctagtcaccaccgcggcaacgagcatgacctcaatcagcagggtaatctgcttcatggagaggagcaatttgtctcagccgatgccggctaccaaggagcgccatagcgcgaggagctggccgaggtggatgtggactggctga

SEQ ID NO: 31971 - DNA, 984 bp, Escherichia coli; identical to SEQ ID NO: 17571

SEQ ID NO: 31972 - DNA, 336 bp, Escherichia coli; identical to SEQ ID NO: 17647

SEQ ID NO: 31973 - DNA, 198 bp, Escherichia coli; identical to SEQ ID NO: 8850

SEQ ID NO: 31974 - DNA, 792 bp, Escherichia coli; identical to SEQ ID NO: 17658

SEQ ID NO: 31975 - DNA, 750 bp, Escherichia coli
atgcgctacttaaatacaaagaatatcattgcagcaggagtattactctcctgtatgagcagcattgcctggggtgccatcatcccggatcgtactcgtatcataatgaatgagtcagataaaggcgaagcattaaaacttactaatcaaagtaaaaacctgccctatctggcccaaacatggattgaagatacgaaaggcaataaatcgcgtgactttattgtcactgttcctcctatggtgcgtttaaatcccagcgagcaaattcaaataagaatgataactcaagaaaaaattgctcaacttcctaaagacagagaaacgctcttctattttaacgtgcgagaaataccgcccaaaacagataaaaaaaatgtgatgcaagtcactatgcagcacgcattgaaactattctggcggccaaaagccattgaattagaagacgatggggtaatgacttacgaaaaagttgaaatcatccgtagaaatgatggttcgatccgctttaacaataaaatgccttatcacgttacgctgggttatatcggaacaaatggggtaacgatgttaccacaaacgcaaagcttaatggtaaccccttttagccatgcagatacgcagtttaaaaatgttccgtcagcttttcaggtgggttatatcaatgactttggtggattaagtttttatgaaataaactgcccaacggtaaataattcttgtaatgtttccgtagccaaacaaggtcaataa

SEQ ID NO: 31976 - DNA, 1392 bp, Escherichia coli
atgcattctgtcatgaaaatgactaagaacggagatcagaagttacttggtgaactatttggcgatatgcaggttcagaactttgttcgtccgatgattcaaaactggaaggaataccagagaatcaaagcaacatctcttggagctggaagtgctgttattgaccgcgattttgccaacataacgaaagataatgcggagcgattgaaacaattacgtattcaggctagcaatgcatcattaagttttggtcaggccttgcaacctgctttgaatgccgcgcttagtgttttggttccgctgattacaaaaattagtgaatttgtagctaacaaccccaattttgtgtctcagatagtgatggcggcaggtgcgtttctaaccatgaaaagtgtggttatagcgtgtagggtagctatgctggctttatctgtagcgacaaagctaacacccttcgggtggattcagatggctatatctgcgctggttgccgcaggaatattgctctatcagaattgggataagatcagagattatgctgtcagagtttggccttctgttaaggaatatacagttaaatcatttgaggctataaaaaactttatcttaaactttgacctcaatggatggattatatctatgtttggtaaagcatgggattatctttccaacataaactggagttcggcaggagtaagaatttacagtacattaattagtgcttttaaatggatgtctccgcttccgttcttaattaaagcatttaaaattacaacaaattacctttctggcattaactggagcgaaacaggaaagaaaatcatagatacactggtatctgtttttatgcgtttttcaccagttggactctttataagagcattccaatctgtaacgacttatttatctggaataaactggagtgagtcaggcgcaaaaataattgagacgttaatcactgggataaaatcaaaagcaaatgctttaattaatgaagtgaaaggcgttttttcttctgtacgtgagtatttaccgttctctgacgcgaaaaaaggtccattctcacagctaacaaagtcaggtggtgcaataatgactactctggcatcaggtgttagcaggaataacagcttacagaatgcaatagcaagcaagttcgggcaatcaaatttatcacctcacgggatatctgccgctgggacttctggacctcgccagaacgttaacgctgtgactggtggaataacctattcacctgtaatcaatcttccggctggttcaccaaaggaaactgaggcagcagctaaaagagcattagatgcgggatattctgattttgagaagaaattgagtgctcatatgttccaacaacggagattaagttttggatga

SEQ ID NO: 31977 - DNA, 303 bp, Escherichia coli
atgggattgtttacgacccgccagttactcggttataccgaacaaaaagttaaattccgtgcgctgtttctggagctgtttttccgccgcacggtgaatttccacaccgaagaggtgatgctggacaaaattaccggaaaaacgccggtggcggcctatgtctccccgatcgttgaaggaaaagtgcttcgccatcgcggtggtgaaacccgcgtgttacgtccggctacgtcaagcccaaacacgaatttaattaccagcaggcggttgagcgccttcctggtgaagatccggctcagctga

SEQ ID NO: 31978 - DNA, 1101 bp, Escherichia coli; identical to SEQ ID NO: 6333

SEQ ID NO: 31979 - DNA, 669 bp, Escherichia coli
atgatcaatgaccttatattacacaatcaccccatagtggagaaaatcactttaaacgacaaccatattgcacatttaaacgcgaaaaccactacaaaactggaatatttaaacttaagcaataacaatttattgccaacagatgacattgatcaattaatatcatcaaaacatctttggcatgtattagttaacggcatcaacaatgatccacttgcccaaatgcagtactggactgcagtaagaaatataattgatgacactaatgaagtgaccattgatttatcttataacctggcaatcacaaatatctataccagcgatgaacatcttgtagaagtaagcgagaattccgaaggaaatcatataaaagaaaatgactcaatgtctattcgttatagatcaaaatattattccagagagtacgccttaatagaagaagaaacaatattttctgacgcagaactaaaagctattctgcctatgcgtcgcatgtacggggttggtgactataagtcaaattcctcttctctaccctcacactcggggctaaaggacccaacgggcacacccgtctgttattatattcataatgaggataaaccttccttaggttttggtccaacatccaataattggttaagccaatcctttacaacagagttataa

SEQ ID NO: 31980 - DNA, 192 bp, Escherichia coli
gtgactaaacaggaaaaaaccgcccttaacatggcccgctttatcagaagccagacattaacgctgctggagaagctcaacgaactggacgcggatgaacaggcagatatctgtgaatcgcttcacgaccacgccgatgagctttaccgcagctgcctcgcgcgcttcggggatgacagtgaaaacctctga

SEQ ID NO: 31981 - DNA, 192 bp, Escherichia coli
gtgaccaaacaggaaaaaaccgcccttaacatggcccgcttcatcagaggccagacattaacgctgctggagaagctcaacgaactggacgcggatgaacaggcagacatctgtgaatcgcttcacgaccacgccgatgagctttaccgcagttgcctcgcacgcttcggggatgacggtgaaaaccgctga

SEQ ID NO: 31982 - DNA, 198 bp, Escherichia coli
atgcaggatgatattcttattgacgtgataggtaacgtgtacaaagaaaccggagaactgactgaagatggcgaaccggtatgtgttaaggaggacggatattttgtaaacgtgcgcatcattaatgatgcaaaaaaatcgtcaatattcgataaatacgcgattgttgttgagcatcaacttcgtggctggatgtga

SEQ ID NO: 31983 - DNA, 198 bp, Escherichia coli
atgcaggatgatattcttattgacgtgataggtaatgtgtacaaagaaaccggagaacttactgaagatggcgagccggtatgtgttaaggaggatggatattttgtaaatgtgcgcatcattaatgattcgcaaatatcgtcattattcgatgaacacgcggttgctgttgagcatcaactccgtagctggatgtga

SEQ ID NO: 31984 - DNA, 1701 bp, Escherichia coli
atggaacacttaagacaactgcaaaataaaacttccctgttagaaaagtacgggactagtaacgcacatcttttatggtcattaggtctttacttagatgaatccgattttgataagctagcatctgatggacttactgatggtggaaacgataagaaaatagacttcattaccgtaattaattcaacgttatttattgctcagggttactattgcaatcagcaagcacttaaaatagttgcgcctgcaaataaagcttctgacttaaacactgctttagcgtggattatggcaggctcaggagagtctccaaatgcaaaattaagagcaaaaatttctgaggttagaaaattaattgatgataacgaaattgaagctgttgaattattatatatccataattgtgccgaatctgagcaggttaaaactgagcttgaaacttgtcgtgactatctagcaggtagatttgcagacaaagaaattgaggtaacttacagagaacttggtgttaatagtcttgaaaaattgtatattgcgctatcacaacaaattgttgtgactgacaatataaagttcaatggcgaacttataaattctgtacaaggtgatggctggacttcacatgttggctttgcaaacggcacttggctaaattatttatacaaaaattatggagcagaattattttctgctaattatagggggttcatgggattaaataagagaagaaaaataaactcatcaattaagaataccgcagaaacatccccaaaagacttctttgtctttaacaatggtgtatcaatcctaacaacaaaattcaacaaagaaaaagggttgttggaaggagtttcaatcataaatggagctcaaaccactggttctattggttcagttcaagatatacaaaaattagatggcctaaaagtcctttgtaaggttattgaatgtaatgatgcggacaaagtaaaaaaaatagtccagtataataatactcagaatcatattacaacctgggatcactactctaacagcacagaacaaaaacaggtggcagaagaattttccactcttggttatacatattcactgaaacgcggcttcgaaaatactggttctttatttggcattgagtctgttgctcaaccgctgatagcgttacatggggattatgttagcgccaatagaggtaaaaactacgttttcgatacaaaatcagcctatgacaatgcctttcatgattcgaaagcccagcatattttatgtgcttacactatttcaaaagctatagaaaaagtaaaatctcaaatccgtgcaaaagagaataaaattaaagtagatgaggataacttattattcctccaaaatttaaagtctcgattctttttaatatccgtcatcggagaaatacttgaagaattaacagataaacctttgaacaagaagaaaataaaatataaatatgatacagcattatctaaaaataactctctggatgatttaatcgacctttggacaccagttataactgcgatattaccacatgttatccgtgtttcaggtcaagatttaaccacctacttatctgtaacagacaacccgttatctatcgtatcaaaggaagttaaaaacatattaacatccttaaaagcgttccaaccgattgagccattaattactctttcaaatcaccttgaataa

SEQ ID NO: 31985 - DNA, 1221 bp, Escherichia coli
atggatattagattagctaaattagcaaagagtttaggttgttcatatagtcgttatgccgatgacatcacgttttcaactaataaaaaagaatttcctaccgatttggcaatatctcttcctgagggggttgtcttggggagcattcttgtcagtgaaataaaacgtgctggttttgatattaatgatgctaaaacaaggatctcgtacaaatccacgagacaagaagttacgggacttactataaatagatttgttaacgttgataggaaatattcgaataaaacaagagcattagctcattcactttatagtaagggagaatataagctacctgatgaagatggtaagctagtcgtggggagtatcgaaaaactagagggaagatttgggtttattgaccagattgataagtttaataacatacaagataaaataagtaaacagcctgaaaaatatgcgcctattcatattacattaaaaaactacaggttaaagctgaatgtacgagagaaggcatatagtaaatttatttactacaagttttttcatggacatgcttccccgacaatcttgacagaaggcaaaactgatcgagtatatttaaaatcagctattcgttcactttctgccaaatttcctgagttgctcaagaaaagcacagacggtaaaggaaatgatatcaacttgaatatttttaaatctgatgagaagtcaagttattttattaatatgtctggaggtagcgcagatcttaaaaaattcatcgaaagatatatggatgaatattcaagctactatggaagcattcctaagcatccggttatcatggtattggacaacgattctggttctaatgagattttgaatttccttaaaaataatgttaagggctgccccgatgataccaataaaatgagaaaaatgagatttatccatgtatttaaaaatctctatatcattctaacgcctttaagtgctactggtgagcagactgcgatggaagatctttttactcatgatgtattatcaactattcttggtggtaaaaaatttaacaaaaagaacgatggggactcaaaaactgaatatgggaaacatgttttctctgtgaaagtagttagggataaaaaacgaaaagttgattttagtggttttgaaataatactcaacacttttaaagatgtttttgaacattataaaaaaatatgcagcatatag

SEQ ID NO: 31986 - DNA, 309 bp, Escherichia coli
atgacgacatcaaccaggcgcataagtttctatctgaaacccgccgcagtcaagaacgaaaacgaagcatgtgcctggctggacagccttacaccggaagcccgcaaaagcgggcaacgtgtggcttttctggccgggctggcacttctgaaaataaatccggcagaggcttaccgactggctgcatgggctgacgatgagttggccgtggtacaaaacagagtagaacagaacgcgccacaaccagtaccaaccacacagataaccagccagatggccgggaatatccgggcattatttcctgaataa

SEQ ID NO: 31987 - DNA, 1743 bp, Escherichia coli
atgattcaggacgcattcatcaggctgcgggcaaaacagctttactggcagggttacccgcccgctgaaatatcgctgctgatgggtatcagtcagaacacgatttactcgtggaaaaaacgcgacgcatgggatgaaacgccccccgtggagcgggttacgcagtcgattgatgcgcggctggttcagctgacctcaaaagctgaaaagagcggcagtgattttaaggaaatcgacctgctgacacgccagctcgcaaaactgaatgacaacaggggcggagcggaaaaaagtccgcgaaaacgaaagctgaaaaaccatttttccgaatcgcaggttgccgcactgcgcgaacacatcaccggtcaactggcagagcatcagcgacgctggtatgaggcgctggaagtctgccgtcgtgccggtgttgatattcgcattattgtgaaatcccgacagataggcgcgacctggtgttttgcgcaggaggcactgctgcgtgcgctggatgagcgcgtgaaatatccgtaccagcgaaaccagatttttttgtcagcctcacgccgtcaggcctttcagtttaaaagcgtgattcagaaggcggcacaggctgtggacgtcgagctgaaaggcggtgacaaaattgtgctttccagtggcgcggaactgcattttctggggacatccgccgcgactgcacagtcatacacgggcaatctgtattttgacgaatttttctgggtgtcgaacttcatcacgctgcgcaaggtggcaggtgcgatggccacgctgaatggcctgacgcagacctacttttccacgccgtcatcggagatgcacgaggcgtttcagttctggaacggcgcgcggtggaatgccgggcgaccacgcagtgagcgcagggagattgatgtgtcccatcacgccctgaagagtggagtgctgtgccccgacagtgcgtggcggcaaatcgtgacgattcaggatgcagtggatctgggctggacgctcaccagtatcgacaaaacccgcaacatgaacacgccggatgagttccgcaatctctacatgtgcgagtttgtcagcgacggcgaatccgccttcgaccttaatgccctgctgggctgtggcgtggatggctatgacgagtggaatgactggaaaccgttcgcagcacgtccggtgggtaatcgtcccgtgtggattggctacgacgctaacggcagcagcggtaacggcgatagcggggcgctgtctgttgttgtaccgcctgctgtcaggggcggcaaattccgcacggtggagacgttgcaggtgcaggggctggaatttgaagagcaggcccgtgtgattgaacagttcacgcacaaatacaacgtccagcatattggtatcgacgtgaccggcggtaacggcgaggcggtgtaccagatagtgcggcggttctggcctgccgccgtaccgtacacgttcacgctggcatccaaacgcgcgcttgtgctgaagatgttgcagattattcgtgcggggcgctgggagtatgaccggggcgaacgtgagctggtcagggcattcaacgccgtgcgcaaggccagaaccgcgggtggggcaataacgtatgaaacagaccgcacacgcggcgtaaaccacggcgacctcgcgtgggcaaccatgcttgccgtcattaacgagccgctgggcgatgaggatggcgcaacaaaaatgcgggtgattgagttctga

SEQ ID NO: 31988 - DNA, 870 bp, Escherichia coli
atggcagacaagaaacctgaacgaaaaaaattccgcgtggccgtttccggtacgacctcagacgggcgcgaaatctgtggcgacatgctgaaagctgccgccgccagttatgacccgtccgtctacggcgcacgtgtgaacgttgagcacatcctttcaccgcacccggacagcgccttcgcggcgatgggggatgtggtggcactgagcgcagaagacatcactgacgggccgctggcgggacgcacggcgctgtatgccgaaattgaacccaccggacgcatgaagaaactgctggatgacggcaaaaagatttatgccagcatcgagctttacccgcagtcattcatcacgggcggaccgtatgttcagggactggcgatgaccgacagcccggcaagtcttggcactgagcgtctgcagtttgccgcacagcagcgcgcgcaggcgatggcgtttaacaatcagcagtgtgagccgccgtttttcaccgatgccattgaggccggcgtcattgccctgaaccagcgccagaacgacgaaggcgttcagtggttcgcgcgtgtcatgaacctcatcagcggcagccgtaaaacggacggcgaacagtttgcacagatgcgtgacgttgtggagcgcgtggcctctgcgcacgctgacctgcttgaccgtttcaacgcacaggaacgccagcgcgacgaagaccgcgcacaaatcacccgtctgacccgcgaactgaccacgctacgtacgcagctacaggcgcaggacagcgacacgcatcagcgcttctccgcaacgggcgctgacgcacctgctcacactggcgtaaccggcggcggcattgcttacaccgcctgtgatttctga

SEQ ID NO: 31989 - DNA, 1062 bp, Escherichia coli
atgaacctgactctttcatccaccacccgtggcgctctggcgatgtatatgcagcagcaggcgggcatgaacaatgtttctcccgctgcgcttgctcagcgtttcaacgttcagcccgccgtgcagcagcgcatggaaaatgccattcagctgagcgacgagctgctgcaaaaaatcaacgtcatcggtgtgaccgaccagaaaggcgaaaaagtcctgatcggcatcaacggtccttccgccagtgtgaacaccagtacaagtgagcgccgcgagccggcatcactccacgagctggcggcacgccagtacgcctgcgagcaggtcaactacgacacgttcatcagctacgcacaactggacgcgtggtctgcgcacccggattttcaggcacgggtcagcgcgcagattgcccgccgtatcgcccttgatcgcatcatgattggcttcaacggtacgtcccgcgccgtgaagtccgaccgcagcagtaacccgctgttgcaggactgcgccgtgggctggctggaaagcatccgccagaatgcagcccagcgtgtgatgtctgatgtcaccattacggcacgcgatatggacaacgccgtcacctacaaaggcaagtacaacaacccggacgcgctggtacaggatgcgcgctcatccctgctggatgagtggtacaaggattcatccgaccttgtggtcatgatggggcgtgatctgtttaacacactgcgcctgccgctcattaacgccatgagtgccgccgcgccgaacacggaactgatggccggtcagttgattacctcctcacgcctgattggtggtctgccggtatatctcgcgccgttcttcccgaaagacgcgctgctcatcacctcgttcgacaacctgtccatctactaccaggtgggggcattacgtcgcctgatgcgcgaagagccggactacaaccgcatcgcaacctatcagtcctccaacgatgcgtgggtggtggaagacttcggcaagtgcgcccttatcacggggctgaaactggctgatgaaagccatcacgaagactga

SEQ ID NO: 31990 - DNA, 813 bp, Escherichia coli
atgctgacaccggcacaggcgcattttcagcgcacgatggcacaacgcgccggactgaccgatgacagtcagtcacagacggtgcgcacggctcacgaacaaatcctgcatcgcctgcgactggcacaggcacgactgaaaggcattcagtcaaaggcagcgaaagcggaactgaaaaagacgctgctgccggatttttccggctggattgacggcacactcgagagcgacagcggacgccaggatgaggtgatagtcaccctcatggtctgggccgttgactgtggtgatttgccgctggcgctgcgcatcggtgagtacgtggtacgccataacctcagcacaccggacagcttcgggcgcgatgccgccacgctgctgacagaggaaatctgtaacccggtgctgacgctggcaggcactgaccaggacgcggatttatccggatacatcaccccgctggacacgctacaggaaattgtcgccggtcgggacatgccggacgaggttcgcgccaaactctgcaaggcgcgcgcctttgcccgtcgtggtctgaccgatgcggacagtatggcttcatcattgacactgctgcgcgaagcgatgcacctgaacccgaacgcgggcgtgaagcgcgagattgccacgctgtcccgcgcggtgaaaaagctgaccagcagtgatggcggggagaacaacgcggaaaacaaaagcaccgcgaaaaccgccaccacgaaaaccgcgacgaaaaaggcaggcaaaaagagcgccacaaaagccactgccacacggaaaagcaaaaaatccgcgtga

SEQ ID NO: 31991 - DNA, 495 bp, Escherichia coli
atgagcatgattgcaaaacccggtatcactgccgcgacggaggatgtcgcggacacggacgacggtgatgcacgcatcaccacggacgacttctggccggagacagaacttcaggcgctgcgccttgccgttcgcctgcccggtcgcaccaccacgtcacgtctgatgcacgcggcaaccgaagctgtggcacacgtcaccggagagctgcgcaactggcaggcgcagcagatgaatgacggatacagcacgctggcggacgttccggcctctctcgtgaacggcgaaagtgtcaacgtgcaccgcttccgccttgcggtgtatgccgccacccgcgccctgatactggagcgcgtgcgcgatgtggacaccaccgaacagggcgaccggaaagcggacgcactggaagcccagaccggtgacctctggcgcgacgtgcgctgggccattgccgatattcagggcgcaccgcgcatctttgcgaggctgtgctga

SEQ ID NO: 31992 - DNA, 201 bp, Escherichia coli
atgaaggtgaaggcattacagggcgacaccgttgacctgctgtgcttccggcactacggcacaacgcagggcgtgactgaaaaggtgctgaccgccaatccggggctgtgcggacagatttttctggaagccggacaggaagtggaattaccggagcaggaagagaaaaaaacacaggagacggtgcagttatgggattag

SEQ ID NO: 31993 - DNA, 294 bp, Escherichia coli
atgggattaggtttttttcgcagtatttacgaccacatcgccttcgccgcctccgtctctgcggtcacgattggcgcgatgaccatcagcgaaaaaatcgcgctggccgggctgctgctgggtgcgctttcactctttcagggctggcttcaccgtcgccgcatggagcgtgcgcaggtccgccgcaatgcgctgattgcacagattctggcacaggccggaacgcgcggacttcatgaaagtgaacaacgggcacttgccgcactgcaacaggataacgatgaaaaacattaa

SEQ ID NO: 31994 - DNA, 543 bp, Escherichia coli
atgaaaaacattaagcgatatgccgccgccgtgattgtggcgctgggtgtctcgctggctcccgaagcactgcgcacctcacaggaggcacagataaaaattgccacgtgggaagactgccgcgccacaccctacacggacatcgcgggtgttgccaccgtgggctgcggctccacggggaacgtacagaaacacctgtacagcgagcaggaggtggcccgtcgctgggtgaatgacatgcagcgggcggagaactgtattaaccagaattttcagggggcagccatgccgcagtcggccttcgaggcgatgacggatgcggccttcaatctggggtgctccggtctgatgtggtttaaggatcgcaacggaaagcgccagcgcaccaccatctggaaacaggcacatgcgcataactgggcgctgatgtgtggtcgcctcactgattttgtaaatgcgggcggaaagcgcagtcagggactggttaaccgccgcagcgattttcgcacctggtgtctgcgggatgtggagaaacagaaatga

SEQ ID NO: 31995 - DNA, 447 bp, Escherichia coli
atgaggctgaccaccgccgccgtcgtcgccctgttttcgggggcgctgtatctggtgtcactgcgtcttgcctggcaggcagggcatgaacgggcacgtcgtgaatatcacgaacaggcgctggcgggaacgaatgccgccgtggatgcacttcatgcagaactccggggcatcagcagtctgctggcacaggtccgcgccgcagagcagcgccggaatcaggaaggagaaaaacgccgtgaagagatgcgcaacatactccgggaaaatccgtgcgcggctgctgctgtgcctgccgctgttgctgaccgcctgcaacagcgcaccgcgccccgccgtggtcactcagacgcagcacgcaccgctgccggaaagcctgacacaaccaacgccagcgccatccctgccccgtccgctgacgtggggcggactggccgtctggagtga

SEQ ID NO: 31996 - DNA, 483 bp, Escherichia coli
atgctgaaaatgaaccgtctgcgcgaagccctcaccgcctcatcccggtggtgtcgcgcgaatccggaaaaactcacagtgtttgcagaaagcggaagtattgagaccaccggcgaaaccccgacgtttgtctaccgttacacgctcgtggccttcgtcatggattttccgggacacatcgacgagctgatgctgccgctgattgtctggctcatgcacaaccagccggatttgctgctcaacccggaaaaaaacagggacgtaaagttttccgttgccgtcaatgacgacgacagcaccgacctgttactggaaattcccgtgcgcgagcgcgtgaaagtctgccgcaatgaacagggtgaactgtatccggtgcacctgccggaaccccgcccgcctgccgcactgacaggagcctggggagagctgattgttgaggatgtgacctttaaggatttgacggatgaacacgacgacgcatga

SEQ ID NO: 31997 - DNA, 639 bp, Escherichia coli
atgaacacgacgacgcatgacccggacgcggttttccgcgacatcctgaacggactttccaccgccggacgtgcacgcacggcgcaggctgtagggcaggcgctgcgccagagccagcaggcgcgtatccgtgcgcagaagaacgcagacggttcgccgtatccggcacgaaaacagcaggtgatgcacacccgccgtgaagtgaagtttgtctggaacggcgaggtccgcacgctgcgccagtggggacacaagcgttaccggaaaggccgcgccattatcgggcgcgaccctgaccgtggcggtgcgctgaggacgttttaccgtgatgatattgagcgatacatcgcggtatcgtccatgtctgcccgtcagaccagcaaaaaaagcacgccgatgttcgcgcgtcttcgcacataccgctggttaaaaatgcgctcagatgcggaaggcgctgttgtgggcttcgatggcctggcggcacggattgcccgcgtgcatcaggcagggttacgcgacgaggtggctccgggcgtgatgaccacctacccggtgcgtgaactgctgggtatcacggcagccgacgaacgcctggtatatgacacgattatccgctccctgaggagtgcggcacgatga

SEQ ID NO: 31998 - DNA, 582 bp, Escherichia coli
atgacagcggaaatcatgcgactgcttgcaaacatcatccgcactggcgtgatttttgccgtggacgaaaccacgtggcgcgttcgtgtgcgcagcggagagctggagactgactggctgcgctggaatacgccacgcgcgggcgcgttcagcgtctggctgccgcccgctgtgggggaacaggtgatgattgcctgcatcggtggcgaccccgtgaccgcttccgttatcggcagtctctggagcagtgaacatcccgcgcccggcagcagcctgaaggaaatcgttgtcacagcgcctgacggcgcggtgttccgctacgatgcggacgcaggcgcactgagcgccagcggaatcaaaaccgccaccattcaggccggaacaggcgtgacgctggatacccccaccgtcacctgcacaaaccatctgaagacgacaacgattgaggtgacagaaggcggaaccatgagtggcaatatctcgcacagcggcggtgatttcacctcaaacggtgtgacgctgcacacgcacaaacacagtggcgtgaagagcggcggtgacaccacaggaggcccgcagtga

SEQ ID NO: 31999 - DNA, 777 bp, Escherichia coli
atgagtgaaccgtcacttctccccccttcagccagcgatttcatgcgctgcgtggaacagggaactgcccggttgtcagcattacctgtcagccttaaccagctctgggatcctgacacctgtccggtggccctgctgccttatctggcgtgggcgctgtccgtggacaggtgggatcgtgactggacggaagaaacaaagcgccaggtgatccgtgatgcctgggcaatccaccgccataagggaaccatcagcgccatcaggcgtgtggttgaaccctttggctatgtcattaacgtgacggagtggtggcagaacggcgacccgcgcggcacgttccgcattgatattggcgtgcaggacgcgggtatcacagaggaaacgtactccgagctgacacgactgatcgacgatgcccgtccggtcagccgccaccttgcctcgctgaacattatgctggatacgcagggagtcgcacgtgtgttttccggcatgcacgacggcagtgaaacaacaatctggccagccgcttctgccggtgttgagactgtttcggtgttccgggcatctccggctttctttgacggcgacatgctcaccatttacccgccgacaccgtcggtatctgtcgatgcggggattgtcatgggattacgggttacgggcgatgatgcggtgaccgtggagccacaggcggtgatgcaactgaccgccacaaccggaaccctgacagcatcagtggtatttctggaggattctttgaggattttttcatga

SEQ ID NO: 32000 - DNA, 1767 bp, Escherichia coli
atgactgtaaaatatttttctgttctgactgacaaaggtgctgcccgtctggcaaaggcggtggccagcggctcaaaaatatccatcaccaccatgaaactgggggatggcggcggcagcctgccggaaccggcggcgtccatggaaaagctggtgaacacggtatacagcgccccgttgaatcaactgagcgtcagcgcgtccgatgccagccagcttgtcgccgagatgattatcccggaagacaaaggggggttctggatccgcgagattgggctttttgacagcgacggcgtgatgattgccgtggcgaactgccccgaaacctacaagcccgtactcgccgagggaagcgggcgcacgcagacaattcgcatgattgttgtggtttccagtgcttcatccgtcgagctgaaagttgatccctctgtcgtgctcgccacccgcgcctatgttgaagaatatgttgcacaggaaaaggactctgtaccgccgctgcctgatgtatggataccgtttaacgattcactggatatgcttacggggttcgctccgggctataaaaaaatcaccattggtgatgatgtggttcaggttgccagtgataaacaggttagtttcacgcgcgcatcaacggcaacctatatcaataaatcgggtgaactgaaaacggcggaaattaatgagccacgatttgagcgcgaaggtctgctgattgaagggcaaagaacaaactacatgctcaattcggaaaccccggccaactggggcaagtcagtaagtatggatgtacccgaaaccgggacggatagttttggttttacttatgggaagtttgtctgcaacgattctctgattgggcagacctccgctgtaaatatggcatcagttgctgcaacagaggcggttgatgtctctggcgataacaagtacgtgacaacctcatgccgatttaaaacagaattacagctaaggctccgcatccggtttgataaatatgacggcagtgcaacaacttttcttggtgatgcgtacattgatacacagacgtttgaaattaatacgaccggagatgcctcagacagaatttcagccagagccagaaaagatgagactactggctggatttttgccgaggcaacaattgaggcaattgagggtgagttaaaaataggctctcaaatccagtgttcacctaaatggggtggaacaattgcatccggtgattatatttatcttgctactccacaagttgaggatggtgcttgtgtatcatcatttattgtttcgggagccagcgcaacgacaagagccagtgatgtggtaacaatccctgcgaaaaataacctgtcagcacgaccttttaccgtattgtgcgaagtgaacaaaaactggaatactccccccaatattgcgccaagggtatttgacaccggaggatacagcattgataacgattatatgtcgcttaatttttcctcggcgggaacaatagttgctggagtgggaatgatcaacgcaaaaatcctcgccgatggagataaattcattatggggctgagggcaggagccgacctggcgataaatgcaatatgcaatggtaattatgcggtaaccgctgaagggaaaacatttggtgttacagcaaatttatgccgctttggtgggcagacagcagcaggaacgcgtcatttgtttggtcatattcgtaatttccgcctatggcataaagaattaaacgacagacaaatcaaggaggcggtatga

SEQ ID NO: 32001 - DNA, 279 bp, Escherichia coli
atgaaagatctgaccctgaaatttcatgataaacagcagtttaaagcattcctgtcgtctcttgactgggaggaaaacgaagacctccagaacaaacttctggtcaatgaaattggtttcacctacacagaaacaggggtaactgaagagggggaagctgtctgtatccggaatgacggttattttgtcaacatccgcattcttgatgatgcgtttgatatttctgtgttctctgattatgtggtggagctggaaacaccgcttcgggaatggagctga

SEQ ID NO: 32002 - DNA, 294 bp, Escherichia coli
atggatataagccccttgcttcatgcactttgtgctgtggctgctcagcttctggccgggcttttcaccggaaactggacttatggtgcggtagctggctgtacgttcttcattgcacgtgaacacacccaggcagaatatcgctggattgaaaaattcgggaaagggaaacgaattaacatgccatggtggggtggttttgatccgcgcgtgtgggatgccggaagcctgatggattttgctgtaccggtggcaacatgcctgttgttctggctgtcggttagttactggtga

SEQ ID NO: 32003 - DNA, 3465 bp, Escherichia coli
gtgaaatcccttgatattcgtgtcagctttggcgcaattgaccggctgacacgcccgaccgaaaacgcccgccgtcaggtgggcgctctcactgaatcccttcagaagacgcagaacaacatacaggcgctcgacagacagtcgaaggtgttcgatcgtgccgccggaaatctcagtaaataccgcgaacagattgcccgcgcggagcagaggctcgccgggctgcgaaaggcagagcagaacggtaacatcctctccgaaaagcagcgcgaaacgctggcggcactctccgcgcggcttgagcgcctgaacgagctgcgcacgcgcgagcgcgaaaaactccaggcggcggctggcgaaatgcgtaaacatggcattctgctttccggcagcagccgcaccattgaaagtgccgttcgtcgcacgcagcagtacaacgagcagctcgagcgtgaacggcaggctctggctcgcgtgacgcaggcacagagccgctatgaggccgcgaaggcacaggcggaaaaactgcgcaacacaggggctgtggcgatggcggcgggtacaggcggcctgtatgcggcgcagcgcatgatggctccggcgatggagtccgaacagcacggtgcggtcatcgcagccggttcgggggaaggcgcacaggatggcgcacgttacacccacatcatccgtaacatacaggctgacggtctcgctgattttgccggtgctgcggaggccgtgagtgcggtacgcagcacgctcggcgcactgggcgacaccggtgacagggagcttgagcgcatcagccgtcgtgtgctggatatgcggaccgtctttggtgttgatgtgccgcagagcattcaggccgctgccatcatgatgaagaacgggctggccgccagcagtgacgaggctactaacctgatgacggcagggatgcagcgcatgtccgctgaaatgcgcgatgaactgccggaaattctgcatgagtattccacccacttccgcaacatgggcttcaccggcagcgagacaatgagtctgctggttgagatggcaaagcagggcaagtttgcgctggacaaaaccggcgatgccgtgaaggagttcagtatccgtggttcggatatgtcgaaatccagtgtttcagcgtatgagacactcggtctgaatgccgaacgggtgtctgctgccattgctcaggggggcagtaccgcacgccaggtgatgcaggtgaccgcccgtgcactgctggccatccgtgacccggcagagcgggcgaacacggccattgcgctgttcggcacgcccgttgaagacctctccgttgaccagatcccgcagttcttaaaggcgctggctgatgtccgtgacaacctgggtgatgtcagcggcgtggcagaccgcatggggcagacgctgcgcggtaatctttccggcgatgttcaggcgctgagtggtgcgttctcagggctacgcacggacatcttcggtacagtgacggaggatttgcgcgggctggttcagacggtgagcgcgtgggtgacccggatgcgcgaatgggtcggagagcatcaggcgctggtcagagtcctggtgctgaccggcgggagtgttctggcgctgtcttccacgttcggtgcgctgtcactgacgctcgggctgattgcggggccactggcaaaactgcaactgggactggggctgctgacggggggcggtggcattggtggtgctgtccggcttgtgtctgcgatggcactgcgcctgacggggctgcctgcgctgtgggggctggtcacgggggctgtgtcggtactggggggcgcactgggggcgctgttcagtccggtcgggctgattgttgccgccctggtgggcggcgcggttctggtgtggaaatactgggatcagatcagcgcgtttttttccggcttttttgccggagtgtgggaggcgctgcaaccgctgcgggaagcctttgcatcgctggctccggtgttcgggttgattggtgacggcatcaaagctgtgtgggagtggttcacccgcctgcttgaacctgcgaacgcctcaaaagagacgctcgacaaatgcaccagtgccggggagtcgttcggcaaaacgctggggtgggtcattcagaacattgtgctggggccgctgatgctgctccttgatggtctcggtaccgtgctgaagtggctgggtgtcatcccggacggcatcaaaaaggcacagaaggagacgcaaaaactccaggagagcgccgcaaaacaggccacacaaaaagcgccggttgcgtgggagtgggatcctgtacagaaaaaaatggtgcagaaaacatggtcgtggtcatcagatgcagcggaaaacaacggtgacaataaacccgcaatacctgcccctgcggttcccggagaggtgaagggaacgtcagacaatccggtcagcaaacccggtagtaaatccccgctggatgaggcatggttccggcaggggatacagaaaaccgccagcaacaccggcgggctgcttgaggaaaccaaaaaacgtactggtcccggcgatattgttttcaaaaacctgcccggacccgaaatcattcacggcgagtggaaagcaccgcaggttatccggacagtgcaggcggtatcggcgggcggaggactggcggatgcgctgacaacgctctggcagaaactcaccggaagacagactgcttcacccgttccggtcgtgaatattcctgcgccagtggagagagtggcacgtcaggtatccacgctgccgcagcacaacgaggcaaatacagaactggttgccggtattcagcgtgtgcatgaggcggtgaacagtccgggtggagagggcactttgccttcccccgtggttaacgttctgatgccagcagtgaatgttcctgcgccagtggtgagcgtggcccgtcaggtgtccacgctgtcacagccgcagcacaacgaggcaaatacagaactggttgccggtattcagcgcgtgcatgaggcggtgaacagtccggggggagagacggtatcgcctccacctgtggtgaacgctctgatgccagcagtgattgttcctgcgccagtggtgagcgtggcgcgtcaggtatccacgctgccgcagcacaacgaggcaaatacagagctggctgccgatattcagcgcgtgcgtgaggctgtaaacggcccgggcggagatgtggctttatctgttcctgttgcggaggttatccgtccaccgctgcgaccggagtccgtcaaaaaagaaaccgcgccacaaacgcaggctgcggcattttccggtgaaatacacgtacatctgcacaacgtcaacacgcagaatccgcgtgaactggcaaaactggttggcgaggctgtccgcgaagagatgcgcagacaggcgcgtacaggcatgaacagcttccgtgacagggactaa

SEQ ID NO: 32004 - DNA, 417 bp, Escherichia coli
atggcagcaaagaaagatgacatcatgaacagcgaaatcgtcgcaggtgacaccaccactgaaaacatcgatgtggcagaggaaaacactgcggataacgcagaagccgcagaggaaaaaacgggggtgaagttatcctgcccggtggtgcgtggcgaacgcgttattgactacgtggagattggcgaggaaatccgtcaggcaggttcactgcgcgggctgtctctgattgaggtgctgaacctcaaaacggacccgatgatgacgctgctttcgcgcgtgaccgcaccacgcctgaaactggcagaaattcagtcactgtccaccggtgatttcgtggcgctggcgactatggctgcgaatttttttgctcccacggagtctgcgaaaccgtccgtggcggtgatggaagcgtaa

SEQ ID NO: 32005 - DNA, 516 bp, Escherichia coli
atggctgtaccacgttacgttcgccagttcacgctgtttgtgaacggcaaaaacaaaatcggcacagtgacaggcgtcagtctgcccaaactgacccgaaaaaccgaagcctatcgcggcggcgggatgctgggtgcggtacatattgacctcggactggatgacggcgcactggatgcctcgttcaccaccggtggtgttgaaaaagaactgctccaggaatacgccactgacattaacgaagtggcgctgcgctttgtgggtgagctgttcaccgatggtgaggaaagtcagatccttgaggtggaaatgcgcggacgcatcacggaaatcgaccgtggcgaaaccaaacagggcgacaccacgcagtacaccttcgccgtcaaaaacacctactacaaggagtcggtggatgacagcgatgtgacagaaatcgacctgctgaacttcatctacaaaaaagacggccagaacgtctttggcgaccgcgtgagttcggcacttggcctgaactga

SEQ ID NO: 32006 - DNA, 1185 bp, Escherichia coli
atgagtgaaacacgctttcacggtgcacgcgtcaaagaaaacaccgacctcgtgaccgcgattaatgacattgattccagtgtcattggtatcgtggccacggcggacgatgcagacagcgacgcgttcccgttaaacaaacctgtattaatcactcgcgtggcaaacgtgctcggtaaggcgggcaaaaaaggcacgctgtacaaaacgctcaaggcgatttccgaccagaccagcccgaaggtcatcgtggtgcgtgtggcagaagccgaagaagagggcgaaaaaacacaggaccagcttgtcatcggtggctcacaggatgacggcagctatacgggcatgtatgccctgctggttgccgaacaggacgagagcattggttaccgcccgcgtattctggcggctcccggccttgataccgaagcagtcacatccgccctgtgcgtcattgcggacaagctccgcgcctttgtgtatgccggatgtaacggatgcgacacgatggcgaaggcaatcacttaccgcgcgaagttctccgcgcgtgagctgatgctgctgtggcccgacttcatcgcttacaaccccgtgagcggtgagaatgaggtattcccggcggcagcgtatgcatgcgggctgcgtgcgcggattgacagtgaacagggctggcacaagtcactgtccaacgtggcgctgaaaaatgtgctcggtatgtcgcagcaggtgttctggtcgttgcaggccgaagacagtgatgcgaataacctgaacaacaaggaaatcaccacgattattcgccgtaacggcttccgcttctgggggaaccgtactgccgaaaccagcgactacatctttgaggtgtacacgcgcacagcgcagattctggcagataccatcgccgaagcgcagttcgaaacaattgacgaaccgctgaccccggcgaacgtgaaggacgtgattagcgccatccgcgcaaaactcaatgccctggtcaccgccggaaaactcatcggtgcggagtgctggtatgacgtgctggacaacggcacgacggatttacgtcaggggcgcgtgcgcatccgttataagtacacgccagtgccgccgatggaagacctgacgctgtaccagacgttcacggatgagtatttcgactccgcttttgcaacgctgggaggtgcgtaa

SEQ ID NO: 32007 - DNA, 1116 bp, Escherichia coli
atgaaccctgcggacgtaagcggatacctgaacggtctgtcagagtgcgtgaagatccctgatttttccatcacggttaagggcacggaaaacgcggcgctgacccgacgggtcatctcgctggcaatgaccgacaaccggggatttgaggcagaccagttaaccctcacgattgacgactgcgacggcggtgtgcaactcccgaagcgcggacagacgctgggtctggcgctgggctggaaaggtgaggcgctgatggacaaaggaaccttcatcgttgacgaggtgacacatgagggaccaccggacaggctcaccatcacggccagcagcgcagacttccggcaggagttcaacgtgaagcgtgaagtgtcctggcatgacgtgacggtgggacaggttgtttctgccatcgcgtaccgctacggactgaaggcacaaatcagcgcctcgctggcagaggtggaaatcgaccacgccgaccagacggaggaaagtgacatctcgtttctcacgcgcatggcggacatgctgggagccatcgccaccgtcaaaaacggcgccctgcttttcatcgtgcccggacagggggtgagcgccagcggaaagccgctgccctcattcgccatcacccgcagcagcggcgacagccatcacttccgcattgcagaccggcaggcgtacacgggggtacgcgcttactggctggacctggactatggcaaaaagaaaaaagtcagcgtgacgaaacgtggttctgcccaaaaaacaaaaaaggagaaaagcagcagccgcgagggggattacatggaaggcgcagacggcaatgtatacgtcatgcgcaaaacgtttaaaaacgaggaggccgcacgccgtgccgcagcggcaaaatggcagcagctacagcgcggtgcggctgagttctccatcacgctggcacgcggtcgccccgacctgtaccccgaaatgcgcggcacggtatccggtttcaagagtgacatcgacgcggaggactgggtactggcgaaggtggagcacaacatcgacgacagcggcttcaccacgcggcttgaactggaattaaaaattcctgaatggatagcgcaacaggaataa

SEQ ID NO: 32008 - DNA, 258 bp, Escherichia coli
atgtcttttccgtgtcctttttgtggtgcgagcacgcgcacccgcacaagccgcgccgcgaacgactcacgcactgtccggcagaagctctaccagtgcaacaatcccgaatgcagtctctccttctcgacgctggagagcttcgaaaaactcaccgtaaagcgcaccggtggtacttcaccggatattccgtggcagagcctgccagcgtcacaccgtggtgatgcgcagatgccgttaccgcttccggcaatgtga

SEQ ID NO: 32009 - DNA, 141 bp, Escherichia coli
atgtcgcaaaaatcgcttacggccatcacgttctgcgtgacggcaatcctcataatctggatgctgcacggttcgctgtgcgaaatacggatgagcttctggggagcggagtttgcggcgttcttacagtgtaagcagtaa

SEQ ID NO: 32010 - DNA, 2070 bp, Escherichia coli
atgctgcttctactgacacttttgcctgcgtgttcagtggcgggtatgcgctttaaccctgcattcctgtcgggtgatacagaagctgttgctgatttatctcgttttgagaaagggatgacatatctacctggtagttatgaggttgaaatatgggtcaatgattcgcctttgacatcacgtaaggttactttcaaagctgatgagcagaatcagttgatcccctgtttttcgctcgatgagttagttactttaggaattaacaaaagtgcattgccggaacaggcgcaagcagagggaaataattgtctcgatttacgtatatggttcgcagaagttcaatacactcctgaactggatgcgcaacgactcaaactgacctttccgcaggcaatattaaagcatgaagcccgtggttatattccacctgaggaatgggataatggtatcccggccattcttattaattatgatttttctggcaacagtgatcgtggagactatgcgtctgatagttattatttaaatctccgttcaggtttaaatttaggggcgtggcgttttcgtgattattctacatggagtcgttcaggtaattcaccgggtaaaattgcacatgtgagtagtacgttacaacgagtaattattccttttaaaagtgaattaacactaggtgatacctggtcttcatcggatgttttcgacagtgtgagtattcgtggtgctaaacttgaatccgatgaaaacatgctacccgatagccaaagtggttttgcccccactgtgcgcggtattgctaaaagcaatgctcaggtaacgatcaaacaaaatggctatgttatttatcagacatatactccaccgggaccctttgaaatcaacgatctgaaccctacgtcttccgctggggatttggaagttacgatcaaagagtctgataattccgaaactatctataccattccttacgccgctgttcccattcttcaacgcgaagggcatattaaatattcggcaactgccggtaaatatcgtagcaatagctataatcaaaacagtccgaatgtctttcaaggagatttgatttgggggttaccctgggatattaccgcctacggagggatgcaatactcaaataattatcgggcaatagcactcgggcttgggttcaaccttggtatgtttggtgcgacgtcatttgatttaacgcaagccaatagcacgcttgccgatggcagtaaacatcaagggcaatcgtaccgtttcctatattcaaaatcgttagtgcagacaggtacggcttttcagattattggttatcgctattcgacggagggattttattcgttgagtgataccacatacaaacaaatgtcgggtacggttatcgatccagatacccttaatgaaaaagactatgtttataactggaatgatttttataatttacgttataacaaaagaggaaagtttcaggcaaatatatcgcaaccattgggcgaatatggctctatgtatttggcggcaagtcaacaaacttactggaatacgaataataaagataccttgtatcaggtcggctataatacgagtgtacatgggatttatttaaatattgcttataattatagtaagtcaccaggttcagatgcggacagaatcttatccgtaaatgtctcattgccgatcagcaattggttatcaccagctgtcgatgggcgtactgcgacaaattctatgacagcaacttatggttatagtcaggataatagcggtcatgtaaatcagtatgccggagtatctggatcgctgctggaacaacataatctcaactataatattcaacaaaattttgccaaccagaataatggcgaaaatggctcggtagggataaattaccgtggtacatatggttcactaaattctggatacagctacgataataatggtaaccagcaatttaactatggtttaagtggtgccctggttattcacgaaaatggtctcacgttaagccagccgttaggagaaacaaatatactgataaaagcacctgggcaaacaatgtaa

SEQ ID NO: 32011 - DNA, 249 bp, Escherichia coli
atgagagttgagcagaatgatttcagggacatgttctccgtttatctctccggcccgccgcagacgcagcatgtgtctggtgtatccccggcggcccgggtcgcgcacgcgggtctggcaggcgaagaatggctgaaagccttcccgctgcaggctttccagcactgtgatggtggggatatacgcgtagttttcgcttctggaggtgtgtttgtcttccccgaatacgctggggacgacctgcattaa

SEQ ID NO: 32012 - DNA, 939 bp, Escherichia coli
atgtctcttgtattacgtaaattaaaacaggtaatactgatatcctcgctttgttttatttccgccggagtttacgctgccggtgtcgcaaaaacggcagcagatgcaatgcgctgtgatcctgatgctggtgataatgaaaacggatacggttcctgcccctttctgggcagcatctacgatgctgacccggtattcaagaaagaccttgatgatgcgctgaaatcagcaggacttaccgggttaaccgggagacagggtgcaatgaacggccctgacagtggattaattccggtggtcgttggtggcgagaagtggctgctggggtctgtctgtgagcggggtaattgcggtgaccattatctgaaaatactgtatatcccctcagaacatgttattgccggtttttattacaacaacggagaggaaaacatgtttggcgatgtcggggatgctgaagcacaactattacgccgcgatgtacccgacgttacaccagtgcagcaggctccggcattgccagtaacacatacagacggcgcaccggcagacactatctggacctttaagggtgacagcggcaaaacgttatggcaggtctgcggcggtcagagcagcagttgcgccattatagccaacactaagtattacgttgccgttctgaatcgtaagtcagcaactggctgtgctttcggtgatttttatgttgccgcccgcgataccgcaacatggcggcagtatgataccggcacctgcagtgcggatgcgtacatccgcaagggcagcatcaacaacggtcagtatctgtccgtcgatattggtatcaacggggtgctggtgaagcagttcccgattggttactggtcaatgcagaaggaattttccggcaaccgacgcccctcatggtcaaaagttaaagagaaaaatcagcaacattaa

SEQ ID NO: 32013 - DNA, 411 bp, Escherichia coli
atgaaagcgtttatattgtcattaatagtttcaggtttgttgttgagtgcatcagttaatgctacagaggttaaattaccccgtactgtgattgatgtgaaagatggaagtgagcagatgtgcggaagtgaggatgtaaaagacgggatatgcagcctcattggtgtctctgatgatggcaaatatgccctgctgagcagccccggaggctcggcctgttatgacccttatatcatcgttgtcaatcttactaccagcaaaggtaaaatgatggattataaccgtcatgcaacatgcagtggtgaggccaccgctaagtttgtccgttcttcagacaaagaccatcttaccgttgttatttacgatccctccatcaaaaagaatgtcggtcttaataccattgacttttaa

SEQ ID NO: 32014 - DNA, 216 bp, Escherichia coli
atgggattctggagtgtaaccgggaaactgcttaaagaggttgcaaaagacgccctcaacagtgcacaggaggtaaaaactcttcatgaccgactggagaccaggagcagcgaagagctaaagagaattatcaccgacaacggtattttcagcagtgtaacggagatggaaaaacgtctggcgcaaaaggttttacgggaccgggacgaacattaa

SEQ ID NO: 32015 - DNA, 708 bp, Escherichia coli
atgactcaggctgagcatcgccatgaccggcttgccgtcagactgtcgataattattagccgtctggtggcaggcgaaacgctggatatacgcaaactggctgctgaatttgacgtgtcagttcgtaccctgcgccgggattttcgtgaacgactgatgtacctggacctggagtatcgacagggccagtgccgtctgctgtccggcagccgtcagcgggaactggcagtgataacctttgcccgtcagtcgggcgttgagtccctgtttccgggacttgacggacatctggtcagttcacttctgggtgggccgggtgaatctccctgccttatctggcagggagattctgcacagaccgtcaccgacagtggagtctttatacggctggtaaatgctgtccaggaatgccggaaagtgactctgcacggcaacggatgcaaccatacggatatctcaccctaccgcctggttctgcatgccggtagctggtatctgacaggagcacaccagacacgcatcatcgcactgccactgactgatatccggtgcgtcacgcttcatccggacacttttacacccgacgccacggtgcgcgacatcctttctcgcccgaattttttacaggcattacctcatttccggttcataggtgaagtgctgtccggcttatgccctgaactacatcaacccgcaacagaaggataa

SEQ ID NO: 32016 - DNA, 2652 bp, Escherichia coli
atgtctgtgagctggactaaagctgatttttttaagtgcgctttgcaggtaaatcctgcgggttacagtaagtatcgcgggaaagaatcacttagcgaggatacctacaatcagaagctgttggagtcctgcctcgaagctggtatacagattgtcggtgttgcggaccatggtgctgttaatgctgtagacaggattcgtcagctctttaaggaacatggtattgtcgtttttcctggatttgagatctgctcgagcgaaaaaattcatttcgtttgtttgtttgatgaaaaccggacagtacaagaattggaacgctgcttgagcaatttggggtatgaaaatcccgatgattgcatttccccttcaaggctcagcgccatacagattattgaaaaagtagaatgtttgggtggatttattttcgctgcacatagcacgaatgataatggcgtgctgaaatgccgtatgaatcatatatggaaagaacgtgggttgttggcggcgcagattccaggaactgtcgatgacttgaaaggagttgaggatgatttttatcgcaaagttatcctgaacaaacttcctgactatcgtcgcgagcgtcctattgccattatcaacgcggcagatgttgcccaaccagaggaaattaaaactccgggcgcatcctgcctgataaaaatgactcggccatgcttcagttcatttaaacaggcatttttagatccagagtcacgagtgcgtctcaacgcagataagccacattgctatgcttcggcaattgaaaatattcattttactggtggatatctggacgaaaccaatatcaccttttctgaccacctcaatgctgttataggtgggcgtgggacaggtaaatcgactttgctggaggccattcgctttgctctgggtaaacagccttttggtgattcagcacaaaagcaacatagtgcaattattaaaactaatttagggaatggtacgctggttcaactacaggttcgctctgctatgatgcaaggccgtacctttaccataagtcgcaaatttggcgggaaatccattgtaacagacagtgaagggaaagtttcatcttataccccagatgatttacttcctaggttggaattgtatgggcagaacgaaatttatgaaatgacccgcgatattcatagtcgtaatcgtttggttgagagattcttggaaggagatcatagcaagtacgatgtgataatcgataaggtcttgtcacgcttggaagagagtagcattactatcctaaatgctcttgagcaaaaggcagagatagaacttgaagtagcacgattgccgaaactattggagcaggcagagcaatttaaacagcttggcttggatgaaaaactcaaaattgttcctttactggaaaaagagaagcagcttagcttacgtcatcaggaagaattatctagggtgaaggatgttcttcagaaactaaaagacagcctgcctgacctcgcttatcttgacgatggcgtgataaatgtcatgcctcaccactctctttttctccagcaacgtgatgtactccaacgagcacaggagcaattgtcaacactagttcaacatattgatgagacccttcagcggtcatttgcggaacttgctcctttacaacttgagttatcagatctaatcggtgcagaagaagctcagcttgaaaaagcctttaaagatattccagccagccagggaaaaagtgggcgacagattggcgcagagtatcaaatattgttacgtcaaattgcttctattcgccctaaagcaacggagctggagaactggcaaaagcaacttgatgagctgtaccagcagcgtaaaagacaccttctggaccttattcaggctcgttctcaacgttctgctgcattggcaaaatccgtcaagcgcttaaatagaagactggatgaaaaagtgcgactcaatttgcagccagaaggtaaccgtcaacccctgttgcattttctggagcaatgtaatctggaaggggtaggctcacgacgcctcgcttgggtattggagcatgatttttcaccggaaaatctggttgagagtatccgccttggtgaacaagcattacataatgccgggtggggaattacaccaacagtcatccaggcattattgcggttgagcgaaaagcagcttctagaactggaagcattatcattaccggatacgatgcaaattgagctgaatgtcatgcatgacggtggtggcgtattctggcgccctatcgatgagctatcgactgggcagcagtgtactgctgtactgcatttattgttgttagataataaggacccactgatcctcgatcaacctgaggataaccttgataatgcatttattgcagagcgtatagtgacggaactgcgtagggcgaagctgtcccggcagtttttatttgccacacataacgctaacataccagttttcggtgatgctgaatggattggtgtgttgagtgtggaagaggggaaagggcgtatccttcctgaacagcaaggggcgattgatctacctgaaatccagtgtctggcggcgaatatcctcgaaggtggtcaaagtgcctttaatcagcgccgggaaaaatatggattcaaataa

SEQ ID NO: 32017 - DNA, 225 bp, Escherichia coli
atgaaaatgaaagaatattatgaagagatttctctattaaaatttaaagaattagaagatgaacatgattatatggtagccataggtgatttcctaacagagttatcaaacatagccgatcattgtgaaaggaataagtcacaaattaacaaagagcagaacaagcaatacaaaccctcttatcaacaggccacatctcaatcattaaatacctcaggctgctaa

SEQ ID NO: 32018 - DNA, 660 bp, Escherichia coli
atggaattattcgaaaattatttgtcagcgttacctaaaaaaaagcgattgagtaaagtcaagttgactatcctaaagagattatgggtttcagatgattttgattttcctaaaccttgggtcccatcgacagaattactggaattgacagggcaaaagtacttcgatagacgaacaagagagttgcgtgatgaactaggctgtgatctcgaaagctcgtacattccggaattctcgggacatgcttggcggctgaaatcaagcatgattgccccgccaatggaaagggaatacctgacagaatcacaacgatccagtttattttctaactgcagcaatacatgtgcaacatgtggtaaaactgttgccgctggggtcagggggctacaagcggatcacaaaatacctttgtcacgtggtggtggaaatgagttaaccaattggcaagctctttgccacaattgcaacgtaggtaagagaagagcatgtgagggatgtactgaagattgttacacatgctcatgggcatttcctgaaaaatttgggataacaacaatgctccatctgccagaagctagtttaagaagagcccaacaactagctgatgcaaagggtttttctttagacgaaatcgttgactacgcaatacgcaagctttga

SEQ ID NO: 32019 - DNA, 1071 bp, Escherichia coli
atgttacaatacacatctgtagagatttgtgcaggggcaggaggtcaagctctagggttacataacgctggcttcactcaccgcgcgctcgtcgagattgatcctgctgcctgcgaaactcttcgcctcaacaatgagctccattctttaggttggggaaatatcatagagggttgcgttaagcattttgctgaacatactgcatataatttttctgatattgacttggtcgcagggggagtgccctgcccgccattctcaaaagcagggaaacaactaggcaaagatgatgaacgtgatttgtttccaacagcgctcaaaattgtgaacatcattaagccaaaagcagtaatgattgaaaatgtttcaggtttattagacccaaagtttaaacaataccgacaagaactagatcatgctttctctgcaatgggttataaaaccttttggaaacttcataacgcttctgattacggagttcctcagcttcgtccccgagttcttttagttgcattgcgtggtaagtattccgctcattttcattggccgagtgaaacgttgataccaccgactgtgggtgatgctctctttgacttaatgtcacagggtggctgggaaggagccgaggcatggagaaaggccgctaacaatatagcccctacacttgttggcggttcccataagcatggaggtccagaccttggaccgacgagagccaaaaaagcgtggcaagcgcttggagtcaacgggcattccatagctgatagtagccctgaaaaggggtttactgggtatattggaagagacggaaatattcgagcaggtcttgaaaatatgcctcgtttgacggtgagaatggctgcacgaatccaaggtttcccggactggtgggaattctctgggaaaaaaacagctgcttatcgtcaagtaggtaacgcttttcctcctcctgttgccgaagcaacaggaaggcaaattcgtaaagcactcgaagcggttgatctaatgaaaaaaaaacagttggcgtcaccactggaatcgaatgatgttcaaagcttgcgtattgcgtag

SEQ ID NO: 32020 - DNA, 246 bp, Escherichia coli
atgacagcagctaaagagcagattgaatatgagctaaatgaattcttcgcgtccgcccttggtgatgtgtttaaaagttgccgactggctgaaagcgtatcggattaccagatctctactgttagttttccaacggaaaaaaacgcctggctggagctaggtgaattacccgtgattatcgagttgtctaacggacgttgctttgagattagtgcgtctgaatggttgcaaatcacaccgctttaa

SEQ ID NO: 32021 - DNA, 879 bp, Escherichia coli
atgacagctcgctacatcgcaattgactggggatcgaccaatctgcgcgcctggctttatcagggcgaccactgcctggagagcaggcaatcagaagcaggcgtcacgcgcctgaacgaaaaatctccggctgcggtgttagcagaagtgacggccgactggcgtgaagaaaatacgccagtggtgatggcaggaatggtcggcagcaatgtcggctggaaagttgcgccgtatttatctgttcctgtccgtttttcgtctattggcgaacaattaacgtcggttggcgacaatatctggattattcccggattatgcgtttctcatgacgataaccacaatgtgatgcgcggcgaagaaacacaattgatcggcgcgcgtgctctggctccttcctctctttatgttatgcccggaacccattgcaaatgggtgcaggccgatagccagcaaatcaacgattttcgcaccgtaatgaccggtgaattacatcatttactgttaaatcactcattgattggcgcaggtttgccgccgcaggaaaactctgccgatgccttcgcggctggccttgagcgtggccttaatgcgcccgccatattgccgcagctttttgaagttcgcgcctcgcatgtgctgggaacgcttccccgcgaacaggtcagcgaatttctctctggtttgttgattggcgcagaggttgccagtatgcgcgactatgtgacccatcaacacgccatcacccttgtcgccggaacatcgctgaccgcgcgctaccagcaagcctttcaggcgatgggttgcgacgtggcggtggtggcgggcgacaaggcatttcaggctggtataaggagcatcgctcatgcagtggcaaactaa

SEQ ID NO: 32022 - DNA, 390 bp, Escherichia coli
atgaagctgattctgccttttccacccagcgtgaacacctactggcgacaccccaacaaaggggcatttgctggtaagagcctgataagcgcggcggggcgaaaattccagagtgcggcgtgcacagcaatagttgagcagttacgtcgtctgccgaaaccaacgtcggcacctgcttcagtggagatcgtgttgtttcctccggataaccggatccgcgatctggacaactataacaaggcgctgtttgacgccctgacccacgcgggtgtgtgggaagacgacagtcaggtgaaaagaatgctggtggagtggggaccggttatcccggaagggaaggtcgagatcactatcagtaagtacgagaaaacggcgggtgcagccgcctga

SEQ ID NO: 32023 - DNA, 327 bp, Escherichia coli
atgacgacgttaactcaatgccagcagcaggtgctggatatgctgatttcttaccagaaagaacgtggcttcccgccaaccaatcaggaggtggctaccatgctgggataccgttcagtgaatgcagcggtggagcatcttcgcgcactggagaaaaaaggcgtcatcacgataaagcgtggcgtggcccggggcatcacgcttcataccgcggtgaaggacgctgacagcgaggtggccgggattatccgcgcactgcttgctggtgaggaaaacgccaggctgcgtgcagcccactggttacatgagagggggctgaaagtatga

SEQ ID NO: 32024 - DNA, 1038 bp, Escherichia coli
atgttttggaaaataatcaatagaatggatgcctccaagatttttattaatgatgaacataatgggtggtatgttcatggaattcctggtgtaggtgatgttaacaaaagcattgattttttattcaatattttaaatatgcttaaagcagaagaggtaatattgataggcccctcaatgggggggtatggtgccatgttatatggtgctattcttaaaatgaagatgccatggatacaatttcgatgcctttcttttggtggtgagtttcatctgtatataaaggaagcaagaagtggcaagctatctaaaaaaccacgtaatccatattatgctgatataagatgtttagtatcctcatctgaattggatatagttcaggtttatggtgacgatgatatcaatgatatttatcaagcccatcttgttcatggaattaaaaatattgatctaatttctgtaagaaattccccgcatgcggtttcgacgtatttaggaaagaaaattgatttaacaaaagcaattaaaaattatgaatcctatggaaagtttgaggttgaatctgcatctaatgtcagtcaatttaaagagcatgacgctctattatattttggtcatttaatgatgcttgataataatgctaaagaggcaattaaaaaattagaaaaagcaataactatcataccagaccatgctctgacgcagcataaacttggacttgcattactcatgctgaaaaaagaaaaagaagcacttttacaccaagaattagctataaatctaaatcctgatctggctcatgcacattttcatattgccatgctatcagagatgaatggcgatattaaaaaggctgagtatcattacaaagagtgtattaggtctgatgaacgtcatattcgagcattgatttcattatcattgttatatgaaaaagtaaaggagtatgaactggctttggattgttcatataaggttttagcgtattctgaaggtaataaaatggccttggatatagtacgaagaattacaaagtaa

SEQ ID NO: 32025 - DNA, 729 bp, Escherichia coli
gtgcctgctccggagctggccgctggtattccaggcggtggcaagctcatatgcctccccgccgaagctgcgggccgtctcacggtgcagccggtcccgcgtgtactcgaccagtggcgtaccacccagcttcattcccgcaagataaccgctgccatacgtcagccactccaccggcggcagaccgtccggctcctgacgggtcgccagcccctgttcgctgtacgcgtgcttcgtctcatgctcccacagcatctcccccgtctccgggttctccaccgtctgccgttcgcccgtcaggcggcctttatcgtcgtggccgtagtggaccgccacacggtggccttcgctgatatggctgatttctgtcagccagccgtgctcatcatactgccactgctccgccgggtcgccgttcaccgtccggtgcgtgatgcggtccgacgcatcgtaatgccagagggtgataagcccctcatcttcactctgcgtgagttttccggtcaggtcatagtggtaacgttgcgtccgcccgtcaaagccgcgctgctccgtcagcctgtccaccgggtcataccggaacgtggactggctgccgttctcgttggtcagcacggtggtgcgaccggcggcgtcataccccatgctgcgcgtcagtccgccttccgtcacactcaccggacgcccgcgtttatcatattcgatggtgctgcgtttaccgtccggtga

SEQ ID NO: 32026 - DNA, 555 bp, Escherichia coli
atgacgaaaatagttttcaatttactatctttttcagaattaaaatattatggggttggagtatactttagagatttaattgcaaaaaatactaatgaaatattcgatgggattgattgcgaaataatagttgttcaccaggctaatatccctgttaaagaattgttcaattttccagaaaacaataatattacctataatcctgtaaaaggcattaatgggaaatttttgcgtgttatttacgaacagatatttatgccgattaaatttcgtaactataacataatttattccccaaataatattaatccgattcttttgggggctaaatgtaagtcaataattactattcatgacttgcttccatttagaaaggctaatagatttggtcttctacaaagattgtatctaaagtttttcacatatatgtgtgctcacaaatcggaaaaaatcgctacagtgtccaataattcaaaaaatgatattatcaatacccttaatgtcaagagcgataaggttattgtaacttacaatctgtctcttatacacatctga

SEQ ID NO: 32027 - DNA, 174 bp, Escherichia coli
atgcagctccgcctgccaggtatcgttgtccagctcttcgcccgtgtattcagcgccggtgagataaacggcaattgccggaaaatcttcctcatcaaaaacagcggggcgaccatcaaaaagcgtcgccccggtgtcatgcttctccagtgcatccagtacggctgcacgtag

SEQ ID NO: 32028 - DNA, 435 bp, Escherichia coli
atgaaaactgaactgaccctgaatgtattacagaccatgagcgcacaggaatatgaagatatccgggctgccggaagtgatgaacgtcgtgaactcacacatgccgtgatgcgggagctggatgcgccggataactggacgatgaacggcgagtatggcagcgagttcggcggctttttccccgtccaggtccgtttcacgcctgcccacgaacgttttcacctggcgttatgttcaccgggcgatgtctctcaggtctgggtgctggttctggtgaatgccggtggtgagccgtttgcggtggttcaggtacagcggcggtttgcaccggaagccgtcagccattcactggcactggcggcgtcactggacgcgcaggggtacagcgtcagtgacatcatccatatcctgatgacggaaggaggtcaggcatga

SEQ ID NO: 32029 - DNA, 222 bp, Escherichia coli
atgctcactccttccagaatgttctatacggcgactatttctgttggtgaattgggtgtgttgttttctctgtcggtgtatgtggtttcgttagttttgcggtggttcttctatgggggtgttctcgtcgttttggtgattgttcttctccgtgtatggagtaatggcaggtgggcgattgctttcgttattgtgtttgagttgtttgtctggagtgtgtga

SEQ ID NO: 32030 - DNA, 525 bp, Escherichia coli
atgagaacattggacatcacctacggcataccggctgaagtatggccgcgagactacgaacatgctgaacgtaccttgctcttctggcggaaagctaaatttcctgtcagagtcacacttgaagatggtcaggtgttttgcatgtatgtgcagggaacaatgtcttcccgcaacaagctagatttatgtccagcaccgcttgataatgacaatcgtataagactcccacttgagcgcattagtacaattgaatcaggtgtcattgatggcattgcttacgatttcaaagggagactaacaatacatcctgactatgtagataaccagccatcacgtcgtgacttttttaagatatgtcgtcaggcttaccaaaacggcaaatctataagggtctacatggcagacggtcgcgaaattgagggaacgtcagatggtgttgacgcctgtctagtcacacttaagttggaggacggtagaaaaatacttattttcttcgattgggttgaacgaatccttccgttctaa

SEQ ID NO: 32031 - DNA, 489 bp, Escherichia coli
atgagtatttctataaacaaaataattaactctttacgacataaaatatcacatggaaaagatgttctttttaaagacaaatattatctattcaacttagagccgtacaaatgtacaaaattttatatcactcgcaaccgtaaatattcagtttcaatcacaaaagacatgaagaaaatctcttcagaagagtacttcatatcacatatttatatctacccatttaaattagaaccattaaatataattcttccaacaataaaaggggttgaacttgaaggttatactttaagctctaactttaatgatatgggtgtacaaaaaccagggacaaggtcatactacgcctacaaagtaaaatgcaataactacaacgcacttaacatgctaatcagcaaacttgaaacggagatagtcgaaggaaatctaaatgacgatcatgaaaaattagaacaaatagaaagacttagaaagtgtgatgttaaataa

SEQ ID NO: 32032 - DNA, 921 bp, Escherichia coli
atgccattactgcgtgaagaagctgaaaagctatccaataatgaacttgaacagggtgtgatcgaaactatcatcgatcgcgatgacctgtttgcgattctgccttttatgaagattaactcgaaggcatatctttataatcgcgaagcaacgcttagtgaagcgacctttattgatgtaaacgatactattgcggaaggcgcagcaacattcagcgaacatgttgcaaaactgcgtattctggctggtgacgttgacgttgataaattcttggcaacaactatgtccgatactaacaatcagttggctgttcaggttcgccagaaagtgaaaggtctggctcgtgcattccgtcgaaatctgatcttgggtaattctgaaactaataccaaagcgtttgatggtattccgcgtctgatgcacaaagatcagaagatcgacattgctggtgcatctatgactttctctatgttcgacgagctggtcgatgcggtgaaagatttgggcgctgactgcatcatgatgcgttcagagcacctgcgtgcttaccgtgcgctgctgcgtacagtaaacgtaggcccgtctgaaatcatgatggagaacttcggtcgtcctatgctgtgccataatggtattccatttattgttaacgacttcattcctaaaaatggggttaaagttactgaaggttcagagcagaaaacggaaggccaggaaggtactgctaacatttattgtctgcatttgtcagaagaaaatggtcttaccggtctgtatggcggtgacaatgctggtatcgttgtggagaacattggcacggtacagaataaagatgcagtacgtactcgtgtgaaatggtactgctctctggcgaataagcacgataaggctatcgctgcactgaacaatgtaaaaatttaa

SEQ ID NO: 32033 - DNA, 435 bp, Escherichia coli
atgaaaccagcaaaaattcgtttattggaaccgcaattttctgattattcgggaatgttgtgtggagttaagtttgagaatggggtatccgtttccgagttaccttttatcgaccagcagaggatttgtgcatcaatgcgcgcatcaactgttgagggtaaaaacgtttctccatctgctgcatatggcgaacgtaatgatctgaacgtagatcagattgttgagccatcagcacctgacattgttccaatgaagcgcggaacggcagatgaaccagctaaaccaattcaaactttcacacgggaagaactggagtcaattgctgatagtgagggtattgccggtttacgttcaattgggaataagattggtgttaaggcgaaaggaattgtcgaaatgattgacggcatcctgaaagcacaaggcggtgagtaa

SEQ ID NO: 32034 - DNA, 738 bp, Escherichia coli
atgtctaatacccatgtaaaaaacatcaagcttggtgcctgcaaggtatcatttggtggtgtggatctgggttacaccaaaggtggtgttcaggttgaagtagccactgaaacgcttaaagttacagtcgatcaacaaggtcagactgtaatctctgaattggttcaggggcgtaacattaccattaccgcacctctggccgagtctgtgctcaaaaacatggtcgatcttatgcctggttctactttgagcgaagatgacaactccgtcaccatcacatctgcacagggcgtaaatctgatcaacgtggcgaaggaactcgtcctgacaccgcaggacaccaccgactatgtgttgacgctcccgaaagcggcaaccgctggcaacttcactatgtcctaccagtctgatgatgtacgtgtgttctctgttcagttcaacgcgtaccctgatgatgagggggttcttggcaaaatgagtggcccaaaaccggtgaaaaacgtgacgattacacctgaatctccgagtgtaaaggtcggggcgacagttcaactgactgctaatttcaccccagatgatgtagttgataaaacaggcgtatggtcatctgataataaaaaagccactgttgatcagactggtcttgtgcgtggtgtggaacaaggttctgcaaacatatcattcaccagcaatagcggtagcaagaaagtaaccaaattagtgacggttaatcaataa

SEQ ID NO: 32035 - DNA, 4707 bp, Escherichia coli
atggaacagttcaagaagaaaaagttacctctattaattgcaggttctggtggcaaaaaaagtagcaaaagctctagtcgcacaccagttgaagcagacgataccgtaaattctcgtgctatggcctctattctcgatcttcttggagaaggcgtaattggcggcttggtaaatggcgcaagatctatttttgtcgacgatttgcccatagtaaatgaagacggctcttcaaactttagcggaatttcatgggattttcgagacggctcgcaagaccagacaccaatgtctggctttgatttcgtcgaaacacctaaatcgatcaatatccaactaaagaaatcgcattatgtgacggtttcaatagataacgatgaggccgatcgtgttcgagtcatcatgaagttcccttctctgcgaagaatagaccaaaaaacgggtgatacaaacggcactaccgttgagtataagttccagatctcaaatggagattcaacatttgtagatgtggtcgcagaaggtgaaaaaaacgttggtattaagttaacagcgaagaaaaccggtgcttattatcgtagttatgagctgaagttacccaagccaggtcgggcatacagtgttcgagtagttcgtattactgatgataacagcggtcagtatctttataacgatacatgggtggactcaatcggtgagatcgttgatacaccgatgaactacccaaactctgtgttggtgggactgaaggttaattctgagcagtttggcggctctatgccttctcgttcctatctggtgcggggattaaaaattcgcgtaccatcaaactacaacgaggctagtaacacttatgatggcgtatgggatggctcttttaagctgttgtcatcttcaaaccctgcgtggattctcttcgacttgcttaccaattctcgatatgggcttggtcagtatgtgtcggaatctatgattgatctcggccaactgtaccagatcggtcgatattgtgacgaagaggttgatgatggctttggtggtaaagagaaacgctttgcaatcaatacgcagatcaccagtagacaggatgcataccgactaattcaggatattgccggtgcattccgcggcatggtgttttgggctggtggcatggttaacatcatgcaggatagcccatcagatccagtaatgatgtttaccaactcgaacgtcaaagatggattgtttacctataaaggttctgcgcgtaaagatcgcccatccgttgcgctcgtgacctacaacaacaaggaggacggttataagcaaaacattgagtacgttgaagatcaggacgcaatgcgccgttatggtgagcgtaaaacagaagtcgtagcatttggatgtacaagtcgaggccaagctcaccgagttggtttgtggcttttgtataccgccagaatggagtcggatgtaattacatttactgccggtttagacgcctcatttctgatgcccggtgaaaccgttctgattcagaacaaatatcgtgcaggtaaacgtaactccggtcgaattgtggagtttaccaaaaacagcatcactctcgatgcgcctgtgtcgttagctaaaagcggcagctttattcggatattgaatcaggaaggcaaaatcgttgaacgcgatgttcttgaaactggcgaaaacataacaaaggttacgttttcaaaagctctgtcgtcagcggaaacgcctgttttgaacggtgtatggacaatcacagaaccagatctcgaacctatgcgcgttcgcatcgttaacatcgctcagggggaaacgtcgggtagctttgacatcaccgctgttgagaacaatccgtctaaatatgaggcaatcgacaatggtgcaacgcttatcccgcagaatacgacggtattggacccgacttactccaagccatctaatttgcaaatcactgaagggacttatctctcaagccctggcaacctgtcagtaaaactgactgcaacatgggaagggaaatctccagagtattggatcagttggcgacgttctgatgaaaacaatgtatcgaactggcaatcggcacgtgtaaccgaagagcaatacgaaatcgttaatgtcgcggagaatggacgctacgacttccaactgtatgcggtttcattcaacggtaaaaaaacagagattatcagtaccgtttatcaggtgctgggcacaatgacaccgccggatgcaccaacgtcattaacggcagttggggactatcgtaatgtgatactgaattgggtcaatccagattcggtagaccttgatcacattaatgtttacgcatcccagaccaacaatctggatacggcgaaactgatcgcagagtctgcaagcaccacctttacacatgctggtcttggggatagtgaaacttggtattactgggttagatcagcaaataagcgtggcatgttgagtcgcccaaactcaaatcttggtacagaggccacaacgcgagatgttctttcatttttagccaataaaattacctcgtcagaacttggccaggctttaaatgaggaaattgacagtaaggcttctcaacaagctgttgatgaaatcaataatcatatcgatcagagtgtcgaatctctggaaggtgaaatttccgcattaaataaggagctaacgagtagtatcgatgagttcaaaacatcgtttactgaacgcagcgagacactggagaatgcgcaaagcgagcttagaacggaagtttctagcactcgggaaaaagtagatgatgcattacgacaagttgaaaattcaaatgcagcacttattgaactacgtaatacagtatcaaaacaaggtgattctgttgctggtgtcgtagaagcagcaaatgcggcacttgaaaatgcatcatctttaattgccgaagagcgtaaagttcgtgcacaagcagatctagcgaatgctaaaaagatagaaacgatgagatcatcggttgatgaaagtgttgcggctgtagaagaaatgcggagaacggttgctgaggtaggaagagtaagttcagaaatcacaactaatcttgaagccatttctaagacaaatatcgatcttgcgttgcggcaggacgaagatcagcacaggcagctggtaaataacgcgaaaattgccacgactcaaaagattcttgtcgatgatgtgtcagcaatggcgtctaaggttgaagagatacgagccgagattggtgacaacattcgagcatctattctcgaagaagcgacagccagaactgatggtgataatgcgttagccaatcgtgtgacacaattacagagtaaatttgaaggtgatatcagtgccgcaataaggaccgaacaatctgcaagagcatcggccaatgagactctttcaaagcagatcacacaactggagtctaaagtaaatactgatatttcaaccgctattagagaagagcaacaaacaagagcaacgcaagatgaagcattatcaaggcaaataactcaacttcaaacaaaagttaataacgatatatctgctgctattaaaagtgagcaacaagcgcgagttagcggcgattcagcgttatccacacaaattaatcaattgcaggcaaaagtagatgatgacatatcagctgctattaatgaggaaagagaagccagagcatcaggcgatagtgcactatcaagagaagttagtagtttaaaaacaaaaacaggtaaagacattgcagcggcggtagcagttgaaaccaaagcaagaactgacgctaacgatgcattatccagacaaatttcttctcttactacgagggctaataatcttcagtcctcgatagagcgagaatcgacatctcgtacaagtcaggattctgccattgcaaaagacttggcaagttttaaaacaaaaactgctaaggatataagtgcagctgttgcggttgaaactcaagcaagagctgccgctgataccgcattgacgtcgcagattaactcactaaagacacaaacaggtaaagatataaaggctgctgtagcagaagagacgaaagccagaactgatgctgatgcagcgctttcgacaagggtaactaatctccagtcgcaaacaacaaattatatcaatgcagcgattacgtcagagtcaaaggccagaacaagtgcagacaacgctctaggaaaacgaattgatacactgaaagcgtctgtagatggaaatgttgccgttattcagcagcaggcttctgctatagctgacgctaatagaaaagtatcaacctcgtacacattgaagatggaaacttcaacgagtggtgggcagaagtatgtagcgggcattgcgctgggtattgatacaacggggctttctcagtttttggtgcgggcagatcgatttggtttggtcaacaatgttaatgggaagatcacaacgccatttgttatcgaaaacagcgttgcgtatatgaacggtgcttatatcaaagatggcactatcacaaacgcaaaggtaggtgacttacaatcaacaaacttcgtaagaggacgagccggatggagatttggcaaaaacggaacgcttgagattaacggtaacagtggaggaaatgggagattagttatcaatgggcagagaatcgacgtttacgacgacaataatgtactcagggtaagaattggtcgactttga

SEQ ID NO: 32036 - DNA, 3372 bp, Escherichia coli
atgtggtacagggaaggtactatcacatttacacaaggcagcaatactctggttggtgctgggacagcatggaacgttacggccaatggtgtgttgcctggcatgattgtcgtcgcacctgataataaattgtatgaaattaaaagcgtaacaaatgacacaaccttaacgttggttgaaaactatactggtgaaacgcaaagtgatataccatgtaggatcatcactacctacgaaggagatttgacacagtttagtgcgagatttacggctcttttatcacgaatgtctggtgatgcaaaaacagttcgaaattggttaactgccgtagatgaagttactcttgagcgagaagatggcactaatgttaatgtaaaacctctttctaagattatcgcggagcataataagcacgtagaatggtatgaaaataatactaacgcaattaattccgcaggagataaagcaaaacaggctgcggccagtgcgtcggctgcggcgaagagtgcgaatctagcaagcagtaaggctactcaggcatctaatagtgcgttggatgctacagcgtctaaaaatgcagcaaataaaagtgcatcaagtgctaaagcatcagaaacaagtgctttagaggcgaagaacgcagctgcaatttctgcatcaacagcttccactaaggcaacagaagccacaagttcggctaatgctgcgttggtctctaaagaggctgcaaaattatctgaaatgaatgctgcttctggtgctggcagtgcatcaacttctgcaaatcaggctagagagtcggcaaggtctgcgaagacatccgctaatcaggcttcaacttatgcgtctgctgctagagcttcgaaggatgaagctagccgaaagtctgctgaagcctcaactagtgctagtaacgcatcatcgaaatcagctgaatctgcggctaaagcagaagaagcaaagcaaagccaaacatcagcacttgcatcggcagagcgtgcagagatagctgctactagagcagaaagagctttgtcagcgatatcattacatgatgccagtttgactatgaagggtattgtcaaattaagcagtgagacgagcagttcgtcagaagaatttgcagcaacaccaaaagcagtaaaggctgcgtttgatcttgctaaatcaaaatatactgcaaatgacgcgacaacttcacaaaaagggctggttcaattaagtagcgatacaaataacgcctctgaatcattggccgcaacaacaaaagcggttaaaagtgtaaaggatcttgctgatagaaaagcagcaatcaacagcccagcatttactggcacaccaacggcaccaacggcgactcaaggcactaataatacgcaaattgccacaactgcttatgtaagagaagcgatctcaggtcttgtaggatcatcacctgaagcgcttgatactcttaatgagttggcaagggctttgggtgatgatcccgattttgccacaacaatgacgaacaagttggccacaaaacaacctcttgatgctacgctgactgcactggctggactaacaacagccgctaataaacttccttattttacagggaatgatacagctggattagcaacaataacttctgttggtcgagatattctttctaaagcaagtgtacaggcgattattcagtatcttggattgaaggaaaatggaacaagtggcgataaaatacctttattgagtacagccaatacatggagtgcaaagcaaacatttagtaatggtcttgcaggctcacttaacggaaattccgatactgcaacaaaattaaaagcagcacgaaaaattggcggagtaccgtttgatggttcatcagatataaatctaccaggtgtaaactcaacaggaactcagagtactagtggaaacgctgcctctgccactaagttagcaacacctcgttcaattggtggaatgttatttgacggcactgcaaatattgacttaccaggcgttaacaaggttggaaatcagagtacaacaggtaatgcagggagcgcaacgagactgcaaacggcaagaacaataggtggggtatcgtttaatggcactgcaaatattgacttacctggtgtcaataaagctggaaatcagaacacgtcaggtaatgctgcaacggcgacaaaacttgcaacggcacgaaaaataaatggggtcagttttgatggctcaaagaatataagcatcacgccaaaacaactaggtgcagcaaaatatgttgctaatcttgctacggggaatactcaagagtggacaactgcacaatttgtcgcatggttaaattcacaaggggcatttgatgcaactcagtggagcacacgttgtagctggtcttatggtagtaactgttatataggaaatgcatcaacgggatgtggagttatacctcttgctggttctgttattgaggtgttttcaaccggtacaagtaattacactatacgcattacaacaccttcaacatctggaggtgcatctggtgctgttcttaatagtgagtttatttatacatacaacggcgataactatagcccaacatggcgtcgtaattacagttctcaaaataaaccaacggcttcagagataggcgcccttgcctcaaatggaaatgcagtttcggctacgaaactgaaaacagcgagaaatatagggggggtatcgtttgatggtacagcgaatatagatttaccaggcgttaacaaagctggaaatcagaacacatcaggtaatgctgcaacagctactaaattaaaaacatcaagaacaataggtggagtatcatttgatggtagcgcaaacattaatcttccaggtgtgaatacgtcaggaaatcagaatacatctggtaacgcagcatcagcaactaagctacaaacagcacgtactataaatggagtaagtttcgacggaacaaaaaatattagtataagtgccgctcaaattggtgctttgcctatcggtgggggtacgataacaggtaatttgactgtaaatggaaatggctcatttaatgatgttcagatccgctcagataagcgtaacaagcgtaatctggtaaagctagataatgcgttagatcgtttggaggcacttactggttatctttatgaaatccaactctctgatgatagttggaaaacgtcagttggtttaattgctcaggatgcacaaaaagcattgtctgaactggtaactgaagacacagacgttatatctggtgaaaaacgtctgtgtcttaactacaacggcataattgcattgttagtcgagggctttaaaacacttcgtcatgagattaaagaacttcgggagaagtaa

SEQ ID NO: 32037 - DNA, 513 bp, Escherichia coli
atgggggtaacatcgggatgggtcggttcttcggccaagaacgaaacgggcgaacaatggatgagcgccgcaggtagtaaattaggactgggtaaaccttttatgatgagtcaaatggtgggaagatctatgggctgtaaaattgcaaccgcttactataaagggaatcctcctgataaagtcgaaaactggggggctgtaggttcagattggccattggctgaaaagaaccaaggtacaattgctggtgcttcgagctgtggtttaggtcgtttagtggggatcgtgcttacgcaagctcactacgttcctggtttaccgcccactgggggtttatacatcgcagggggaagggcaagcaatattacagtaacagttggtggagtctcacaagtttttacttacaatagtgttattaacggttttcactattactggcaaggaacacctagttcggcctttataacggcaatgaaaaggacgggggttacacaagatttgaaaattagttaa

SEQ ID NO: 32038 - DNA, 324 bp, Escherichia coli
atggctaatgacgtaggaggcgtcactcatgatcaggttgagagaatagctaaaattgtcgccagagaagttgttggtaaattaggaaaagaaatcagagaggagatagttcatgaggttcatgagcagttgaaaaactattttggtgacatgactccggctcaacacagtattcaacattccaatctggataaactacttaataggttagattcgatctcaagcggcttctttggaggcattatttctaaagtgacgtcgtttattataaccgcactaattttaggattagccgcatatggcgtaaaaaatggactgcaataa

SEQ ID NO: 32039 - DNA, 1914 bp, Escherichia coli
atgtcattcattgactatgatattttgtcagcatcatcaagcaaagagcttagagaaaaacttgcggagaaaatcgcagagggttggcaacctttcgagtcaccaaacattgttgaaccaagtaagggcggaccaaatgcgtacaatcaagcaattgtgcgatctggtgatttatcacaattgcccacaccggtatcaaatgaagatgaagagcctgactattattatgtagttactatcgcaggtcaatccaactcaatgtcatacggcgaaggactgcctatgccaaaaacttttgatcggccacatcctcgcgtaaaacagttagctcgacgcagcaatattaaaccaggtggttttgcctgtaagtacaatgaaataattcccgctgatcactgtcttcatgatgtacaagacatgactaaattcaagcatccaaaagcaaacgactctgaatatggatgtgttggtcagggactacacattggcaaaaaactattaccattcattccagcaaacgcaggtattttgctcgttccttgcggaagaggtggttctggtttcactgttacaggctctgaaggccaatattatgaagagtcaggtgcaatcgaatcatctttaaaatggggattaaatactcctttgtataaggatattgtagccagaacaaaagcggccttaagtaaaaacaaaaagaatgtatttcttggtgttgtctggatgcaaggcgaagctgatttggcaactggcaagtactcgcagcataacgaactgttcctcaagatggtcgaaggtttcagaaaagagctatctcaatacgacgcacaatgtgttttcggaagtgctgcaaatgtaccctggatttgtggcgatacgacccactggtggaaaaacaaatatccaaaacagtacgaaattgtttatggtggttataagggaaaaacctcacaagcaatttatttcgttccattcatgaaagatgagaatgataataacgtattaaccaatagccctacagatgatccagacatcacatctattggctattatggttccggtcatcgcaaggataataaaacatggacttccgagagtagagagagtcattttggttcatggcagcgacgcggaataatatctgatcgtctcgcaactgcgctgcttgcacattcagcgaaatcatctgcttttgtgaatggcgttacaggtgagattattaaacaagaacaacctactcaacctaaaaatgacaacattgtcacaactccaaccccgcgaacggttatttccttaactggagctggtggtgatgtcgctactgaacaaggatggactgtaactggtgcaaatattcagtcagttgaaaacggaaaagcaattgctttaactaaagcggtttccaacgaaacttggacgatcagtaaagctactgacatagcacagactcttcttgagaatggaggtaaattactttgtaagtttaaattatctggaaaccctgatccaaaaaaagctaagtttggctttggtatatattacaaaaccagtaaacctgttgctgacgatatatcattcgacggtactgggagcctgtttctggctaacttcttccttcaaacaattggaggcaagttgaacattatgatgcacaggacaggcaataatcgaaatgttcagatagactcatatggtgactacgacaacaattggcacactcttgagttgcaatatgagaaaggcacaggaactgtaattcccgttctcgatggcaaggcggggagtaaattcaagctggttaaagacaatattgctcttggtgatgaggcttttgttttaacagatataacaaacaaccaaactcatgatcttgctatcgaaacacttaccattagcatcaacaacccaacctaa

SEQ ID NO: 32040 - DNA, 213 bp, Escherichia coli
atgaaaacaactatttccagcctaatcactcttgagatcggacacgttgaaaaattagctgatgaatgtgtagctgacattctcaccgaattaccaaatgagcagattcaggttggtatgcatgacgcaacagcctttatattcctacttaataacaaacgcttcacgcttatcaataccggctctggctctttagccgtcagaacctgttaa

SEQ ID NO: 32041 - DNA, 282 bp, Escherichia coli
atggcatacggtacagggatctacaataataagggagttaacgttaccggcttccttactcctattttttttcttgatcgatttacaaccacgtcaggctctaagacttacccaaatccaccacctggcaaatcattacatgctgtgtgctcattgatgcctttaaataacgataaccatgtaaatatacctacaccaactatcactattaacggcaatacagtaagttggtcaaatttatacaagggacttggatcttatatatatacatattggggataa

SEQ ID NO: 32042 - DNA, 615 bp, Escherichia coli
atgttcgggatgtcaattactcagtcaaatggtaatgtgtggatgagtccagaatttacaccgcaaaatttgattaatagggggacaatgtccacgtctaaaggttctgtttttaagacttcaataccgtcgaacaaatcatgttttttctttataaaaagcagtaataaggcgaatatgatgttcgttcatgaatttagagatgggtataatgttctcagactgaatcaggttggaggaaaccccggaacgataacagtttatgctttttctgatatggtgttaccacattcaggatatggtattgccatgtataatagcgcaggtaaaatggtatatcacggtgagatgatgccccttgatgcagagattatcactattacaaatcctcaatttaccataaatatgggatacccgtgtgcgataatgcctgcaatggttggagtatataactatagacgaacaccttacgacagacctgtatacgtaacaatgacaggcgcaacgggaaaccaaatatataatggtgaatggtattcaagtaatgttacatggaatgtaaaaaaactatatacaaataaagtcctggttataaatacatccaagtatgattag

SEQ ID NO: 32043 - DNA, 123 bp, Escherichia coli
atgataatgaccgacgccgtgatccgccgtgccaccggaatcagactaccagaaggtaaacagaaggccacgcagtcgggcagcgtcatcgtgttaatgcatggcggcgtattcagcttttaa

SEQ ID NO: 32044 - DNA, 237 bp, Escherichia coli
atgcacaataaaaccacaccggacgcagccgccgaagccatcaaaacgctgatgcacgcgctgattgatatttctgttatcgcagacaaggcgcataagcacgccaccagcgaaacagaatatgccggggctttcgttcctcactcactggctcttatgcaatttagtgctgatatggcgctgaatgaggcaggcaaaattcttaccgcagatattcagggggtgcaccatgcatga

SEQ ID NO: 32045 - DNA, 1455 bp, Escherichia coli
atgaataataagggctccggtctgaccccagctcaggcactggataaactcgacgcgctgtatgagcaatctgtagttgctttacgcaacgccattggcaaatatattacaagtggcgaattacctgatgaaaacgcccgcaaacaaggtctttttgtctatccatcactgaccgtaacctgggacggtagcacaaccaatccccccaaaacgcgcgcatttggtcgctttacccacgcaggcagctacaccaccacgattactcgccctactctctttcgttcgtatcttaatgaacaacttacgttgctgtatcaggattatggtgcgcatatctcagtgcaaccctcgcagcatgaaatcccttatccttatgtcatcgatggctctgaattgacacttgatcgctcaatgagcgctgggttaactcgctacttcccgacaacagaactggcgcaaattggcgatgaaactgcagacggcatttatcatccaactgaattctccccgctatcgcattttgatgcgcgccgcgtcgatttttccctcgcacggttgcgccattataccggtacgccagttgaacattttcagccgttcgtcttgtttaccaactacacacgttatgtggatgaattcgttcgttggggatgcagccagatcctcgatcctgatagtccctacattgccctttcttgtgctggcgggaactggatcaccgccgaaaccgaagcgccagaagaagccatttccgaccttgcatggaaaaaacatcagatgccagcatggcatttaattaccgccgatggtcagggtattactctggtgaatattggcgtgggaccgtcaaatgctaaaaccatctgcgatcatctggcagtgctacgcccggatgtctggttgatgattggtcactgtggcggattacgtgaaagtcaggccattggcgattatgtacttgcacacgcttatttacgcgatgaccacgttcttgatgcggttctgccgcccgatattcctattccgagcattgctgaagtgcaacgtgcgctttatgacgccaccaagctggtgagcggcaggcccggtgaggaagtcaaacagcggctacgtactggtactgtggtaaccacagatgacaggaactgggaattacgttactcagcttctgcacttcgttttaacttaagccgggccgtagcaattgatatggaaagtgcaaccattgccgcgcaaggatatcgtttccgcgtgccatacgggacactactgtgtgtttcagataaaccgttgcatggcgagattaaacttcccggccaggctaaccgtttttatgaaggcgctatttccgaacatctgcaaattggcattcgggcgatcgatttgctgcgcgcagaaggcgaccgactgcattcgcgtaaattacgaacctttaatgagccgccgttccgataa

SEQ ID NO: 32046 - DNA, 204 bp, Escherichia coli
gtggaaggtgtcgcaacgtcacaggccgacattatcgaccgttttaatgcgctggaaacccgccatcagcaggacagccagaaaatcactttactgaccacagagctgacagcactgaaggaaaaactgcgcacgcaggacggcgatccgcagaaccgcttcaccgcaacgggcgcagcctccgaccagctggctgacttctga

SEQ ID NO: 32047 - DNA, 1053 bp, Escherichia coli
atgaatctggtgatgtcagatattacccgcaacaagctgggttgctatatggcgcagcaggcgtcgcttaacaacatcccggtatctgcactggtatcgcgatttaccgtggaaccctcggtgcagcagcgttttgaaaacgcagtaaaggagagcactgaatttacaaaaaaaattaacgtgttcggtgtgaccgaccagaaaggcgaaaaaatcctcctggacaccaccgggccgattgcgcgcacgaataccagttatgacggcacaaaacgccgtaacccgaataacgtggttgatctgaaaaaccgcaaatatcagtgcgaacaggtgaactacgacacgtttatttcgtatccgcagcttgatgcctgggcggcacaccctgattttcagtcacgcgtcagcacacagattgcccggcaggtggcgcttgaccgcatcatgatcggtttcaacggcacgtctcacgcagatgagtccaacttcagcaccaacaagctgcttcaggacgttaacgtgggatggctggagcacatcagaaccgacgccagcgagcgcgttatgaatgatgtaacgctgacctcccgcaacatggacaacaccgtggcccacgcgggtaaatatgcgaacgctgatgcactggtacaggacgcgcgctcatccctgctggatgaatggcacaaggaagctgacgacctcgtggtgattatggggcgcaacctgtttaactcgctgcgtctgcccgtgctgaacagcatcagcggccagaatcccaatgcggaattacttgccggacagctcatcctgtcatcgcgcgccattggcggactggatgtattccttgcgccgttcttcccggattcaacgatgctgatcacctcgttcaacaacctgtcgatttactggcagaaaggaacaatgcgtcgcctgatgaaagacgagccggaatacaaccgcatcgccacctaccagtccatcaatgacgcttatgtcgttgaagactatggcaagtgcgcgatggtcactggcctgaagttcgccgacagctaa

SEQ ID NO: 32048 - DNA, 801 bp, Escherichia coli
atgattactcctgcacagcaacactggcagaacgtgatggcacagcgcgcaggccgggcgaatgaaggcgtggaccacgccgcgcgtaccgcgcatgaagaggtgctgtatcgtctgcgtctggcacaggcccggcttaagggcgtacaggccagaagcgcgaaagccgccatcaaaaaagagttattgccggacttttccggctggattgagggaacgctggaggctgacggcgggcagcaggatgaagtgattgccacgctgatggtgtgggcgattgactgcggcgatcttccgctggcgctgcgtattggtgcatatgtggtccgtcacaacctcatcatgccggataactttggccgtactgctgccacggtactgaccgaagaaatctgcaacccggtactgacgcaggccgggacggatgccgacgcggatttgtccgcctttatcgaaccactggacacactttgggaaattgtcgccaaccaggatatgccggacgaagtgcgagccaaattatgcaaggcgtgcgcctttgcccgccgtagcctgagcgatgcggacagcatggcctcatcactgaagctgctgcgcgaagcgatgcacctgaacccgaacgcaggtgtgaaacgcgagattgcaaccctttcccgcgctctgaaaaaagccgattccgcagccgcaccagaagatgccagcacaccgcaggcgcagaacgaaagcagcaaaagtaaaaagacaacgcggaagcctgcaacacgaaaaaccaccgcgacgcagaaggcgaagcgcggttaa

SEQ ID NO: 32049 - DNA, 495 bp, Escherichia coli
atgagtatggttgccagaaccaaccccggacccgcagaggacgacatcaccgataccgatgatggtgatacccgtatttcagcaggtgcattctggccggatattgtgctgcgtgagctgcgtctggcggtacgactgccggggcgcgtgaccacctcccgcctgctgcataccgccaccggggccgtggcacacgttacccgcgagctggaagcgtggcagcaggaacagcaggcggctggccatcagacgctggccgatgttccggcacccgtaattaacggagaaagcgtcaatctctggcactggcgcaatgccgtttataccgccacacgcgccctgattctggagcgttaccgcgatgcggacacaacggataagggcgaccgccgggcggacgcactggatatacagacatcggatttgtggcgcgatgtgagctgggccatctctgacattctgcgcagcccgcgaatttttgcggagctgtgctga

SEQ ID NO: 32050 - DNA, 201 bp, Escherichia coli
atgaaagtgaaggcactggaaggcgacaccgtggattcgctctgttttcggtactacggcacgacgcagggcgtcaccgaaaaggtgctggatgccaaccccggactctgtcagcaggtatttctggacgccgggcaggaagtggagatgccggagccggagaagaagaaacgagaaatgattcagttgtggggggagtag

SEQ ID NO: 32051 - DNA, 324 bp, Escherichia coli
gtgagcaccattcaaacagggatcacagagcaggttattgcgtggctctttgaccacctgccaacggtgtatgcagtaggcgcggcggtcagcatttccgcgctgatgagtctttatgacggacgaacactggttcagaccgtaacgggatcgctggcgtgcggcgttcttgccatggccgtggccgggtcgttgcgcttcttcgggtttcctgaagatgccgtgacgtttatcggcgcatcaatcggttttatgggcgcagagaaagcacgcgacaaggttattgcggcctttaatcgcagggggaaggagaaggacgaatga

SEQ ID NO: 32052 - DNA, 408 bp, Escherichia coli
atgaagctctggcccacgctgggtgtcgctttccttctgattgccgcatggggaacatccatgcgtctgtcatggtcgctgggccgggagaacgccagaaacgaagcgcaggccagcaccctgaaacgtaccgccgacaccctgaatatcatcagcgccggggtacaggatatgcagcaggtgctggcgcaactccgcgtggaaaatcagcaacgcaatcaggacggagaggtaagacgtgaacagctacgcaacgatattgcaaaagatgaatgcgcccacgctttgcctgacgctcgttttactgacaggctgcgcaggcacgcagaacgcgccactgccagcgccgtcagtccggcttataccgcagacgctgaccataccggtaacgcctccccccttccctga

SEQ ID NO: 32053 - DNA, 468 bp, Escherichia coli
atgctgaaaactgattccctgcgtgaagccatgacccgttcatgccgatggtgtcaggctaacccggaaaaattcaccattttcgtggagagcggcaacattgaaacgaccggagaaacgccctcgtttgtttaccgctatcagatggtgatgtttgtcatggattacgccggggagctggacgacctcacgctgccgctgctggcgtggttatccgaaaatcagccacagttgttgctcaaccctgagcgtaatcaggacatcaaattctccgccgttatcaatgacgatgacagcgccgatctcctgtttacactccccctgcgggaacgcgttcgcattacgcgcaacagtcagggcacaccgcaggcagaacacctgccggagccaaaaccccgtctgccctcttccgaaggcgactggtcgcatgtattccaggatgtgacgtggggtgaaagcgatggataa

SEQ ID NO: 32054 - DNA, 645 bp, Escherichia coli
gtgaaagcgatggataaggcattcactcgcgtggatgaaacctttgaggccatccgcgacagcctgaatcagcaggtcatcaataacatcgccagaaagctggcacaggatttacgccgcgcccagcaggcacgtatccggtcacagaaagcgccggacgggaccgcatggacaccacgcagacgccacgtaacccggatacaggagcgcattcgctttatctggaataacgaagcacgcacgctgaaaaactggcatcacgacacggggaaatacgggcgaaccattaccgggtgggatgaggataaaaacaatatccgcacgttttaccgggatgacatcgaccgttttctggaaatacgcacccggcgcatcaaccaggacagcacaaagcgcgtccccatgttcgtaaaactgcgcaccgcccgctacctgaaagcccgtgcagatgcttccggtgtgacggtgggttacagcggcgtggccgcacgtattgcacgcgttcatcagttcggtgagcgcgatcaggttgcgccgggcattttcaccgattacccggtacgtgagctgctgggtatcagccaggcagatgagcgcctgatttataacacggtgctgggccggattgcggaggctgtacggtga

SEQ ID NO: 32055 - DNA, 306 bp, Escherichia coli; identical to SEQ ID NO: 28810

SEQ ID NO: 32056 - DNA, 210 bp, Escherichia coli
atgcgcctcaacgtgtcgctgcatcgcagccaccgcatacctgagcattctgaacgccatatacgcgttttcggtactctggtgctccacaaggcagtagacataaccatcctcaccgctgacggtcttcatactgaacagtgcatcacacgcatactgcttcaggtcctggtccacaaacgtacagggctccagccgcagcgtcgataa

SEQ ID NO: 32057 - DNA, 312 bp, Escherichia coli; identical to SEQ ID NO: 30925

SEQ ID NO: 32058 - DNA, 192 bp, Escherichia coli; identical to SEQ ID NO: 9355

SEQ ID NO: 32059 - DNA, 246 bp, Escherichia coli
atgtttaaggatggagctgtagttaaacggatttatacggcagatgaacagcaacaacaggcagaatcacaaaaggcagcgttactttccgaagcggaaagcgttattcagctgctggaacgcgctgtcaggctgaatatggcaacagacgaggaacgcacacgactggaagcatgggaacgctacagtgttctggtcagccgtgtggatacggcaaatcctgaatggacacaaaagcctgaataa

SEQ ID NO: 32060 - DNA, 534 bp, Escherichia coli
atgatgcacttaaaaaacattactgctggcaaccctaaaacaaaagagcaataccagctaacaaagcaatttaacatcaaatggctttattcagatgatggaaaaaactggtatgaggaacaaaagaatttccagccagatacgttgaaaatggtctatgaccataacggcgttattatttgtattgaaaaggatgtttcagcaattaatccggaaggcgcaagcgtcgttgaattacctgatattacagcaaatcgccgggctgatatttcggggaaatggttgttcaaagatggcgtagtgataaagcgaacttataccgaggaagagcagaggcaacaagcggaaaatgaaaagcaaagcctgttgcaacttgtcagggataaaacccagctatgggactcacagctacggctgggcatcatttccgacgagaataaacaaaaattaaccgagtggatgctctatgcgcagaaagtcgaatctacagacacctccagcctgccagtaacatttcccgaacaacctgaatga

SEQ ID NO: 32061 - DNA, 432 bp, Escherichia coli
atgtcggctcacatcctcccgaaaagtgccgttgaaccgtcggtcatcgcgcaggtggttatcaacaaatactgtgaccatgcgcccctgtatcgtcagaataacatcttcgcccgcgcggatgttgacctgccagagagcacgctgtcagatatggttggtgccgcaggcgcggctctgtcaccactggcgaaacggttacacacgaaactcctgacccgcggcgtgatacacgccgacgagaccgggctgcgtatcctggacacgaaaaaaggcggtaaatcacgttcgggttatctgtggtgttatgccagcggagaaagaagtggtccacagatagtcagcttcgactgccagaccgggcgtggtcatgaacatcctgaaaactggcttcagggctggagtgggacgctggttgtcgatggttactag

SEQ ID NO: 32062 - DNA, 642 bp, Escherichia coli
atggcagcgacgcacacactccctctggcgtcaccgggcatggcacgcatctgcctttacggggatttacaacgatttggccgccgcatcgaccttcgagtgaaaacggggtccgaagccatccgggcgctggccatgcagatcccggcatttcgtcagaaactgagcgacggctggtaccaggtacgcattgccgggcgtgatgcaggtgaaaccgaattgtctgcccgtcttaatgagccgctggaaaatggtgccgtgatccatatcgtgccgcgtctggcaggagccaaaagtggcggtgtgtttcaggctgtgctgggggcggctgttatggcggttgctatatggatgccgggggtaggaattatggcgagtaatctgctgttttctctcggtgccagtatgacgcttggcggtgttgcacagatactggcccctaaacccaaaaccccccgcacacagacaacggataacggcaaacagaacacctatttttcttcactggataacatggttgcccagggcaatgttctgccggttctgtacggtgaaatgcgcgtggggtcacgcgtggtttctcaggagatcagcacggcagacgaaggggatggtggtcaggttgtggtgattggtcgctga

SEQ ID NO: 32063 - DNA, 411 bp, Escherichia coli
atgaacggtataaaaacggggctggggatcacgccgggtgagcacattatcagtgccgactctgcgctcagcagaaatatccggcattgtttctgcctttcctgtcgtggccgcttgattttgcagacagatgctcagggggcgtggtttgagcacgatttacatgccctgagcgagcaacagaaggcggactgtgtggtcctgaatccggaaaagtcccacccttacattgaggatatggcgatgtttttatcgccattaccagtcgtgctggagtggcattgtgtgatgtgcgacaagttttttcccgggaagaagttctgtgaggcctgtggtacggggatttattgcagagcggtatgtacaaagtatgtttacagctaccggtcagatttgctgctggacccctga

SEQ ID NO: 32064 - DNA, 411 bp, Escherichia coli
atgaacggtataaaaacggggctggggatcacgccgggtgagcacattatcagtgccgactctgcgctcagcagaaatatccggcattgtttctgcctttcctgtcatggccggttgattctgcagacagatgctcagggggcgtggtttgagcacgatttacatgccctgagcgaccaacagaaggcggcctgtgtggtgctgaatccggaaaagtcccacccttacattgcggatatggcgatgtttttatcgccattaccgatcgtgctggagtggcattgtgtgatgtgcgacaagttttttcccgggaagaagttctgtgaggcctgtggtacggggatttattgcagagcggtatgtacaaagtatgtttacagctaccggtcagatttgctgctggacccctga

SEQ ID NO: 32065 - DNA, 420 bp, Escherichia coli; identical to SEQ ID NO: 17162

SEQ ID NO: 32066 - DNA, 420 bp, Escherichia coli
atgtacgcaaaatcttttctcgcacttgatggcaacggacgtctgaccggtgcccgtaccgcacagaccgcaccttatgcttactacacctgccacctttgcggcagtgtactcagataccacccgcagcacgacacggaacgtccctggtttgaacacactgacgacgggctgacggaacacggtcatgagtgcccttatgtacaaccggaacacagggaagtacagctgattaaacgtctgcagcaattcgtaccggatgccttacccgtggtgcgtaaagcctgctggtactgcagacaatgtcgccacgcttattatggggaacgctattgtacacactgccagaccgggcgcttcagtgaggacggggagcagaatgaacggtataaaaacggggctggggatcacgccgggtga

SEQ ID NO: 32067 - DNA, 411 bp, Escherichia coli
atgaacggtataaaaacggggctggggatcacgccgggtgagcacattatcagtgccgactctgcgctcagcagaaatatccggcattgtttctgcctttcctgtcgtggtcggttgattttgcagacagatgctcagggggcgtggtttgagcacgatttacatgccctgagcgagcaacagaaggcggactgtgtggtcctgaatccggaaaagtcccacccttacattgaggatatggcgatgtttttatcgccattaccagtcgtgctggagtggcattgtgtgatgtgcgacaagttttttcccgggaagaagttctgtgaggcctgtggtacggggatttattgcagagcggtatgtacaaagtatgtttacagctaccggtcagatttgctgctggacccctga

SEQ ID NO: 32068 - DNA, 654 bp, Escherichia coli; identical to SEQ ID NO: 22209

SEQ ID NO: 32069 - DNA, 357 bp, Escherichia coli
atgttgaccttgcctgcagcaacgccgttcacggtgatggtcataccactgaccgacacggtggcttttgttttatccgcagacaccgcacgaaagctcttgtcggttgcgccttccggctggaatgccacggtcagcgtcgtgctcttccctttcaccaccgaggtgctggcaggcgtcacggtcatgccggttgccgctgttaccgtactgtgttcttctgccatcgacggacgtcccacattggtgactttcaccgtgcgggtgatcacttccttcgccgtcaccgccttaccgatactgctgacccagccgcggaacacatcgatcgtgccgttcgggaagcggattttatag

SEQ ID NO: 32070 - DNA, 192 bp, Escherichia coli; identical to SEQ ID NO: 31534

SEQ ID NO: 32071 - DNA, 2961 bp, Escherichia coli
atgaaactacattttgaatctgaccttacctatcagcaaaacgccattacttcggtctgtgatttatttgaagggcaagagaaatgggagagcgaaatgactgtgctggccccagctcagggcgcactctcatttgaagccgcaacaggttcaatgcctgtaaacccacagatacccgaagatgatgttctgctgaaaaacctgaacaaggttcagttgaagaatcagcttccaccttcacctgtgctcgacagccatgattttactgtcgagatggaaacagggacaggtaaaacgtatgtttatcttcgcaccatgctggagctgaataaacgttatggcatgagcaaatttatcattgtggttccttccattgccatcaaggaaggcgtttataaaacactacaaatcactgaagaacattttaaaagcctctatgcgggaattccatacgaatactatctgtatgactcgtctaaacctgcggatgtgcgaaattttgcaaccagctctgttatgcagatcatggtaatgacagttggtgcgattaacaaaaaagacgttaataagctctatcagtccagtgaaaaaacaaccgttgacgatctggataagccaattgatctgatacgtgctacacgcccaattattattgtagatgaaccgcaaagtgttgatggtggcttaaatggtgcgggtaaaaccgcacttgatgctatgcacccaatgttcaccttacgctattcagcgacacatgtgcataaacatcatatggtgtatcgcctcgatgccattgatgcttacaatcagaaactggtcaaacaaattgaagttgccgggcttgaagtccagaatgcaagcaatagcccctatgtaaaactggtcagtattaacagtaagaagaatagcattagcgcgactgttattgttgatatagccgataaaaaagggggcgtgaatcgttctgagattaccgtgtatgacggtacggcacttgatgacgaaacggggcgtgatatttatcagggatacaggataagcgagatccgcacgggcaaagacggttatctgacgctggaaacgccttctaatacctactatatgcaagttggtgatgtcgtgggtgatattgacccgatgctcatccagcgtcatatgattaggcgtacaattcgtgaacatcttgataaagaacttcgcctgaattcccagcaaatcaaggttctcaccctgttcttcattgataaggttgatttctatcgccagactaatgaagaaggacttcgtgaaccgggtgaatatgctcgtatctttgaagaagaatatctaaaagcgatcaaaagcccagcatataaagatttgctcccttctcatccagaacatgctaaagacgttcatgatggttatttctccattgataaaaaaggtggatgggctgaaacaaccgaaagcaataatgcaggccgcgaaaatgcggaacgcggttataacctcatcatgaaaaataaagagaagcttttgagtttctcgaatccggtgaggtttattttttcacactctgctttgaaagaaggctgggataaccccaatgtattccagatctgtagccttcgagagatgggaagtgaacgagaacgtcgtcaaacattagggcgtggtcttcgcctgtgtgttaaccaagaaggtgaacgtgttcgtgatgacagcattaacattctgactgtcgttgccagtgaaaattacgaagcctacgctgaacgattacagtctgaaattgagagcgaaacgggtatccgttttggtatcatcgaaaaagatgcgtttgcccatctgatcttctctgattcctcacaagctgtgggtattgccggttcacatgagatttgggctgaactacagaccgaaggttatctggaaaaatcgggaaaaatcactaaaaccctgaaagaaactcttctcgatggcacttttgctgttagcgaaaggttccttcctcttcaggagcaaattgaagctatcctgcgtaaatcagcaggacgactcaatataaataatgctgatgagcgtaaagtaatcaaataccggaaagaggtcttaaacagccctgaattcgaagcgttatggcagcgcatttgccaaaaaacactgtatcgtctggcatttgatgaagatgaattgatcaaatcatgtacaaaatcactttctgaaatgcagcctgtagcaaaagcaatggtcagtttcagcaaagcaacaatcaaacaaagtcaatctggacttgatgtcaaagctcagtctaatgggacaacaagcgctgttatagatgttgcagagcagccactgccagatattcttggtgttctacaggaaaaaaccggacttacaagacgcagtttaagcaccatcctgaaagagagtggaagactcgctgattttgctaaaaatccacagcagtttatcagtgaagctataggccgaatcaactactgcaaacgcctgtcaattgttgatggtattaaatattatccactaaaaggagaggtgtatgcgcaaagtctctttatggataaagagctaacaggatatgcccgtaatctttttgaaacctcgtctaagtcagtttacgaatacgttcctaaagattctgaagtcgaaagccgtttcgctcaggaactcgaagaacaggatgaagttaagctttatgtgaagcttcccggttggtttaaaattccgacgccactgggaacctacaatcctgactgggccttagttattgaagacaatggtgaagaacatatttactttgttgtagaaacaaaaagtaaacacattggtcttggtaatgaagaagatgcgaaaattacttgtggaacagctcatttcagtgctttaaaagaagaaaacactaatgcagcaaaatatatcagagcgacaaatcttacagaagtaataagcagcatttga

SEQ ID NO: 32072 - DNA, 582 bp, Escherichia coli
atgaaaagaagtgaaatcaggaaagcactggaagcatggtttgatgttgaacgctatgaggcgatagagaaactcaccttacagcatttttatgttgaggttgagcggcgcatcttggcttacagaatgttgttgagccggaacaccatacctacctttaaccgattaatgctggatgattaccgcaacaagatcctcagcggtgaaatctttttcagtggtgataccgctactcttggacatgagcttgccagaacctacgcagtaaatcctacgacacgaagccacgcgcaattttatgcgaaaacgctggcattaaccgaagccacgcctgaactctctgggttaagccagtctgaatttctgtccgagtatctgaaagagacatcccttaataatctttcacgtattactgtcgatattcatctggaagaagcatcaaccgaagagatcattgaacatctgaaagtgttgatcccccgatggaagagacagcttaagatgaagtctcagcgccaagagagtatcgttttgggaaaagcacattcagaaaaattattgaatatcgtcttatcccgatga

SEQ ID NO: 32073 - DNA, 1854 bp, Escherichia coli
atggcatttaaacactatgacgtggtcagggcggcatcgccgtcagaccttgcgaaacgactgacacaaaaactgaaggagggctggcagccgtttggtagtccggtggccataaccccttataccctgatgcaggcgattgcagcagaaggtgatgtggtcgtcagtggtgcaactgagccggagtggtactacgtcatcgtactggccgggcaatccaatgccatggcttacggtgaagggcttccgcttccggattcatacgatgcgccccatccgcgcattaagcaactggcccgtcgtaacacagtgactcccggtggtgaagtatgcgtatttaacgacatcattcctgctgaccattgtctgcatgatgttcaggatatgagtacgattaaccatccccgggctgacctgagcaaagggcagtacggctgtgtcggacagggcttacatattgccaaaaaactgcttccgtatatccctaataatgcggggatcctgctggtaccatgctgtcgtggtggttcggcattcacccagggcacggaggggacattcagcgagtccacgggagccagtcaggattcggctcgctggggagtgggtaagccgttatatcaggatctgcttttccgcacgaaggcagcattgcagaaaaacccgaaaaacgttttgctggcgatatgctggatgcagggggaattcgatatgacgaatgccagttacgcccagcagccagcagcatttcttgcaatggtacagcagttccgtgctgaccttgccgggctggcagcgcagtgtcacggtggaagtccggcatcagtcccctggatttgtggcgacacgacatacgcgtggaaacaagaacacggtacgcaatatgaagtggtatatggtgcatataaaggtaaagaatcccagcagatttattttgttccctttatgaccgatggtagcggagttaatacaccgacaaacaacccgtcagaagatcctgatattgtcgggtctggttattacggttcggcatcccgaacgaacaaaaactgggtatcatcaaatcgcccgacgcatttcagctcatgggcgcgtcgtggcattattcccgatcgtatggcaactgctattctgaacgtagccggtcgcaccttagccttcattagtggtaaggcaccggaaatcaaactctcgcccggcggcgacacgccatcggggccgtctgaagatgcatccatacgcacaatctccctgttgccgacagccggagacgctgctgcgcagggctggagcattaagaatggcggaattcagttgtcagatggtgtatttaagatcaccaagcagagcaataaagcctggtccctgacgcgcccggtggatgacgcagtctccctgctgacacggggtggcagactgagctgtaagtttcgactgtcaggcgcactgaccaacaatcagttcggtctgggaatttatctgtataccgatgtagcgttacctgacgtcgtggcgatgaccgggactggtaacccgttcctgatgtcgttcttcacccagaccacagacggcaaactgaatctgatgcatcacaagaaagccggaaacacaaagttgggcgagttcgggaattacagtaacgactggcagacgctggagctggtgttcaccgccggcagtgccacggttactccgaaactgaatggagtggctggcccggcattccaggtcataaaagacagtctgacactggggctgaatgcgctgacgctgacggatattaccaaaaatgcagcgtatggcgttgagatagaaagtctggtgctggagataaatgcaccggcatcatcataa

SEQ ID NO: 32074 - DNA, 264 bp, Escherichia coli
atggaactgaaaaatagtattagtgattacacagaggctgagtttgttcaacttcttaaggaaattgaaaaagagaatgttgctgcaactgatgatgtgttagatgtgttactcgaacactttgtaaaaattactgagcatccagatggaacggatctgatttattatcctagtgataatagagacgatagccccgaagggattgtcaaggaaattaaagaatggcgagctgctaacggtaagccaggatttaaacagggctaa

SEQ ID NO: 32075 - DNA, 399 bp, Escherichia coli
atgttagatacagatagaaaaagaggtcgtataaatttaacctcggaggaacgaagggatatatctatacagttcagagtaaacaaagcagagtttgaatatctaaaatcattagtttcagcatctggccttgaaagaggccattatatccgaagggaaatattaaagtctgaacctattgtaagaagaaagatgcccgaagttaatcaaaaaacttatatacaactttcatcgttaggaaacaatataaatcaagcaacaaaaaaactaaatagcaatgaatactttgataaaaatgaagttgataagcttaattttaatataaagcaagttagcagaaggataatagaaataaacaaggatctaaattatgaagggatacgtagcgaagtcaggtaa

SEQ ID NO: 32076 - DNA, 501 bp, Escherichia coli
atgacaaaaatagagatgatgaactcgttagaagattctcagcaagaaaaacagatgacgaaaataatattggacgatcacctattgaaccaaatatcaatgacgatagaaccattatcagaaacgatgatgatattatccgaatcagtcagcatggcattaaatcagacacagcagacactaacaagagtgaacaactcattagaagcaacaaccacatctttaaactcagcgaaaaatataatagaccaacaggcccgaaagttagaagaacaacacaaaaagctgcacaaatactcaacagagttaaaaaacaatacaataaagaatcaatcaaggcttataataaaagtggcttcaatagtgggcatgataaatttagtggcggttctatcggtaggatacttgatcatgcagaaacagccaacgcagccacgaataactttagactcaaaggccgtagcagtttcaatagtagagcaactaagatcgaagaaataa

SEQ ID NO: 32077 - DNA, 525 bp, Escherichia coli
atggaacgtgatggagcgcggcggcggaatttcattatccgcggcgctgaaaaacgtcagaccgtcacgggtccacatccccgtgttttcacagatccaccgcccgttgctctggtcaagctcagactgatggatcacgcagccatgatgttcacagaggtagaaaacgctttcggggctgtccttctcccatttaaggccaaaaggcgtggattcatcgccaaatttcagatactgctcctccccacagtgtgggcagggcacataaaaacgcatgaaatgcgccgactcgttggccgctttttcgatctggcaggtgcctttgattttaggcgtcgagccgcgaatggatttgggccatacagagccctcaatacgtttatccccaagcagggttggcgacccctctttttcgacatccggttcgaacgaggaaagttcgtcatagcagaccacgtccacggatttttcacggtagtttttagcggcagccccgcccaggcaccagaagcccacgcccgatga

SEQ ID NO: 32078 - DNA, 234 bp, Escherichia coli; identical to SEQ ID NO: 28576

SEQ ID NO: 32079 - DNA, 1038 bp, Escherichia coli
gtgatatcatatccactcatcggacaagacaatgacttcttagaccatttaaaaataccgaaacaacatttactagagttaatatcgagaggtagaattcaatttgcattaccacaaaacataataagatataacttatcatttcttgaagaatgcctaaacactaatcctgaatgcattattctgtccagacgattagcatcatcctcaattattgacatcagaaataaaacaggttttcttgctacaacattttctttcgaagaaaaattaaatgttctcaaaacattgagggcactggatggcaaaatattcaacttatttatcaaggccctatctcaaaattggcactcaatggagatgaatatccatgagcgtggagccatgggtgtttcaaacattggcatagcccccgtcatgtcagagttattcaataggcaaggacgagaccttcttcttgaactattattttctgctatgccattggagtgggcgatggcattaaatgctgatttttatccataccacagcaatgagcattcacaatataatgcttctgcatgttgtttatatggatataatggttttagaataaatgaagaggctattgtaaaatctaaaatcggtgaaatagcaacaagaatactatcaatcgataatgacatgtcagccttagaattagacgacgcaatacttaaaggtgatattccgaggataagggatttttcaagatcgttgtctaatttatcaagtgaagagcttgatataaaaatttacgaactaaacaaagaaataaaaaaaatagaaaataaagaaagtaaactttcttcattagacttatgcggacttatagcatcaacaataggtgtttacgatgacaatccatatatcccatttggatttgccttttttaaaataatctctagcgtgttaaattcaaatgatattagctcgaaaaacatcgataaaataaaatcaacacttttaggtacgcaaactgaaacattgttaataaaaagaacgaaatccagaatgtaa

SEQ ID NO: 32080 - DNA, 303 bp, Escherichia coli
atgtcgcacgattttagtattgaaagaaaaaaagatgaaaaaatagctttcttctttggttatgctggtgcttttttttataagagttttcattgtgaagaatatgataatcatttttcaggtagtaatgaaggtaaaacaataagtaaaaatggagcagaaaacgcattgaataaaataataaatagtgaggaaataaagaactatccagatcctgaacgtatcaatgacattaaagatttttataataatgttgttttgaaatcaaaagaagaagataagttttatattcactttagttga

SEQ ID NO: 32081 - DNA, 402 bp, Escherichia coli; identical to SEQ ID NO: 5076

SEQ ID NO: 32082 - DNA, 147 bp, Escherichia coli; identical to SEQ ID NO: 11446

SEQ ID NO: 32083 - DNA, 1065 bp, Escherichia coli
atgaaacgccccaattttctgttcatcatgaccgatacccaggccaccaatatggtcggttgctatagcggtaagccgctgaatacgcaaaatattgatagtctggcggcagaaggtattcgctttaattctgcctacacctgttcaccggtttgtacacctgcacgggccggactattcaccggtatctacgctaaccagtccggcccgtggaccaacaacgtcgcgccgggcaaaaacatttccaccatggggcgctactttaaggatgcgggctatcacacctgctacatcggcaaatggcatctcgatggacatgactatttcggcactggcgagtgtccgccggagtgggacgctgattactggttcgatggcgcgaactatcttagtgaactgacggagaaagagattagcctgtggcgcaatggcctaaacagcgttgaggatttacaggcgaaccatattgacgaaaccttcacctgggcgcaccgcatcagcaatcgggcggtggattttctgcaacagcccgcgcgcgccgacgaacctttcctgatggtgatttcgtatgatgagccgcatcacccgttcacctgtccggtggagtatttagagaaatacactgatttttactacgaactgggtgagaaagcagaggatgacctggcgaacaaaccggaacatcaccgcttatgggcgcaggcgatgccatcgccagtcagtgatgacgggctttatcaccatccgctctattttgcctgcaatgactttgttgatgaccaaatcggacgggtcatcaacgccttaacgccagagcaacgtgaaaatacgtgggttatttatacctccgatcacggcgaaatgatgggcgcacataagctgatcagtaaaggagcggcgatgtatgacgacatcacccgcattccgctgatcatccgttcgccgcaaggggagcggcgacaggtcgatacgccagtcagtcatattgacttactgccgacaatgatggcgctggcagatattgaaaaaccagagattctgccgggggaaatatccttgccgtaa

SEQ ID NO: 32084 - DNA, 471 bp, Escherichia coli
atggtggaaatagaaaatatcataagacctgaaaggtttcctacatcaatttatccagtcttttcacattcatttattgaacgagagcttccgctactgaatcttgcccgatcacagtataaaagagcaataagtaaaagagtggcgaattcaattttttatactttgcaaaaaactaacgtggcattatggctatatcttgaaatgtttgctctggtggcattcattaaactgtatacaggaaaaggttttgaattcataaagaacatgtgtgtatttatcgattatgagaaagggataataaaatccacacatgaagaactgctgggtgaaattaaacgtaacattcaagtgaatttgaaggtgaatcctgataattttccagagttaatagatatatacaattcatgctttagtgaaaatatattgtcatatgatattcaggatggtaattttaaatggcgctcatga

SEQ ID NO: 32085 - DNA, 261 bp, Escherichia coli
ttgctttcatggcagaaaggtacactggtcggcggtcatgacgataacgattctgcgcttgatatctcgtacatgagtaacggaaataatattgactatggcggcgataaggtgtttgcggggaattaccgtagcgattatttgtggtacgcagtgctgggtggaacaaacagtcgcgcaaaagccgaattaaacggagcattctttaacataacccgcccccgcaatatcgcgtttaactatatcgtgagggcggcgtga

SEQ ID NO: 32086 - DNA, 126 bp, Escherichia coli
atggatttcattcatttaaccgctgttgtcgctctattgctgataaaggaaggaccaaagaaaatcttaaatcttatgttactgacagaagagttttcgaatattgggtggatggtgattgggtag

SEQ ID NO: 32087 - DNA, 294 bp, Escherichia coli
atgtcgcgccagtgcacgcattatgggcgttggcctcaacacggttttacgtcacttaaaaaactcaggccgcagtcggtaacctcgcgcatacaaccgggcagtgatgtgattgtctgcgctgaaatggacgaacagtggggctacgtcggtgctaaatcacgtcagcgctggctgttttacgcgtatgacaggatacggaggacggttgtggcgcacgtcttcggtgaacgcactctggccacactggaacgtcttctgagcctgctgtcggcctttgaggtcgtggtatag

SEQ ID NO: 32088 - DNA, 279 bp, Escherichia coli; identical to SEQ ID NO: 20986

SEQ ID NO: 32089 - DNA, 510 bp, Escherichia coli
atggctattacaatccaatgctactcagagtccgacaatgcggccttcttcggtggagacctcgaccatgagcagctaccagcgccaacctatgacgaacctaaggcccgtacaggtaagccgcctgtggtcatcgacaatcggtctgtgaggctgtggctgattgaaacaggatgtctatcctattcacagcttgctgaggcctacccgtgggcagacgatgtgtttacagggctgtcacgtccttcaggtctctctaacagcgggggactcccggtctccaaggcctacctgttcgctgccttatatggcaccaacgatatcttctcccgcaatactgacatctcctacacggcaatcacgggtcgttccccgtctcctcgcttcattcgacacgttaactcggtccttcaggctacctctgtgagtctggctaaggtccttcagggtcgagaagactttgagatgtgggacactaacaaggacgagctgctggctgtaagtgcttga

SEQ ID NO: 32090 - DNA, 216 bp, Escherichia coli; identical to SEQ ID NO: 6015

SEQ ID NO: 32091 - DNA, 891 bp, Escherichia coli; identical to SEQ ID NO: 6016

SEQ ID NO: 32092 - DNA, 444 bp, Escherichia coli
gtgaaataccgttatgagtttacggacgcgctggggctgattacgtccttcagttatgccaatgctgaggatgagcaaaaaacgcactacagcgatacccgctggcatgaagattccgtgcgtaaccgctggttcagcgtgatggcggggccatctgtacgcgtgaatgaatggttcagtgcttatgcgatggcaggtgtggcttacagccgtgtgtcgacgttctccggggattatctccgcgtaactgacaacaaggggaaaacgcacgatgtgctgaccggaagtgatgacgatcgccacagcaacacgtctctggcgtggggagctggcgtgcagtttaacccgaccgaatccgtgaccattgatattgcttatgaaggttccggtagtggcgactggcgaacggatgcatttattgttggtatcggataccgtttctga

SEQ ID NO: 32093 - DNA, 366 bp, Escherichia coli; identical to SEQ ID NO: 10065

SEQ ID NO: 32094 - DNA, 237 bp, Escherichia coli; identical to SEQ ID NO: 9729

SEQ ID NO: 32095 - DNA, 570 bp, Escherichia coli; identical to SEQ ID NO: 9851

SEQ ID NO: 32096 - DNA, 219 bp, Escherichia coli
gtgctggatgcgctggagcaggcgttgtgggcccatcgtccgtccggcaccatccatcacagcgataaaggctctcagtatgtgtcactggcctatacggagcgattaaaagaagcaaaactgctggcatcaacaggaagtacaggcgactcgtatgacaacgcgatggcggagagcatcaatggtctttacaaagcggacggaggtaatacaccgtaa

SEQ ID NO: 32097 - DNA, 312 bp, Escherichia coli
gtgtgtcaggttcatatatccgcccaggctgccggcatcatcccggaccgtgccggcacgggagccgtcatcatccttaacatcaacggaagaatggcctgcagcaccatatatccctgcggtcacagacataccggcaacatctgttctcagcaggtcaccctccaggcggacgaagccatagctgccgctgctttccggcgtggccccacgggcaataccgccgttgttatcgtgaccgagatggccgccctgaatgctgagacggacgctgttattttcaccgtttacaccggtctgatggctgcgtga

SEQ ID NO: 32098 - DNA, 126 bp, Escherichia coli
atggcaggagctttattaccttggatgtttcgtcaaaaatacaacattatgaatatttttgaaaaggataagaatatcaaatcaaaagaagaaaatgaaattgaacgaaacgataaaggagaatga

SEQ ID NO: 32099 - DNA, 558 bp, Escherichia coli
atgataaatagttttagattattaagggacaggaaaagtaagaaagggttttcactattggaattgcttttaacgttaggtgttatcgcaggaataataatatccgcttttatagtttttccaaaagttcaggcttcacaaaagatagataaagagagcagaaacataacagctattcaagcgggagtgaaatctctctatggcggcagggctaagatctcatcattgaatactgatagcttcattgcgtctaagaacgccccggataacatgatcttggacggtaagttagtgaatgagtggaaaggcaatgtaagcgttgaatacagcggtaatcatggcaaatacaacattatgtatgatgccgttccccctgatgcttgcgcaaaactcattacagcggtttcaggtaattttgtgagtatcacagtatacaacgacaacggaagcactgatgttaagaacttagaagaagggtatggaatagacataaccaaagctacagccgcttgcgcatcacaagaaagctcaactgttatgtttacatccatcatttaa

SEQ ID NO: 32100 - DNA, 546 bp, Escherichia coli
atgacacacatattaagtaagaaaagaaagaaaggattttcattgttagagttgttgttggtttttggtgttatagcagcaatcatagtagcggtgttcatggtttaccctaaagtaagctcaagccaaaaaattgacagtgatataaaaatattaggcacgttaaacgctggcattaaaaacctatacgccggacaagctgactttacaggtttatcagtagacgcagtaatcaagtctaagatagttccagaagatatagttgatgataatctgatttgggatagttggggcgcaaacgtcttaatagaaccttattacgatggaagcttttatattgggtttgagaacgtatctgtagatgcttgcccgaagtttgtttctcaagctggagcaagttattttaaaatagttgttggatctacagaagttaaaaatatagaaaatggtttagagctaaatatggctactacaacatctgcttgtgcgaatggtgaagatggatattcagacaaaccaatcacagtttacttttacgataaataa

SEQ ID NO: 32101 - DNA, 303 bp, Escherichia coli
atgagcgatctttctcacttatcaaacatacgttctctgcgtaaaatcgctaatgaactccagtctgaaggctttgaagtgagcttagacagcgtaagagcgttcctgttaggccaagagcttcctgctccgggtaagggcgctaagggcgttaaacgtggttctgtagagcctaagtatgcttatacaaacgcagatggtgaagaggtcttatggtctggtcgtggtcgtccaccaaaacctattgaagaagccattaaaggcggggcaaaaaaagacgatttcctgatcaaaaaagactaa

SEQ ID NO: 32102 - DNA, 474 bp, Escherichia coli
atgaaatcatgtgatacgaataaaaaactactactggatcttttggcgtttatagcttttgatatgctggatgaaaaatacaacaacaataagttaatcataacaaacagagcaaaaaaatatttagataataactatagcggtagatttgattacatcatgaatttaaatcctgaagttatcgcttcaacattcatgaaagagggtgtagaaggtcatatcttcgcttacagtgataaagatgaagatattgaggatttatttgattatgttgtaagggataagttaagggcttatatagataacacaaaatacaatcaggaagagctaacaaaagaaatagagctgttagctaaagagtttcacaatggatatatgaagaactattcatttttaaaccaaatattattgtatgtatgtggttgttataaaataaaacctcgccttgaaaaacctatcatgattgctttataa

SEQ ID NO: 32103 - DNA, 1929 bp, Escherichia coli
atgagtggagcaaaaatattagcagtatttgataaagacggaatgcgtgatgctcagggcattaatggcggtaaaacaagtccattagagccaaccatcaacggcgctacgtataaagatagtgaacttgatatagttattaaagctgaaaacggtttagagcttcttaaaaaaattgaagctacaattgaccgtgggataatgtcaaaacagtatttgaataccattcaaagacctctttcagaactaagcactaataaagatccaaaagctctttttggtgatattggaggcagggggaatgagtgggaacagctatttattgatttatcaggttttagagcagaagatcaggttttagcacatgacataatcactgacagtatggctaaccctaattttatttatgtaaaagatcaggggccgggaaaatcaaagcaatatatgcctgttattggtaaaaacagtgtttttgcttggggtgttcatagcgaccaaaaaactaaaactcactctcatatatttaggcatacgcataccattactgataaaaactatgaatacaacccaaatactggtgaagtaatcataaatcagttaaatcctgacgcaagaagaataacagcaagtctttcattaaaagataactttgtaagaacgcaggttcttaaaaatatcaatgacaatcttaaagccgctggtttacctcttttagataacatttacttatctaaaggtaaaatgctttctccagaagaaatcaaagcacaagaggttattgatacaaataataaagaatatcttgatgatttatacactacagcaagagaaaaagctaaagaagagtctattaaaaatcaagagcaaattccaaaagaagttattgaagatgctgttgttcagaatgaactaaatgaaatagatgctcttatcaagcaaaaacaaaaacttgctgctgaatacgccgctaaagctattaaagaaaacaatgagatacaaggctttgaaaaggctcgtgaagctgttatagctcttcatcaagaaaaacgtgttaatcaggaacttactacagagctgaccaacactaagcaatcacttgaagaagaagcgaagcttagaagccagtttgaagaaaaggccaaaaagacaagtgaagagttagcagaaaaaacagaagcgtttaatgctctttctgatgagtataaagctcttggtgagcagtatgatgagttagaacaaactcatacagctaccattgaaaaacatagagaagtcgttgaaagcctcaatcaacaactacttcaacaagatcttgaacacacaaatgaaattgagttgttggaaaccactcatgaaaacgctattaaaaagcttaatattgagcatgaaaacgagattgaaacgcttaaaactcaacaggcttctattgttagcggattaaatagcgaaattaccaatcttaaagatgccgttgtaagtatcacagaagaaagggatggtttcaaattcgataaagaacagcttgagattgaattagcaaaagctaaacaagctattattgacatggaacgtaagcacaaagaagagcttgaaaaacgtgatgaagagaaagtttcattcgaaaaaatcatagatgatatgaaaaaagagaagattgaaaccgataaagcgattgaacttcttactgaaagcaataaagatcttattaaaaaggttgacgaacatatcaactcttataatagccttaaaattgaaaatgataagctaaaagctgattataataaagagaaggaagaaaactctacattaaaatcagaaaatgaacagcttaaaattgataaacaagctttagaggaagcaataagaaaagatatagaaaaaaagaataaagctgataacagtaataaaaataaaccaactaaaaaataa

SEQ ID NO: 32104 - DNA, 882 bp, Escherichia coli
atgtcggtatatggctatcccgtgccaaccacgccgtggctgaatacagctcccggtttatttattgacggctatacatcggcagcagccagtaccgtaccttccctgaaccggacactgatttatgactatgagcagaaccctgactccggcaacaacgtggtggcgctggcagcaaaagcaggatacagcacatggtggatatccaatcagggaaagctgggggagcatgatacacgcatctctgttattgcttctgatgcggagcataccgttttcctcaagaaaggcagctttgcttcccgtaaaacggatgacatgttgttgttacaggaaacagaacgtgcactggcggataaatcctctccgaaggtgatattcctgcacatgatggggtttcatccgaacccgtgtgaccggcttcactcctggccgaataattaccaggagcagttcccccggaagattgcctgttacctcgccagcatcagtaaactggataactttctcgggcagcttgatggtatccttcgccggcattcccgtcattttgccatgctttacttttctgaccatggtctgtcggtcagcgacagtgctaatcctgttcatcatgatggtcatgtgcagggaggctacagcgttcccctgattattaccgccagtgacatcacgtctcatcagtccgtcagcagaaaaatcagtgcccgtcatttcgcaggtatttttcagtggctgaccggcattcgtactgaaaatataccgccattcaatccgctgacagacgaagataatgaactcattatggtttttaacggagacaggaatgtaccggcagacagtctgaaaccgcagccacttattcttcctgaccacaggtaa

SEQ ID NO: 32105 - DNA, 528 bp, Escherichia coli; identical to SEQ ID NO: 21356

SEQ ID NO: 32106 - DNA, 1404 bp, Escherichia coli
  misc_feature (418)..(427): n is a, c, g, or t
atgtgcggctttcttagattagatgtatcaagctctggtgaacaacaaaaagctcttgcttctggttctggatataagcctttagttgatgttgcttcgatacaaaattcggttcaacaagctcaggctaaagcacttaataaaatggttttagatgcgattgcttactcagagactttagctaatcctgatcctacagacacgaaagcagtaaatgataagattgaagaaatgtcattggaatataaaaaatcaatgaatgaagcagggaagttagcaatggctcaagctattaaaattgactctatcgcagatataacggaaaaaggctgggcattttttggtgcctactacatgaaaattgttcaggcgataaatggaactaacgcagcaatgaacagtattccagcttcttctnnnnnnnnnncttctgaacgtttaaattatcttgctgacagatttgaacctcgctttagcaaagtcaaaactttaataaatggcactgacaagcttaacgctgattctactaacatagcgggtgaagacagttcattatttacaagcttattaagaggggcaaactcaaacggtggttggttcatgggtgatggtaaagtagatcaattgctatctatcacacaacaagtaaacgttggtaatcacgttcttaatggtgtagcggcaatggggataggcgcaagctctgtttcattgttagcgttgataccaaaactatctgatgtgttgatagctgcaggaacagtgatcgggccattcttctcgttcttgatgatcgtaggcttgataaacggcatcatgcttgcttacgtcatccctatgataccgtatatcatctggatggggattgtgttgtcatacatggctacgtgtatagaagcttatgttgcctcgcctatgtgggttctggctcacttagcgcctgatgctgatgatgtggtaggtaagcaagggcaaggctacatgcttacactggtgttaacactaaagccggggttagcaatatttggtttccttgcttctttcgtgatgatgtgtgcgggggctgccctcataaacgcaacgttcttgatagctacaagttttgttgactcaggctggttgggtattacttactctatagcaatgattgctgtttatatgtgtttaaacttaaacaatacgatgaacgctacaagagttatgtctactcttcccgacactgttttagaatggataggcgcaagaggaacttcattgagtggtaaagttatgggcggttcagaagaagctcttagtaatgcgaaaagcaatactactaatactgtcgaaagagcaggacaagctacaactaactctgtattcgctagacttgggtgtgtatatggaatgctcggatccagatga

SEQ ID NO: 32107 - DNA, 249 bp, Escherichia coli
atgagtgagaaaacaatagaacgtcaagttatagaccagatcttagaacttaaaacaaaaaacgagaaagagttagttggtagattaaaagttttagaagaggaaaaggaatatatgagaagagagtatgaaaacattataagtgaattaaaagataagcttgaatgtgctcgtaaagaaaatgaatggcttttgtctgatatttatcatattcaaagcatcattaaagagggtgaacatgacaagtaa

SEQ ID NO: 32108 - DNA, 282 bp, Escherichia coli
atgacaagtaatgataactggaatggaacaacaaaaaaagaagatgaaatttcattagatgactcgactatcacaatatctttatcaaaagaagatgaagaggcagaaaagaaacagtctttaaggaagagatttaataccgaaaatcatttagagaatgcggcaatgtcaggaggtgttattgtagtgatcttaggcatgattatctaccttccggttatccttgtgatgatgacagggttgatgataagagagttgatagacacggtgagagaatggtga

SEQ ID NO: 32109 - DNA, 258 bp, Escherichia coli
atggaaaaggttaacatctatgatgctaaaactaacctgtccaagatcgttcaagaggtcgcccggactggtgagccagttgtgatcgcaaagaacggtcacgctctggtaaaagtcatcgcctacagagaagagaagcctaagcgcaagttaggtttcatgctcaacaaaggtagcgtttctgatagcttccttgataactttgatgatatgaacgctgatgaaattcaagatatgtttgaagggaaatatgagtaa

SEQ ID NO: 32110 - DNA, 387 bp, Escherichia coli
atgataaaaaaaacaaaaacatacttaaaggaagttcaagaaaaatacattgaaaacgatttatttcgtgtgatattgggattgtttataagttcagtttccttttcaacacttttattgcttcctgaaaaactcatagaggaaattagcatgactgatatgggggtgaatattttttttattatatttacaggcatggtaataacaatgtcaggattaataccgataataatgggtgttatccataaattgttaaagacagatggtaaaaaatttatagcaggtgtgattatgatgtgtatggcattttttattcctccggcttctatttatggactaataccaatacttggcgcacttataactatgagtattttatttgggtaa

SEQ ID NO: 32111 - DNA, 294 bp, Escherichia coli
atgaaaaaagacataataagagatttaaaaagattaggtttacataacggaagtgagtttatatcaagcgcatttttaataaagaatgacagattagtatcaataatagcattaatagacagacttgaagcacgtaagattataccagcccacattaagcatggtttcaatcagattagagcatcatatcaaagatctggctacatcaatcaagcccttgctgttataccgtttaaagcttatgtgaacgagccagcagagcattttaaagcagatatatattggagtatttaa

SEQ ID NO: 32112 - DNA, 129 bp, Escherichia coli
atgggaacagaaaaaagagaaaaagaaatagaaacatggtcagattttattgatgagtttcttaaagaaggtggtgttatttatgaaaatcaaaacagacaaaaaagagaggtggcatatgatagataa

SEQ ID NO: 32113 - DNA, 261 bp, Escherichia coli
atggttaagcaaccctgcgcctgttccgtagcggcctgtcttcttgtttacctgccatatcccgttaaagccggtgctcatcaaaaagaacagcaaagccgatgcccggacactaccaatctgttctttccaatactgttctctacgttgatagaaacggtagttcctgacttcatgagagcgtatagacagataggccgcttccagctcctgcagctcgatacagaacgcttcaaaatcgtgtttgatggtattgagtag

SEQ ID NO: 32114 - DNA, 303 bp, Escherichia coli
atgatatttttaacattggttattatagtgaatttattgatattcattaacatagggagttttgttagctgggtttcagagcacaaaatttatggaatatggtataaaagaatatttaagatcggttttcttttcttgttcgctatgtttattgccagcattttaggaggtgaagcagttcagacagcagctaaatctttcttcttttatattgattgcgtcattgcgtttgtcttgatgactatagttcacgctttttacatcaaactaaaatccaaaaagaacacgtccaaacccgcataa

SEQ ID NO: 32115 - DNA, 300 bp, Escherichia coli
atgaagaaacagattttagcagcagcggctcttatggctacgctggcgctctccggttgtggtgatgatggtatctatggaacgtatgaaaacgctcaatacggcgctgttctcgacgttcagaaggatgtaatcaagttcaggggtgaaagcttcccggttaagtcatgggatgagactaaaaagcccgtatacatcgccagaactcaacatagcgttgtcgggtcatggacattcaagcttgagaagacaaaagacggcggcgtgatttatcaaggcacaaagtttaaaaaggattaa

SEQ ID NO: 32116 - DNA, 294 bp, Escherichia coli
atgagaaagaagtttagaccaatagattttcatacaagcaatatgggaaataactatataactttagaatgtatgatgtcagcaccatttcatgaacattcaccagagcttttcgctaaatgtttagcagaagtcccaaaaataaacaggctacttattgatagacgtaagtgtgagaataaggaacattacgaaaaggtcttgatggttgctgatatgtgtttatcaatgatgatgattgagcgccgtcttggtatcgttaatgaagataatagttattttaatcaaaaataa

SEQ ID NO: 32117 - DNA, 294 bp, Escherichia coli
atgcaggtaaaaagatatagaaaagaatggttcgatattttctttgaaactcatcagtatgtcactttaaatgaacaatatgatatcgttgaagacattgctgaaacgttttgtagttatgtatcattgaactcaattaattcttggtgttgtgaacatcacgaatctttaagcactttcgttgatgatgatgtggtggtgtattatgaagatgaaacagaacgagatgatgggaaatggcctcgtcatttaggaatgtatttttggaactgggtaaatctcgatgaaatttaa

SEQ ID NO: 32118 - DNA, 501 bp, Escherichia coli
atgcctgaaactgaattgaatgttaaaaccaacggcagaagccgctatttaactaatgatgaattaaaaaatctttttggcgataactatcttcattcaagagataacatagaagaggggaaacttacttcaaggactcactattttggtgatggtcttttaattaaagaaacagaagacgctatagctattcgtggtagacgtaaagctaacgatattgctgttgacttgattgatgtggctaaacaaaaaggatggaacagtattgttttaactaaaggtaatccggtgttcatggaacaggcttatataagtgctatcaaaagtggtatcagggttgaagctacttctcttaaacaagaagaagaattccagatgatacacaaagcatatgatttagatcgatacatgaagtttggcgaaccaaaaaaagaagatattaaaaaggaagagtttatgccagagtatcaagttaaacgtggtagaagtttaaaaatgtaa

SEQ ID NO: 32119 - DNA, 249 bp, Escherichia coli
atgatgacattacttagcactttcaactacattccagcttttattgttggtttagtaatgatgtttttatctgttaaagtagttcttttaccaatggctgatttaatcactaaaatcagagacaaaactactgatgttgctatttaccctcttagcgtttttatgggtgttccagctatcgcagtattttttgtagctgtatcttttacagtaagtatgttcgcttacatggttggattagttcactaa

SEQ ID NO: 32120 - DNA, 654 bp, Escherichia coli
atgcttgctatctcgatttacaataaaaaaggtggtgttgggaaaagtctcttcagcatcgttatctcttcttggtttggacacaacggcaaaaagacaactctgttagacctcgatccgcaaggcgggagtttgctctttgcgagcatcgcagaacaggccggaacaaaactaacgtttaacgtagctcgtaagccaacctctaaagatgttgatgtgttcgtatttgaccacagccccggcattcatagcggtggtgatggtcagcttgccccgttcgtaatcattccaactatccttgatgccagctcatacagtgctacgctcaagagcgttcaggaactacgtgaacagggtaagacagacaatgattttatcgttgttcctaatcgtgttgagatccagaacaaagaacagctcgacctgttaatcaagctacaggaagaacacagggcagcaggccatgactacgatttgccatacatcaaaaagcgtgttgcctatcctcgttcatacaacaacggcgtcaccatctttgaagacaagacaggcttaccgctggtatctgatgcccgtaaagagtttgagttgttgatggatgccgtaggtaagaaaatcaaagccggtgttgaggctcgacgcaataaaagttaa

SEQ ID NO: 32121 - DNA, 264 bp, Escherichia coli
atgttaagtattgtttatcaggatataaacgctcaagatctggatataacattatcaacagaaagaggctatgtatgtgctgagttttgcggtggtgtctatgagattagcataagaacagacataggagcaggacgctacgaagcttctgtaggtaatgagctggttatgtttaacagattggatgatgcggttgaaagcttctttgactgtatagaagaagctgtaaaagaggtaataagaagagaggggggagataactaa

SEQ ID NO: 32122 - DNA, 549 bp, Escherichia coli
atgatttcttggagtaagtttgcttatgctgaacaatctgatgatataaacgaaagtatcagtaggacgcagaaaaaagcggctcagacgcttactaacaatgcgactcacagaggttcggttttagcggaagttaagatcaatagagtcatggaacactctgatgattttgaaggaacaatagttttcaatgctatgggtatcaaacacctcaaacaacatgctcaacttgattttaacgagctttgccaatctcttgaaaaattaggaatggttgagcctgacgcaagatttacaccgaacaaagttaaggatttgggcttatcaagttcaagaactacgcgccttacgttgaagcctattgatgagctacgttctgacatgatcactacaaagaattctattcttgtgaacgatagtgagaaaacagaaggacaaaccgaaattcttaatcaaaacaatgctgatagtgagtttaacataaacaaaatacttgaagcttccgctcaatacgaagaagattattccgcttactttgatagaacataa

SEQ ID NO: 32123 - DNA, 228 bp, Escherichia coli
atgcttaccaaatactttgacattaacaagcaggataaagctggtaaaacagttctgttctatgccgttctcatggggaatactgaggctgttaagttctttatctccgcaggaggcgatgtatcaataaaagacaatcaaggcagaaaagcggcagaccagataacactacttgatcttcaaaatgcttcttcaatgtcaagagtattactatcagcagagaaataa

SEQ ID NO: 32124 - DNA, 441 bp, Escherichia coli
  misc_feature (297)..(306): n is a, c, g, or t
atgattaaaaaaatattgcttataatggcaatgctattgtatgcgacaaatgcgagtgccgatactatggattggttaactccattatcaacagactggtttatgaacaactttgtagacaaataccttaatccagaagctataggcgctttctctgggataatggcgttgtttcttcattttcttttagtattgggtggagtattagcggcttatgttttgattagtggaactatggtcacggctcatgatggtgagatgttaggtaaaaaatggtcttctatgtggcttcccatnnnnnnnnnnaacggctatgcttcttcctatgccaacaggcttttgtgctattcatatggtgatttactcattgataaaaactggaattggtttagcaggaacaatgataccaatcgccattgctttcataaccatcttttttga

SEQ ID NO: 32125 - DNA, 264 bp, Escherichia coli
atgaatatggttgagtttgatttagatagcggatttattttgtgccagaatgaagattatgattatactgaaataggaagaacttattacagcagaaatgggaatccaacattctatttgatacatgataatgaaactcactttttaatcaaaaaaaataacacaatttacaagagagtcaaaaaagaaaatatttcagaggttattccagcattgttagagcttctaaaaaaagatggtcatcaaataacaatgaaacactaa

SEQ ID NO: 32126 - DNA, 696 bp, Escherichia coli
atggaaatcgataaaataaatacatttttagctacggccattggtggtcttatatttaaatggcttataggtggcatctcagctttttggtcatggttaaacacatcctatccagaagaagactttttgatatcaaagattggaatatcaaagccaattattagacttagtctttgcaaatataagttaagcacaaaaccccatattaaaaaacataaaatatttatcgtctcatttggaattgcagtcattatgacctcagcattttgtttttataaatttacctatttcatcgccaaagaacccgtaaatttggttgaaatcacacatagagaaacaaaagattccttttggatgaaaccagaacacgcacaaaacataccatacacatctgaatggaatatcacaccagatgtatgtgttgacaagtcacagcttgataagatcacttcaatccaacaagccacaaaagatttcatttgtagctacttgctaattcctgaaaagcaagaagagttagcaaaaactacagacaagaacaaatttacaataatgattgccacccccattatttatttaagcattctatttatatttatgatagggatagcaatgttcatagatttatacattgattcaaagataaccaaatttcacaaacttgaaattgataaaagttatcaatatttgacatga

SEQ ID NO: 32127 - DNA, 237 bp, Escherichia coli
atgaagcatgaattatcaagtatgaaggcatttgtcatactggcagagtccagttcatttaacaatgccgctaaattactcaatattacgcaacctgcattaacgcgaagaataaaaaagatggaggaagatttacatatccaactatttgagcgtacaactcgcaaggttacgttaacaaaagcaggaaaaaggttgctcccggaggcgcgggaattaataaaaaaaattcgatga

SEQ ID NO: 32128 - DNA, 597 bp, Escherichia coli
atgtctaaattaccaacaggtgtcgagattagaggtagatacattcgcatctggttcatgtttcgaggaaaacgatgtcgggaaacattaaaaggctgggagattacaaacagtaatattaaaaaggccggaaatttaagagcgctgatagttcatgaaataaactccggtaaatttgagtatttaagacgttttccccagtccagcactggggcaaaaatggtgataacgagagtcataaaaacgttcggagagctttgtgatatctggacaaaaattaaagagacagagttaacaacaaacacaataaagaaaacgaaatcacaattaaaaacactcagaataataatttgtgaaagtaccctgatatcacatattcgttatagcgatatcttaaactaccggaatgaactgctgcatggagaaacgctttacctggataatccaagatccaacaaaaaaggaagaaccgtgcgcacagttgataactatatcgccctgctctgttcgctgttacgttttgcgtatcagtcgggatttatatcaaccaaaccatttgaaggagaaaaaattacagcgaaacagaataaagcctga

SEQ ID NO: 32129 - DNA, 1038 bp, Escherichia coli
atgaaatctgaagacactaattcgttacataaaatatacaatccagtgtatggacttgataatatcgtattacttgcacaagagtgtcagtctacagatccagtaaaagttaatcttctttgcttaggattcaaagaagacttacccaaagacaaagagcttgctgaaactttatttttagaattagttcattattgcattccccatccagttatagcgaaaagaaaagccttaagtcaaactgaaggcaaagatgaggcaaggctttatagtgaacttgcaagagaagcacgtagtctttttatgaaatataaattagaaagtacgttaactataaaaaaaggtgaaactcaggagaagtttgaacaacgagtaaagaatgctaatttacgttatggtgaagtgggtgagttaatatcatattgtatagcaatccattttttaaaagcagcgcaattagtctcaaaaatggctctcaaaacatcatctgaaatgcctgtttttggactggatggaatacatgcaaccgtagatgacgagggaacattaacggttttttatctagaatctaaaatgacaagagagttcaccagtggctctgaacaattttctaaatcagtaagtggttttgaaaacgatagaaagagccgtagaaatgaatatagaatactacaagatttgagcaatttagagtccctagagggagaggagcgaaagaaagcagtacaatactttgatccttattcaagtgaatcatcaaatgtcagagagcgcttcgttggaattattgtctacaatgaagaagcttataaaaataaaatagcaattgacgatgaatccccactttccatccatttagatcactttaagaaaagttatatcggtagttataaagataaagtaaaaattataacagaagacctatcaaaagcgggagcgaccccgcaaaaatgtagggcgtacatctttgcattgcctgacgttgatgcttttaaattggattttgcaaaggagttatcaggtgaacactttagctaa

SEQ ID NO: 32130 - DNA, 2550 bp, Escherichia coli
gtgaacactttagctaatgaagtcatcaaccaaataaaaagtcgtttagaatttaaaaatgatcttggctttttatttgcacactcttttttgcagaagcatacacaaacttctttctctgcacttcaaggcaaaatagaaagtgacagtgtcgttatatacaaaaggttaattgagtctgcatacttattttcccaatccgagtcagacgaggataaaaacttagctcaaagcattgcatatcatctaaatataattacaagtgataactatttaaaacaattatctgagaatttattaagggcacttggtaacttccctggagcaagttatttacaagaaaaaaatggatttataccagaaaccttttatgcttatttgaaaagatctttcattgaaaatgaaaataaagtaaaaatagccaacaaagagataatattaacgaactttcaaaagaaagtatgggaatcattacattcaaatgtcccacaagctatatctgctccaacctcagctggtaaatcgtttttagtcgtagagatgcttgccaataggataattagcggggaattaaactctgctatttatatagcgccaactcgagccttagtaaatgaaataacacaaaaatttattaaaaagactttaccatatcaaaatgaagttagagtaacatccatacctacaattaacgatgaatattataaacagatatttgttttaacacaggaaaggctgcaggtccttcttgataattttaaaaataaaatagatatagtagttattgatgaggcccaatcaatttctgacgaaattagggggatgatattacaggattgcctagacaaaataagcatacaaaacccagatgcaaaatatgtttttcttgcgcctggtgccgaaggcttcaatgatttagctgatattattgggattgatacaatccacgtagaaaaaaccaatttatctccagtggtccaaaacaaaataattattaaagttgatcctgcgaaagaaaataatttacaactatcattattagataactcaaatatattatctataggtgaattaacttcaacaagaggatttgctaatgaaaatactagattagctgctgtagctttagaattaggaaaagatgagggttctcttgtttacggaaccggagctgctaatgcagaagacgttgctaagcaaatagcatctgggttgcctcttctagaaaatgatagcgatttgaaagaactttcaaagtttataaaaaaacatgtccataaggattactctcttgcaaatctggtattaagaggggtggggtatcattatggtaaaatgcctagcttattaagagaaactttagaaaaaaactttacaaataacaagcttaagtttttagtgtgtactacaactctattccaaggggttaatcttccagcaaaaaatgtttttattgatacacctactcgagggaacagaggagaagcattagatccagcatcgctttggaatttcgcagggcgggcaggtagactaggttatgctttctcggggaatgtatatcttattgattatgatgattgggaaacaaaacctttagattctaaaatagatttcaaaattacatcatcttttaagaaagtaatcaatgaagattttgacacagtaatatcccgtttagataaaaacaatcatttaggagtaagccaatatagtaatgttgatgcagcggcgggtcttttaatttccagagcagcaaaaggcgatttacacaattttcttgagagatcttttcgaacgattcctgataaatctaagcttgaaattattgaagatgctacatatagctcactagaatctcttaatatcccccataatatattgactttaaactggactgtcgatccatttgggcaggaaagattatacaatagatttattcagaagataaaagatggtaagattgacgaacttataccacgacatccttcaggcaatgtttacactaattacgttggtgtttttagcagaataaataaatacattctcaatcataatacatctaagttttctaactacctcacagccatggcattaaattggatgagaggaaaatcccttccagagatcatatctctttcgatagcaaagaaaaaagaaaaaaattctacccgaccagtgaatgtagaccgagctgtacgagaggtttttgatttcgttgaggacaacctgcgattcaaatacgttcaacttggtaaggcatatattgatttattgcgacaagctttaattgtaaataatcaagctgaaaaagcggaagaaatatatgacttccctttatcacttgaattaggtgtttcctcaatcgctggacaagtttttattgagctggggctatcaagaatatcagcatcctatcttgaaaatataatcccaaactctaatcctacgataagcacggcaaaagagtggctaagaaacaatgattatgattcattaaatttgccactcaccatttattcagaattagaagataagggattgttataa

SEQ ID NO: 32131 - DNA, 963 bp, Escherichia coli
  misc_feature (891)..(900): n is a, c, g, or t
atggacttagaaaataaattctcatatcattttcttgagggattaacgctcacggaagatggaattcttactcaaggaaatgagcagatttatattccaccgaaagagttaggagtattgatcgtattacttgaatccgctggtcatgttgtcctgaaagatatgatcatcgaatcagtatggaaaaatattattgtaagtgatgagtccctgacaagatgtatctattctttgcgctgcatttttgaaaaaattggctatgatcgttgcatagaaacaatctaccggaaaggttatcgtttcagtggacaggttttcaaaactaaaatatatgaagataacacttcagactattccatagctatatttcctttcaccacttcattgaataccctggatccattaatacttaatcaggaattagtgcaaaacatttcggataaaaaaatcgatggcctttatacctatccgatggctgcgacaaatttttgtaatgatcacatatcgcaaaattcatttttgagaagattcaagccagattatttcgttacaggaagaataaatcagaataacgcggtgaaaactttatacattgaactgatcgacgctaaaaatcttttcctcatcgccagtaatcatcttcctgttgatgaactacataacacatcacaatttattatagataatatccttcaaacggtacataatccagagcgttccgtaagattagctaaaccggaccaaggttacaagaatcattatttatcagatgaactgttggctggtaagaaagaactttacgagtttactcctgaaagcatttacagggctatggctatatttgatggattacaaaataaaagtgatatacagacgctaaaaatagaatgnnnnnnnnnnaatagaatgttattgtctgctagcggaatgccatatgtctttggcacttcatggaaagtatga

SEQ ID NO: 32132 - DNA, 750 bp, Escherichia coli; identical to SEQ ID NO: 31507

SEQ ID NO: 32133 - DNA, 1341 bp, Escherichia coli; identical to SEQ ID NO: 31508

SEQ ID NO: 32134 - DNA, 495 bp, Escherichia coli; identical to SEQ ID NO: 31213

SEQ ID NO: 32135 - DNA, 213 bp, Escherichia coli
atgcctgaacaccataaggttagcctcttactcgttggaaatcaacacaggaggctgggaatgccgcagaaatatagattactttctttaatagtgatttgtttcacgcttttatttttcacctggatgataagagattcactgtgtgaattgcatattaaacaggggagttatgagctggcggcgtttttagcctgcaaattgaaagagtaa

SEQ ID NO: 32136 - DNA, 858 bp, Escherichia coli
atgatgaaaaaagggttttcagactcccaaattggacaacgtttagaagacctgggcgatgatttgatgcttacgtcaaaatattggcaacgttccgttaaagatgtacaagaaagtattaatcagcaaaaagcctctggaaaatggctaacagaaacacagcaagactctattgttaaattcagagaactaaacagacagctttcacagctttctgatgcaagacaagtagcattcgtagacggctttatgaaatctctcgatccaaaagtaacggaagagtttatgaaaaacctttctaatctcactccgtattttacgaagctgggagaagctacaggaagtctctttgaagctattatgaagattgtaaactggtttaatcgtaatgatgataagacagatgctattcagaaaaatatgggtgatgcaccgccattaagcaatgaagggatgaaacagaatctttctaatctcgttcctaatcaatataaaggcgctggcactgcaacaactacacctgataatagtcattctctctttaacacaattaagggattgcttttcgatgataattcttctgtgtcagatgtaaaaatgtcagtcaatgaagcaccgataaccaatctcaaacagggtgctttaaataatcttgcaatgacaactccagcttataatttatctcctgtgtttaatctgaatcctacatttgaagtggtaacagaagtgccgctaactatcgaatcagacaccggacgattgagcgattatgtggattttacagcgagagcaagtcgggatagcttcttgaaatcattaacattaaccagcttatcaggacaatccaacggcgggtaa

SEQ ID NO: 32137 - DNA, 393 bp, Escherichia coli; identical to SEQ ID NO: 22679

SEQ ID NO: 32138 - DNA, 816 bp, Escherichia coli
atgaatcagttgcttgtaattgatggcgtttctgtgcgccagtacttcgaatctaactactgtcttaacgaccttcagaaagcagctcttcttgccgctggtgagaatcgctcctcccgttcgctggaagttcacgagtttatgcgtcgtcctgaaacgaaggctcttgtggaattattggaagaagaaactacgggagattcccgtagtattcctgtcatcaccattcaggggcgcaatggtgggacgtatgtctgtaaagagctggtctatgcatatgcaatgtggatcagcccggcattcagcttaaaagtgatacgtacttttgatgcgcttcataattcatcaccagaagaaaccacatccgacaaaattaaatccggggtcattctgcttgaatcagcagcaaagactctaaatctgtcaaactcctcgaaacttggtgcataccagaaattatcaaaggtagctggtcttcctgaacttatgccgatctatgccattgatgcacctgctgatgcgccagatggttcaagccgccctacgctgtcgctgagtgcactgctgaagcagtatggtatccgcctgacggctaatcaggcatatcaccagatggcgaagctggggatcgttgaacaacgcgaacgatacagccgtaccgcgattaacaacatcaaaaaattctggtcgctgaccgcgaaaggctgcatgttcggcaagaacatcaccagtcctgcaaatccgcgcgagacgcagccgcatttcttcgaatcccgattccctgagctgttaaagctgctcgataccgttcattga

SEQ ID NO: 32139 - DNA, 366 bp, Escherichia coli
gtgaacacgtactggcgacaccccaacaaaggggcgtttgctggtaagagcctgataagcgcggcggggcgaaaattccagagcgcggcgtgtgcagcaatagttgagcagttacgtcgtctgccgaaaccaacgtcggcacctgcttcagtggagatcgtgttgtttcctccggataaccggatccgcgatctggacaactataacaaggcgctgtttgacgccctgacccacgcgggtgtgtgggaagacgacagtcaggtgaaaagaatgctggtggagtggggaccggttatcccggaggggaaggtcgagatcactatcagtaagtacgaaaaagcgagttgcaaattagcaactcggtaa

SEQ ID NO: 32140 - DNA, 435 bp, Escherichia coli; identical to SEQ ID NO: 27223

SEQ ID NO: 32141 - DNA, 783 bp, Escherichia coli
gtgaagaagcaccagaccacgttgtctgatgagctcgagcgcaagatcattcgcctgttcgcgctggggatgagctaccaggatatcagccgggagatcgaagatttatatgccttcagtgtttccacggctaccatcagtgcggttaccgataaagtcattcctgagttaaaacagtggcagcagcgcccgctggaaaaggtttatcccttcgtctggctggacgccattcactataaaatccgcgaagatgggtgttatcagagcaaggcagtttataccgtactggcgctgaatctggaaggcaaaaaagaagtcctgggcctgtatttgtcggaaagcgaaggcgctaacttctggctgtcagtattaagtgatctgcaaaaccgtggcgttgaagacattctgattgcctgcgtggatgggctgaccggcttccctgaagcgataaacagcatttatccgcagacagaggtacagttgtgcgtcattcaccagatacgtaactcgattaaatatgtggcgtcaaaacaccataaagcgttcatggccgacctgaagccagtgtatcgtgcggtgtcaaaagaagcagcggaaacggcgctggatgagctggaagcgaaacgggggcagcaatatccggtggtgctccagtcctggcgccgcaagagggaaaatctgtcagcgtacttccgctatccggcgaatatccgcaaggtgatctacacaaccaacgcgatagaatcagtccaccgccagttcaggaaactgaccaaaacctaa

SEQ ID NO: 32142 - DNA, 435 bp, Escherichia coli
gtgttcgacggtgagctgagttttgccctgaaactggcgcgtgagatggggcgacccgactggcgtgccatgcttgccgggatgtcatccacggagtatgccgactggcaccgcttttacagtacccattattttcatgatgttctgctggatatgcacttttccgggctgacgtacaccgtactcagcctgtttttcagcgatccggatatgcatccgctggatttcagtctgctgaaccggtgtgaggctgacgaagagcctgaagatgatgtgctgatgcagaaagcggcagggcttgccggaggcgtccgctttgacccggacgggaatgaagttatccccgcttccccggatgtgacgggcatgacggaggatgacgtaatgctgatgacagtatcagaagggatcgcaggaggagtccggtatggctga

SEQ ID NO: 32143 - DNA, 162 bp, Escherichia coli
atgtggcacatatacaccatggaatactatgcagccataaaaaatgatgagttcatgtcctttgtagggacatggatgaaattggaaatcatcattctcagtaaactatcgcaagaacaaaaaaccaaacaccacatattctcactcataggtgggagctga

SEQ ID NO: 32144 - DNA, 1611 bp, Escherichia coli
gtgagtagtaaagatgggaaacggagtattattgatggtcagcaacgactgacttcattaactttatttctaatttacctccataaccttcagaaagaacttaaatatgaagagaaaatagaatcaatgattttctccgagttacgtggcagcaaatcattcaatatagtagttgaagacagaataccttgcatggaagcattgtttaattttggtagctatagtttagttgatggggatgatgagtcaacccataacatggtggagagatatcagaatatcacagatgcttttcctgatgaattaaaaggtcaggcttttcctttttttatcgactggcttaagtataacgttattatggttgagatagttgcctattcagatgaaaacgcatataccatctttgagactatgaatgaccgaggattgaatcttactccgtccgaaatgcttaaaggttttttactttcacgctttcatcagggagataaacgccaaaaggcaaatgaactctggaaaaaagcgatgatggatttaaaaaactatgataaagatgaagaccaacgttttttccagtcatggttgcgtgctcaatatgctgatacaatacgcccgggtaaagctggttcaaaaaatgaagactttgaaaaaataggtacgcgttttcatagctgggttagagataatcttcaggaggtgggattggacccagataatggtgagacattcgaacgatttatacaaaaaaactttttgttttatttgaatgcctatacacaaatactgaatgctgagagagcattaacgcaccaactggaatatgtattttatatccaccattggggtattgcacctactttaagtttccctttgatgttggctccattaaatgtaggtgacagtcctgaggctgtgatagccaaaataaacctggtggcgcgctatattgaaacatttgttgttcgtcgttctgttaatttccgaaaattctctgccagttctattcgttacacaatgtacagtcttgttaaagaaattcgtggtaaaagtattgaagaattaaaagatttgttatctaagaagttatccgaaatgccagatacttttgcaggaatgaaagagtttcgtctccatggtcaaaactatcgttttgtgaagtttttgctttctcgtataactgcgtgggttgagcagcaagccggaatgagtacaaccttcattacatattatcagccagaacacggtaagccatttgaagtcgagcatatttgggccgataaatatgaacgttactctgatgagtttgaacaagagcacgaatttaacaattacagaaatcgcttaggtgatttggttttattacctagaggctcaaaccagtcatatggtgatttgtgttacgatcaaaagcaacctcattacatcaaagagaatctcctggctaaatcgttatgcccattggcatatatgaataaccctaatttcaatcagttgagaaatgtattcggattgcctttcaaaccacatgattcatttaaaaaacaagatgtcgatgaacgacagtctttgtataaaataatttgtgagaatatttgggaccataatttatag

SEQ ID NO: 32145 - DNA, 1128 bp, Escherichia coli
ttgcgttctgaaacgttttttgtcaaatttattgaacaactgaaaggtgtttcggttgaggatgatgttgaattcaatttttttgaattgggtggttccggatatctcgaaaatccaactacggatttgatggctttgtttatgggagcccagaaaatggtgccgccatggttgctcaaagcattgctatgttgcctggatgattccctcgatgttgatgaaattgatttcacttctctggagctaatgagagaggcccgaacagaagatgggaaatatattgatattcttatcagacatgatgaattcattataggtattgagcataaagttctggctgatacatataatccttttcccagctatgtaagtctcattgatagttacggcggcaacaatcaaaaactatttcgctgtatattaaagcctgacggtaacagcgctaaaggcgtagacggttggcaactgatcaattattcactgctgctggaaaccgccattcgacgtctggggttagagatgatgaatcaagagttcagcaagtggacttttttttatcaggagtttttaagtcatcttaaaaaattgagtgaggttagtatggataaggtatctgataaaaatgtggagtttgtcactgaaaatttcacagctttgataaaatcggttcaattgctggaaatgtaccaaaatgctatcaccgaggaagctaaatcggttgtctcagaggtattgcctgatattcatattgcaacaggtattaataactggaagggttactataaagcaattcatctgatgccgggatgctgggggcaaggtaaaacaggaattacgttagtttatcgcccttcagaggatggtcgagatgaagctgagttctatgtatatggatggatacattcagatgattaccctgaagttaatgcactaaaagaagaaataagagttgctttaagtgctggagatttcattccaacagctagccctgaggactatgaagtatcaattactgggaaggggaaagtgcttgaactgagtttttgggggaatacgagaagcaaaaaagatgcactggttcttcttaaggatatgactaagtggatggactcaaaaataagaacataa

SEQ ID NO: 32146 - DNA, 1182 bp, Escherichia coli
atgatttatcagtgtgatacttgcagtagaacgacttttgaggttaattgtccctggtgtagtggagtttcgcctgtaaaaacgtctgcatggggttcagcatcatcgacctcacaagcaatagatatacaacgtatgacaccattgaatccatcgttttatccagagtttcagtatcgttcaaagggtgttctaaaagatctatttgggaaaaagaaagagcaagctcagcttaatcaattgcttgaaaatgttctcgaaaaatactccagtttaaaagatccatattttactaacttcatttacacttccagattctcacataataataaatcggaagcagattactcaacagataatggtacatactccgaattacaacttttccgtgaggtgttggtcagaaaagggttcaatgagcttgaagagttacctgagctattagataaattactccttaccacgtcatttaacgctctttattatggtttcgctaaggaagttaaacggcatattaaatctacacttactgaatccttgaagtcatggattgaggaagcgggtaccacttttagggcagatctttcattgtttctattctatatatggagcaataaaatagagttctcatcagtagagttcaatgaaaaagcggaggctacgcctggtgttcctttagtttcatttgatgaagttaaaaaatacttagctgtgtgcgaacatatttattttgatattctggttgatagattagctacacggctcgaacattttaaccctaacaaattcgtcaccatgtatttagttgatgcaatggacggtttccagtttgaagatttccttgtggaagtattccagactatgggctatgacgtcaaagaaaccaagagaacgcaagatcagggggcagatctcttcgtcactcgatttggtaaggatatggttattcaggcgaaaaattattctggttctgtaggtaactcggcggtgcagcaggtgatctctgctaaaacattctatggttgtgatgaggcgatggttgtgactaattcctacttcactcgctctgcgaaagagttagctgaatcagccttggtacgtctgatcgacagggatgaactgcaaaagtatctggatgattacaatcagaagataattgaagatttccagtcaaactcgtaa

SEQ ID NO: 32147 - DNA, 717 bp, Escherichia coli; identical to SEQ ID NO: 11401

SEQ ID NO: 32148 - DNA, 240 bp, Escherichia coli
atggaatcgctctcagaaggaaccacagcaggctaccagcatatccacgacggtattattcatctggtcgatagcgcccggacggaaacggtacgtagcgttaacgcgttaatgaccgcgacgtaccaggaaattggccgacgaattgtcgaatttgaacaaggtggcgaggccagggctgcgtatggtgcgcagctaatcaagcgactatcaaaggatttatgtctaaggtataagtga

SEQ ID NO: 32149 - DNA, 1128 bp, Escherichia coli
atgcttatctttcgaaaagcttttaaaaaaaagaaagctatatttattaacaataatctatcttttcataagcgtatatctttttcgcgtgatgaatctttatttttgcttacgtcaccaaatgcaaatgtgagtggtactggttttttcccgaaacttaaaacaaatccgaaccatgttatcgctggaaatacaattagacgagttttaaatcgtgataatttagtaaatttgtatgatagagtatattcacatcaagttattgcctttgaagcattagttaaaaatgtcgaaaatagccatgttcgctctgagaactttgtatcactttactcagggattgaatcggtggattgtgaagagcagcggatgtgggctatcaatactgtaactaatgcgcataacttaaggtctggggatgaagtttatggtattgaagtagatactaatattgatggtgatgttaccggtggacactatgtaggtttatatatcgcaggcataggcgatttaactggtacagcaaactctgatggtattagagttcaaagggtgagagactctgcatcaaaatggcaatatgggcaaagaatatttgattctgttgtagggataggcatttatgatgcaactacgttttcaattgcagcccatggaaaaggtgcgatcgcaagattcgaccccaataatgatggaagttggtcatttgctcactatggcccatcaaataaaatactatggggcattgataataatggttattcatatagtgaaagattgtaccttggtgatggagttggaaaagacaaaaaaaggattaatctcgagggcggagtgtatttctttaaaagcaaaaccaaaatagtatttaaaaaattattgccaagaaccttttacgattatgattttgaggatgtgtttaatgttgatgtggaaatcgattattcacgtgcatctatagttattactcctgttatggatgcatgtgatttccctttgatgagttttattggttattatgttcgtcagcaaaaaaaattctatatcagaactataaatgttggtaatgctgaaatatctaaccttagtgtatctttgaatgtcatggtatgtgttcattcaatttaa

SEQ ID NO: 32150 - DNA, 870 bp, Escherichia coli
atgaaatttggtgttgttgttgtattatttaatccaagtgatgagaatattaaacatcttgagtatctagcaaaaaatgatatcacgttagctgttgtagataactctccagttagaaaaaaaatagagatgggaaatatatcctacatttataatcaaaacaagggagggattgctggtgctttgaataaagggatcaacgcgttaatagcaagtggatgcgaatttttctatacatttgatcaggattcgatctttgatatatcttattttaataagatgaataattttagatatcaggaaaatgctgaaattatatgccctgatttttacgatgttaactctaaaacccatggcatgttcatccagttaggtcgctggggatacagtgatgtaagaggaaagaaaacagcaagttttgccataacttcaggtatgggaatatctaaaaatgcatgggataccattggtgagtttaacgagctgtattttattgatcatgtcgatactgagtattgtttacgtgcagctaataaggggatcgatatttatgtaaattattctgtttgtattgatcatgaaattggcaagagagaaaaacataactttttaggtttgacattaaaacctaataatcataattttataaggaagtattatattgttagaaatggtacacattgtgcttttaaaatgcacaaacaatttccatcatttttcaaacttaattttctaagagttagccatgaacttgtgtgtgttattttatatgaggataataaatttaaaaaagttcattatatgattcgtgggcttaaagatgctatctttggtaatttgggtgatatcaaagaaatatacaagatttag

SEQ ID NO: 32151 - DNA, 1164 bp, Escherichia coli
atgaatgaagttaataagtcacaaaataagaagcattggcatattataatatatgtatcaacggcttttttttctatatatggagggttgtcattaatttatttagcaacaaataaatatttatttcagggatatggtctatttacaaacgatcagccttatttgtatatgcttgttgttagtttattttcattgttttttgttttttttgcttttatctcgtctactaaaaatattgtcaaagactttaggtttttaatccccaaggcattaaaaaatatgatattcatattttacgtcttggtttttatatatgcctgcattgattatgttaaccgttacagtttattttctcttagtttgaatattgctaatattaacgcatcaatgtcccaactcggatatgatgttgctcactctgatggtaaattgagctatactctgatctcgctttttccttttcttttattattttatagttatgataaaaataaaaggataaaaatattctctttttttctattttcaatttcactgtttattttatttatatctggacgaaaagagcaattgcttgctgcgattttagcacttatttttagattcaaaatcacgagaaatataaaagtaattacttttgcaggacttcctttattgatatttcttgtatattttatgaattcagtaaggggggggttatcatcggaaagcttcttttatgttttatttcaatcacaggaaagttatccactcgctcttggtgcatatttatttgtaaatccgttagatgtaccgcttgatacgttgtttaattcaacgatgccttatactatatttgttaacatgccaacaattacaggcgtcattaatcaacaattatttaaaacacatgaatatggtcctgtctattcggtattgggtttttcatattattatttccctgtttcattttttattctgtttttcattattagagcattatctctgaaagtaaatacgttattatcatggggtggtgaatatactccttttgtcgttttctattgtattaagttatttatttttttaagaaatggttatctcaatttttttacttgggatattatattttcattggcaatgttttcattgtgtttattttttaaatataaggaaggaaagtaa

SEQ ID NO: 32152 - DNA, 939 bp, Escherichia coli
atgactgtttctgttgtaattcctactataggaagggatagtgtttattctgcgttaaaatcagtgttttctcagacatataaagtctctgagataataatatgttatgacggagataatttttctgaattccaaaatggcttagatacatttttaaaattacaaaccgataattataatgtttcttcaataaacgttggtcctttttcaggtggaaatgttgcacgtcaaaaaggggtcacatattcctcatcagaatatattgcgttattagatgatgatgatatttggttgcctgatcatatagacgactatatgaaatttatccatagcaaccgaaacaaaatgatcctatgctcttgttgcgcattgattaacggagatgattttaagaactctatactcccttccaggttaattaatcctggggaattaatttcagactatttatttaaagtaaatggcattaaaatagactgtggatttatccaatcctcattacttcttttctctagagaacttgctataaaaataccatttaatcaacaattaaaatttcaccaagatatcgattggttattaagagttgaacaaagtgaagaaaaatttgagttctatcagtcacctgaaaagacagttgtatacaactctactccgttgagtgtctctaaaaaaatccagcctaataaatcttgtgagtgggctgtaaacacatttagtccaaataagaaaagatgccttggagactttattttgactcagtcttatcattacgccagacagaacgggacttttaaagatgagattttattaatcttgaaatcatttaaatatggaaagcctggtatttactcgttaattagagtgctgttaaaaattctaagagtagattgctttttagctaatataaaacatgccgcaacaactaagaaaacataa

SEQ ID NO: 32153 - DNA, 909 bp, Escherichia coli
atgaaatattatgttgcaatcccaacatataatggtggggagttatggaaaacgactgttttttctattaagaaacatactccaaaagaaactctagttcaggttatcgactcgagtagcaccgatggtaccgacagtgttgctctcaatgcaggttttgagctgctgagtatcccgggccgcgattttaaccatggaggaacgcggaatttggctgttgaaatgcatcatagtcaatatgaactggtcattttcttgacacaagatgcaataccacaaatgggattcctcgaaaaaattattgatgtatttaaggatgaacgtgtagtgtgtgcgtatggaagacaaattcctcatgatgatgctaacccgcttgctcagcatgcaagaaaatttaactacactgacaagagctacatttgtagtcaggaagatgtatcgagaatgggtttaaagacagtttttatgtcaaactcattttccgcgtatagattatctatatttaatgaaattgggaggtttccttctaatacgatactatgtgaagatatgtactacacggcaaaggctattcttgcaggatataaagtagcatatgtagcagatgcggtggtcaaacattcacataattattctccaattgatgaatttaaaagatattttgatattggggtttttcatgcgaatgaaaaatggatccgagaaaattttggtggcgctggtggcgaagggaaaaaatttatactatctgaattttcttatttatataagaatggaattttatggattcctgttgcttttattaataatttcatgaaaatttgcggttataagttagggcttatttataaaaaactccccaagaaactagtcatacgtcttagtatgcataggcgttattggttatga

SEQ ID NO: 32154 - DNA, 1428 bp, Escherichia coli
atgatactcctcagtaggaattttctggtgagtatatcacttgcgttaagtgatttcgtcagttttactatatcgatttatctagccattgcaatactatctatatctgctaacccaagtgagagcacttttaatattgggcagatcgatgggtggattttattacattggttgcttgcagtttgttgcgtaggttggtattcgattcggcttcgtcattatttttataggaaaaccttttggtttgaattgaaagaaatactgagaacattggtaatatttgccattatcgaaatagctgttatagcttttaccacttggtcattttctagagctctttgggtaattacatggatctttattctccttttagtgccgttttcacgtatattaactaaatatttgttaaataagttaggttattggcaacgtgacacttggatcattggtagtggaaataatgcaatagaggcatataaggctattataagtgaaaaaaatttgggcttgaaaattattggttttattgcaagtgaaggtggagttcgtgctggcgagactattaatggtattaaagtcatatctaatgatattgattggttgagaggagaagataagaaaactcaattcatagtggctgttgaatcacatcaaagtgaaatgcgaaacagctggttgcgtaattttatgattcagggttttcgttatgtttcagtaatccctacattgagaggaatgccacttgatagcacggacatgtcatttatttttagtcatgaagtaatgatatttcgtgtacagcagaatctggcgaaatggtcatcgcggactctaaaacgcttgtttgatataattgcatcaatagctattattattcttttatctccggtattgctttatattagcagactggtaaaaaaggatggtgggccagcaatatatggacatgagagaattgggcaagatgggaaaccattcaaatgtttaaaatttcgatctatggttacgaattcaaaagatgttctcaatgagttattacaaaatgatccagaggcgaaaagagaatgggatactacatttaaattaaaaaacgatcccagaataacaaaaataggtgcggttttacggagaactagcttagatgaattacctcagctatttaatgtattaaagggagaaatgagtcttgttggtccgaggccaattatcactgctgaattagaaagatataatgaagaggtcgattattatctgttgagtaaacctggaatgactggtttatggcaagtaagtggacgtagtgatgttgattatgagacaagagtatatcttgatgcttggtatgtaaaaaattggtctatgtggaatgatatagcgatcttatttaagacagttggtgttgttttgaaaaaagacggtgcgtattaa

SEQ ID NO: 32155 - DNA, 2166 bp, Escherichia coli
atgtcatcagtaaaaaatagaactgttgagaaagaggcagatgagatcgatttaggtcgtttagttggagagcttatcgatcatagaaaactcattatttcggttacggcgttatttactttaatcgctctgctttatgcactctttgcaacgcctatttatcaggctgatgcgttactacaagtagagcaaaagcaaggtaatgctattctgaatagtctaagccaaatgttacctgacagtcagcctcaatctgcaccagaaattgcattgttgcaatctcgtatgattctgggaaaaactgtagatgatctaaatttacaagctaagatcgaacaaagttattttccgttattaggtaaaggatgggctcgtttggtaggagaaaaaaaagggattttagttgttagccgactctatttgtcatctgatagcaacacagaaataccaaaattaaaactgaaggtaaaggacgcgaacaactatattgttacttttaatgatcacgagttcgaaggcaaagtcggggttttgctcgattcaaatggcatttcgcttaaagttgatagtattgaggctaaacctggaactgagtttgttatatcttatgttagtaagctgcaagctataactgacttacaagaaattttttcagtagcagatcaaggaaaagatactggaatattaagcctatctttaactggcccagatccacttttgctagagaaaacgctaaacagcatcagtaataattatcttgcacaaaatgtagcgcgccaagcagcacaggatgctaaaagtctagagtttttaaaccaacaactgcctaaagtacgcaatgatttagatattgctgaagataagctaaatcaatatcggcgtcaaaaagattctgtagatctttcgttagaagccaaatcagtacttgaacaaatagttaatgtcgataatcagcttaatgaattgacattccgtgaatcagaaatctcgcagctttatactaaagaacatccgacctataaggcgcttatggaaaagcgtaaaactttgcaggatgagaaagcaaagcttaatgaacgtgtttcagcaatgccgaaaacacagcaagatatcttacagttaagcagagatgtagattctgggcaagctgtttacatgcagcttcttaatcgtcaacaggaactcaatattgcaaaatctagcgctattggcaatgttagaattattgatgatgctgtttcccaaccggaaccagtaaaaccgaagaaaataataattgtacttgttgggattgttctgggaggtatggtatctataggcatagtattgttaaggatcttcttgcgtcgagggatcgaaagtcccgagcaacttgaagaacttggaattaacgtttatgcgagtatacctatttctgagacttttgctaataaggctcttcaaaatacaaaattgagaagaaaagcaggcagtgaataccagagctttttagcggttgataaccctgcggatttggcaatagaagctatccgcggtttgcgtacaagcctgcacttcgcaatgatggaagcacgaaacaatgtcttgatgatttctggagctagccctaatgtcgggaagacttttgttagctctaatcttgctgcaataattgctcaaactggaaaaaaagtactttttatagacaccgatatgagaaagggttatacccacaagttgttcaatttgagtaatgataatggactttcagatgtattgtcgggaaaaattgaagtaagtaaagcaattaaaaaagtatcttctgcaggctttgattatatttcacgaggtatggtcccacctaatccagcagaattattaatgcatcgtagattaggtgagctaataacgttggttagtcaaagttatgacatcgttatattagatacgccaccaatactagcggttacagatgctgctattattgggaattatgttggaacaacattattgatagcccgatttgaacaaaatacgacaaaagaaattgaagttagttttaagcgttttgaacagagcggtgtcattgttaaaggttgtatactaaatggtgtagtgaaaaaagccagtagttattatagctatggctatagccactatggttattcctataccgataagaattaa

SEQ ID NO: 32156 - DNA, 435 bp, Escherichia coli
atgtttgattctattcttgtcgtttgtacgggaaatatatgtcgttctccaattggggaacgttttttacagaaagccttgcctacaaagaaaattgattctgcagggactaatgcattgataggccataaagctgatgatagtgcaattaagattgcggaaaaacatggtatttcattagcggaacatgtaggacgtcagtttacttcttttattggtcgacaatatgatctgattttagtaatggaaagatatcatattgaaaaaattggacagattgccccagagttgagaggtaaaacaatgctttttggccaatggcttaaccaaaaagaaattcctgatccatatcgcaaaagtgatgaagcatttgcatctgtatatcagttaatcgagttagctggcttacgttgggttgagaaattaggcgcataa

SEQ ID NO: 32157 - DNA, 1137 bp, Escherichia coli
atgaagaaaaaacttgttagattttcggcattagcgttggcaattgggtttttatcgggttgtacggttataccaggtcaagggttaaatactctgcgtaagaatgtggttgaactaccagacagcgattacgatctggataagctggttaatgtttatcctatgaccccaggactgatcgaacagctccgtcctgaaaccgtgctggctcgtcccaacccgcagctggataatttgctgcgcagttacgaatatcgcattggggttggtgacgtactgatggttacggtatgggatcacccggaattgactactcctgctgggcaataccgcagcgccagcgacacaggtaactgggtaaactccgatggcaccattttttatccatatatcggtaaggtgcaggtggcaggcaaaacattaagccaggtacgccaggatatagcaagtcgtttgaccacttatattgaaagcccgcaggttgatgtaagcgtagctgcgttccgttcacaaaaggcctatgtgactggagaagttgaaaaatcaggccagcagccaatcactaatatccctttaacagttatggatgcgataaacgctgccgggggactatccgaaaacgctgactggcgtaatgttgtgctgacacataatggtaaagatactaaaatctcactctatgctctaatgcaaaaaggggatttaaccgagaaccggttgctatatccaggagatattctatttgttccacggaatgacgacttaaaagtattcgttatgggtgaggtgggcaaacaaagcacaatgaagatggatcgcagtggcatgacgcttgcagaggcactgggtaatgctgaaggtatgtctcaagccttcagcgatgctacaggtgtttttgttattcgccaattgaaaggtgataagcaaggtaaaatagcaaatgtttatcaattgaatgctcaggatgcttcggcaatggtgctcggcactgaatttcagctacaaccctatgacattgtgtatgtgacgactgcgccacttgttcgctggaacagggtcatttctcagttggtaccaacgatcagtggcgtccatgacatgactgaaaccgttaagtttgtcaaggatatgcaataa

SEQ ID NO: 32158 - DNA, 1434 bp, Escherichia coli
atgataaaaattgcgcgcattgccgtgacgttgggtttgttttcctccctgggagcccaggcttacgcggccgggttagtggtaaatgacaacgacttgcgtaacgacctggcctggctttccgatcgcggggtcatccatctgagcctgtcgacgtggccgctgagccaggaagagatcgcccgggcgctgaaaaaggccaaaccttcctattcttctgagcaagtggtgctggcccgtatcaaccagcgattgtctgctttaaaagccgatttcctggttatcggctacacttcaaccgaccagccgggcaccccgcaggggtttggtcagacacagccagcggataactcgttaggcctggcattcaacaacagtggcgagtggtgggacatacacctccagggtaacgttgaagggggagagcggatcagcaacgggtctcgctttaacgccaatggcgcctatggcgcggtgaagttctggaaccagtggctctcctttggccaggttccgcagtggtgggggcctggttatgaaggcagcctgatccgcggggatgcaatgcggccgatgaccggctttttaatgcagcgtgccgagcaggcggcaccggaaacctggtggctgcgctgggtgggtccatggcagtatcagatctccgccagccagatgaatcaatatactgctgtgccccatgccaaaattatcggcggacgcttcacatttacaccgtttcagtcattagaattaggcgcatcgcgtattatgcagtggggaggggaagggcgccctgaatcgttcagcagtttctgggacggctttaccgggaaagacaacacagggacggataacgaaccggggaaccagctggccgggtttgattttaaattcaaactcgagccgaccttgggttggccggtgagtttctacggccagatgatcggtgaggatgaatcaggttacctgccatcggccaacatgttcctgggtggggtcgaagggcaccacggctggggtaaggatgcggttaactggtatgtggaagcgcatgatacgcgtactaatatgagccggaccaattacagctataaccatcacatctataaagatggttattaccaacaagggtatccactgggcgatgcgatgggcggggatggtcaactcattgccggtaaggttgagcttattacggaggataaccagcgctggagtacgcgcttagtatacgcgaaggttaacccggagaatcagtcgatcaacaaagcgttccctcatgcggatactctaaaaggtgtacagctgggctggagcggcgatgtttatcagtcggttcgtctgaatacctccctgtggtacaccaacgctaacaacagcgacagcgatgacgttggggccagcgctgggatagaaataccgtttagtttataa

SEQ ID NO: 32159 - DNA, 897 bp, Escherichia coli
atgaatatggcgaatttgaaagcggttattccggtcgcaggactaggcatgcatatgctgccggccacaaaggcaattccaaaggagatgctgccgatcgttgataagccaatgattcagtacatcgttgacgaaatcgtcgccgccgggatcaaagagattgttctggtgacgcactcctcgaagaacgcggtggaaaaccacttcgacacctcctatgagctggaagccctgctggaacagcgcgtgaagcgccagctactggcggaagtgcaggccatttgcccgccgggcgtgaccatcatgaacgtgcgtcaggcgcagccgttgggcctgggacattccatcctctgcgcccgcccggtagtcggcgacaacccgtttgtggtgctcctgccggatatcatccttgacggcggcaccgctgacccgctgcgctataacctcgcggctttgatcgcccgctttaacgaaaccggccgcagccaggtgctggcgaaacgcataccgggcgatctctccgaatactccgtcatccagaccaaagagcctatggtggctgaaggccaggtggcgcgtatcgttgagtttattgaaaaaccggacgagccgcagaccctggactccgatctgatggcggtggggcgctatgtgctgtcggcggatatctgggccgaactggaacgtaccgagccgggtgcctggggccgtatccagctgaccgacgccattgccgaactggcgaagaagcagtccgttgacgcgatgctgatgactggcgaaagctatgactgcggtaagaaaatgggctatatgcaggccttcgtcacctacggaatgcgtaacctgaaagagggcgccaaattccgcgaaagcattaaaaaactgctggcctga

SEQ ID NO: 32160 - DNA, 852 bp, Escherichia coli
ttgaacaatatccccatatctactcaatggactttagacgctacgggtgaagttggacgctcatcagtaaattctgtttatatgattatatgtcctgcgaccggctcgaaaggatctggttttttaatagataatgggttaatagtaacgaacgagcatgttatcactggatgctctacaaatcagattttcgcaatttcagcttatggacagaagattccaatttctcaaaaatggatagattctgatcgcgatttagctgtgctgagacctgccattacccagactggtgggctaagtattgttaaggataatgatcttaaagttggtgaatcagtaacaacttggggatacccattaggatacaacggtcctgcaccgttactatccgttggttatctagcaggatttaactcataccaaaccgccaagggacaaaaaaaacatctagtggtaaatggggcatttaactcaggaaattctggtggagctcttttaaaagcttcagataataaagtaataggtattgtagtgagtaagcatgctcctatcagtcaataccatcaatcagctattgaagctttgtctgaaaatatgagtggcgtcacctataccgctactaatgacgctggagaaactaaaagttttgtagaatctcaaattgtagcagaattattgattcatatgagaagtctaactcaagttatgattggagaagcaattgcagcagaggaattactttcgatgcttagcgaaattgacttgagtccaccacaatctatgtcaagaaatgccttatgtcattgcgggagtggaaaacgcttcaaagaatgtcatggaaagatatcctag

SEQ ID NO: 32161 - DNA, 222 bp, Escherichia coli
atgtttcattgtccgaaatgccatcatgccgcccacgcccgcacgagtcgctattttactgataccacaaaagagcggtatcaccagtgcacaaacattaactgcagctgcacgtttgtgaccactgaaacagtcgagcgttttatcgtgtcgccgggggaagtagtacccgcgccgccgcatccgacatcatcaggtcagcaacaaattcactggatgtga

SEQ ID NO: 32162 - DNA, 1164 bp, Escherichia coli
atgataacgggaatgactattcaggccggggcgcgcattgctcctgattttatgctcacgctcggtggcgcagatatcacacagaatttcagcgaccggcttatcgggctgaccatgaccgacaatcgcggattcgaggctgaccagcttgatatcgagctcgatgataccgatggactggtcgagctgccgccgcgcggggcatcgctgaccctgtggctgggctggcagggctcggcgctgattaacaaagggagttttacggttgacgaaatcgagcaccggggcgcgcctgacaggctgactatccggggacgcagtgcggattttcgcgggacgctgaactcgcgccgcgagcagtcatggcacgacaccacgctcggggtgattgtcgagactatcgcgcagcgtaacaaactgacggccagcgtggctgataccctgaaagctgttgctgtgccgcatattgaccagtctcaggaatccgacgcggcgtttttgtcccgactggcggatcgcaacggggcaacggtttcggtcaaggccgggaaattgttattcctgaaagccggtagcgcgatgacggccagtggtaaggccatcccgcaaatgaccgtcgaacgcggcgacggcgaccggcatcagtttgccatagccgaccgcgaggcatactccggcgtaaccgctaaatggctgcacaccagagacccgaaaccgcaaaagcaaaaggtgaagctcaagcgcaaacccaaagagcagcacctgcgtgcgctgcagcacccgaaggttgctaaaacatcggcaaaggctaaaaagaagaaggtgcaggaagcgcgggaaggtgagtatatggccggtgagtccgacaatgttctggaactcacgaccatctacgcgacaaaggcgcaggccatgcgcgcagctcaggcaaagtgggacaggatacagcgtggggtggcggagttttcgatcacgctcgccactggccgcgctgatttatttcctgaaacgccggtggcagtgaaaggctttaagcgcgttatagacgagcaggcgtggataatcagtcgtgtggtacacagcctcaacgggagcggcttcacgacgggcttagagcttgaggttaaggtttctgatgtggagtatgaaagcgaggaagtttaa

SEQ ID NO: 32163 - DNA, 465 bp, Escherichia coli
atgttaatggggctgggctttttcgtgtttgaacggcgcaccctgccgcatcagtcaatgcagtattcgaaggactaccgctgggtgtcaaatgaccgtatcggaaaacccccggcttatcagtatctcggggagggggaaacctcgcgtaccctgtcgggcacgctttaccctgaaatcaccggcgggcgtctgtcactgatggccatcgaactgatggccgatgaggggcgcgcatggccgctgattgacggaaccggcatgatccacgggatgtatgtcatcgataaagtgactcacaaccacaccgagttattcagcgacggcgcggctaaaaaaatcgagtttagcctgtcgcttaagcgggtggatgaatccctcgcggccatctacggcgacctgaaaacgcaggctgataatctggtcacgtctgccggtaactggctcggggggctggcgggatga

SEQ ID NO: 32164 - DNA, 2442 bp, Escherichia coli
atgagcaataacgtcagaatcgaggtgctgctgaacgcagttgaccgggcaagccgcccgcttaaagcgattcagaacgccagcaaatccctgtctggtgatatccgcaattcacaaaaaagcctgtgcgaacttaatgtgcaggcgtcccgtattgacggattccgcaaagccagcgcccagcttgccgtgaccggtcattcgcttgagaaagcgaaacaggaagcgcaagcccttgccacacaatttaaaaacaccgagcgcccgacgcgcgcgcaggcgcaggtgcttgaatcggcaaagcgtgccgccaacgggctgcagacgaaatacaacagcctcactgagtctgttaagcgccagcaacgtgaactcggtgcagtcggtattaatacccgtaatctggcaaatgatgagcgggggcttaaatcgcgcatcagtgagactaccgcgcagcttaatcggcagcgtgaggcactggcgaaagtcagcgcacagcaggcgaagttaagccgggtgaaagcgcggtatcaggccggtaaatcactggccggaaacgcggcggcggctggcgcagccggtgttggtattgcgacggcgggaaccctcgccggggttaagctgctgacgcctggttatgaatttgcacagaaaaactcagagctgcaggccgtgctcggtgtcgacaaacagtcgcctgaaatgcaggcgctgcgtaaacaggcgcgccagctcggtgataataccgctgcctctgccgatgatgcggcgggtgcgcagattatcattgccaaaagcggcggcgatgcggcggccattcaggcggcgacgccggtcacactgaatatggcgctgtcgaacaagcgcacgatggaagaaaacgctgcgctgctgacaggcatgaaatctgcttttcagctctctaacgataaagtcgcgcatattggtgatgttctctcgatgacgatgaacaaaaccgccgccgactttgatggaatgagtgatgcgctgacctatgccgcgccagtggcgaaaaatgccggggtaagtatcgaagaaaccgccgcaatggtgggggcgctacacgattccaaaatcaccggctcgatggcgggtacagggagtcgtgccgttctgagtcgcctgcaggcgccaaccggtaaagcgtacgacgccatcaaagagctcggtattaaaacgtcagatagcaaaggcaatacgcgcccgatattttccatcctgaaagaaatgcagcgcagttttgagaaaaacaatctcggaacgggtcagaaatccgaatacatgaaaaccattttcggtgaagaggccagctcggcggccgccgtgctgatggccgccgcatcaagcggcaagctcgaccagctcaccgccgcgtttaaagcctcagacggtaagactgaggaactggttaaggttatgcaggataacctcggcggcgactttaaagagtttcagtcagcctatgaggcggtcggcactgacctgtttgatcagcaggagggctcactgcgtaagctgacgcagacggccacgcaatatgtgctcaggctcgacggctggatccagaaaaataaagggctggcgaccaccctcggcgtggtggttggtggtgcgctggcgctgatcggtgtgatgggcgggattggccttgtcgcatggccggtggtgatggggattaatgccatcattgcggcggctggcgtgctcggtgtggttttcagtacggtcggcggcgcgattgtcacggccattggcgcaatcagcctgccggtgctggcggtagccggtgcagtggtggccggtgcattgctgatccgcaaatactgggagccgctcggtgcattcttctcgggcgtggtggagggactgaaagccgcctttgcaccggtgggggacatgtttaccccgctcgcgccggtgtttgacgccatcgctgaaaagctgggtgtcgtctgccagtggtttaaagacctgcttgcgccggtgaaagccacgcaggacacgctctccagttgcaaaaatgtcggcgttacttttggtcaggcgctggctgatgcgctgatgatgccgctcaagatgtttaacagcctgagcggcaaggtcggctggctgctggagaaactcggcgttatcaaaaaagaatccagcgacctcgaccagaccgcagcgaaagcgaataaggcgtccccgaatggcgggtatatccctgcgaccgcaggttatggcgggtatcaggcgtatcagccggtcacagcgcccgcaggcctgtcttatatcgaccagagcaaaagcgaatacaacatcaacctgcagggcggagtcgcaccgggcagtgaccttgaccgccagctccgtgacgcggtcgacaaacttgaccgcgagaaacgtgcgcgtcagcgatccagtatgagactcgactga

SEQ ID NO: 32165 - DNA, 315 bp, Escherichia coli
atgaaaaatatcaatgagactgctgttgctgacactgagaacgtcaatccgaatgtcgttatttttgacaccccgctgatgcgcggtgagcagaaagttgagcaggtcaccttaaccaaaccgaatgcgggaaccctgcgcggggtgtcgctggcgtcgctggcaaattccgacgttgatgcgctgattaaggtgctgccgcgcatgacatatccggcactgaccgagcacgagctcgcgcgtctggatgcgtcagacctgatttcactggccggtaaggtggtcggttttttgtcaccagcttcgggtcgctga

SEQ ID NO: 32166 - DNA, 519 bp, Escherichia coli
atggcgttaccccgcaaactgaaatacctgaatatgttcaacgatggcctcagctatatgggcgttgttgaatccgtcaccctgccaaaactgacccgcaagctggagaaatatcgcggcggcgggatgccgggggcggtgtcggttgaccttggcctcgatgacgatgcgctgtcgcttgagtggacgctcggcggtctgcctgacattgaattgtgggcgcagtacgcctcaccgggtgctgacagcgtgccgctgcgttttaccggctcttatcagcgtgacgacaccggcgcgatttctgccgtcgaggtggtgatgcgtggccgtcataaagaatacgacggcggtgaaaacaagcagggcgaaagcggtacaaccaaaatggcgaccgagtgcgcctattaccagctcacgatcgacggcaaagaagtcatcgagattgacgtgatcaacatggtgctgaaagtcgacggtgtcgaccgtatggcagagcaccgcaaggtgattggcctgtaa

SEQ ID NO: 32167 - DNA, 1194 bp, Escherichia coli
atgagtgactatcatcacggcgtgcaggtcatcgagattaacgatggcgtgcgcaccatttccaccgtttcgacggccatcatcggcatggtctgcacggccagcgatgctgacgaaaaaacatttctcctcaatgagccggtgctcattacgaacgtgcagagcgctatcggtaaggccggtaaacagggctcgctgtcggcgtccctgcaggctatcgctgaccagtgcaagccggtcatcgtggccgtgcgtgtggccgaaggtattgaagatccggagaaccccgaggcggcgcacaaacagaccatttctaatatcatcggcaccaccgacgaaaacggcaaatataccgggctgaaagccctgctgacggcgaaaaccgtcaccggcgttaagccacggattctcggcgtgccggggctggattcacaggaggtggcgaccgcactcgcgtccacctgtcagagcctgcgcgcctttggctatgtcagcgcatggggctgtaaaaccatttccgaggccatcgactaccgcgagaatttcagccagcgtgagctgatggtcatcttccctgattttctggcatgggacaccacggcgaacgcgactgcgacagcctgggcgacggcgcgcgcgctcggcctgcgtgccaaaatcgaccagacggtcggctggcataaaaccctgtctaacgttggcgttaacggtgtgaccggcgtcagtgcctcagtatcgtgggatttgcaggaaccggcgaccgacgccaacctgctgaatcaggccggtgtcaccacgcttatccgcaatgatggtttcaagttttggggaaaccgtacctgctcggatgatccgcttttcctgtttgagaactacacccgcaccgcgcaggtactggccgacacgatggcggaggcgcacgcgtgggcgatggataaacccattaccccgaccctcattcgcgacatcgtttccggtatcaatgccaaattccgcgagctgaaaaccagtggttatatcgttgacggcttctgctggtacgacccggagtcgaacgacaccgcgaccctgaaagtggggaaactgtatatcgattacgactatacccccgtcccgccgctggaaaacctgaccctgcgccagcgcatcaccgatacctatctggcgaacctgtcggactcggtcaacagctaa

SEQ ID NO: 32168 - DNA, 579 bp, Escherichia coli
atgacgtttaaaatgaccggagaaagccggactatcactgtgtataactttcgtgcagacacctgtgaatttattggaaaaggtgacgccctgataccggcatttaccggattgcccgcctgctgcaccagtgaaaagcccccggaaacccgagacggatttattccggtttatgacactgaaaatggttgctgggctatcactgaagaccaccggggtgaggttgtctatgacaccgaaacaggtcatgagagggagataaccgagccgggtcagtatccggcaggaacaacaccggttgtgccggaaaacccgtggcagaaatgggatggtaaaacatgggttgatgatgctgatgctgcacgtaatgcattgacagaggctgcgaaaaacaacaaaaacaggcttcttaaacaggccaatactgcggttgcgacattacaggactccgttgatctggagatggcaaccgacgatgaaaaaacgcacctcattgcatggaaaaaataccgtgttttactgagccgcatccagccggaggatgctccggatattgaatggccgccgctgccagtctga

SEQ ID NO: 32169 - DNA, 1686 bp, Escherichia coli
atgacagtgaaatataaaaccgttatcacccgagccggtgcggaaaaactggcggcggcgacgctcccgaacgggaagaaagtcaattttgctgtgatggccgtcggggacggcggcggaaaactgcccgaaccggacgccagccagacaaaactcgtcaatgaggtctggcgtcatgtcctgaacaaaatcagccaggacaaaaaacataaaaattatgtcgtggcggagctggtgatccccccggagaccggcggtttctggctgcgtgaaatggggctttacgatgacaccggcacgctgattgcggtcggcaatatggccgaaagctacaaacccgagctggcggaaggatcaggtcgtgcgcagacgctgcgtatggtgatcatggtgagtgatatcgacacggtcgagttgtccatcgataccacgctggtgatggcgacgcaggattatgtcgacgacaaactcgcagagcatgagcagtcccgccgccatcctgacgccacgctgaaagaaaaagggttcacgcagttaagcagtgcgaccgacagcacgtctgaggcgctcgccgcgacaccgaaagcggttaaggcggcgtatgaccttgcgaaaggtaaatactcggctcaggatgcgaccacggcgcagaaagggattgttcagctcagtagcgccatcgacagcgtgtctgagacgctcgccgcaacgccaaaagcggtgaaagcggcgaatgataatgctgatggccgcgttccttcctcgcgcaaaattaacggacactccctgaatgctgacaccagtgttacctcgcaggatattttcgacgaccaggctattgggctggtaacggaggatttagacacccttaaaacgccgggtatttactttcagccagcgaattctaatacctcagccgccagacattaccctgaaaataacgccgggacgctggtcatttataaaaatgccggagtgactcaggtataccgggtttataacagctcccggagctactcgcgcagtcagtattcaacaggcgcatggacaccgtggacgcctgatgatgtttttccggtaggcgctcccgttgcgtggccgtctgacagtgttcctgctggctatgccgtcatgcagggacaaacttttgataaagccgcgtatccgctgcttgctgtggtgtacccatcgggtgttattcctgatatgcggggctggacaatcaaaggtaaacccgcaagtgggcgcgctattttgtctcaggagcaggacggcattaaatcgcacgcccacggtgccagcgcatcgagcaccgatttagggacgaaaaccaccagtgcttttgaccacggaacgaaaaccaccacgacctttgactacgggacaaaaaccactaatgcaaccggcaaccatgcgcacacttttaccgtacaccggggagatcaggccgggggacaggccgccgacggtaacgaaatagcgacgggaacgaaaacaacatcaactgcaggtaatcacgcgcataccgtggcgattggtgcccacaatcataatgtcgggattggcgcacactcgcactccgttgctattggcgcacacggtcacaccattacgatcgccgcgtcgggtaatgcagaaaacaccatcaaaaacatcgcatttaactatatcgtgagactcgcataa

SEQ ID NO: 32170 - DNA, 531 bp, Escherichia coli
atgagtgatacccgtctgctgccggtgggctcgtcgccgcttgaggtggcggcggcgcgcgcctgcgcggatatcgaaaatacgcccgtcccgctgcgtcgtctatggaaccctgacaactgccccgcgaatctgctgccgtggctggcctgggcgttttcggttgatcgctgggatgagagctggccggaagaaaccaaacgcgaggttatccgcagcacgtggtttatccatgcgcataaagggacgataggtgcggtgcgtcgtgtggtcgagccgctcgggtatctgattaacgtgacggagtggtgggagacgaacgaccccccgggcacgtttcgccttgatatcggcgtgctggagaccggtatcaccgaggaaatgtattacgaaatggaaaggctgattgccgatgcaaagccagccagccgccatcttattggcctgaatattatccaggacataccgggttatctcttcaccggagccctgacctgggacggcgacatcatcacggtttaccccggataa

SEQ ID NO: 32171 - DNA, 909 bp, Escherichia coli
atggctattgttgacctgagccagctcgccgcacctgatgttgtggaagagttggattatgaaaccatcctgacagagcgaaaggtgacgctcgtctcactctatcccgaagagcaacaggacgcggtagcgcgtacgctgacgcttgaatctgagccgattgtgaagctgttgcaggaaaatgcttatcgggagattatctggcgtcagcgggtgaatgagtcggcacgggcggtgatgctggcttacgctgccggtcatgaccttgataacctcggcgcaaattacaatgttgagcgtctcgttattacgcctgctgatgagaccacgctgccgccaacgcctgccgtcatggaatcggacaccgattaccgtctgcgaattcaacaggcttttgagggaatgagcgtggccgggtcgaccggtgcgtatcagtttcatggccgcagtgctgacgggcgggtcgccgatatttctgttatcagcccgcagcctgcctgcgtgaccgtgtcggtactgtcccgggagaataacggcgcggcatccggggaactgctcgccgtggtgcgtaatgctctcaacgatgaggatgtgaggccggttgctgaccgcgtgaccgtgcagtcggcggtcattgtcgactacaccatcgatgccgcgctttatctttatcccggccccgaaagcgagccggtgctcagtgcggcaaaagcgaagctgcaggcttatatcaacgcgcagcaccggctcgggcgcgatatccgcaagtctgccatctatgccgcgctttacgtcgagggggtgcagcgtgtcgaacttgtcgcgccggtcgctgacatcgtactcaatgagacacaggcgtcatattgcactgcttacagcgtaaacatcgggggcaacgatgagtga

SEQ ID NO: 32172 - DNA, 351 bp, Escherichia coli
atgacggtgcgttatctgggaatgaacagccagaccggcctcagtatttctgaagttgagcacatcaggcaaagcgtgcgcgacattctggtcacgccagtgggctcgcgcgtcatgcgccgcgaatatggctcgctgttgtctgcactgattgaccagccgcagaccccggcgctgcgtctgcagattatggccgcgtgctactccgcgatccagaggtgggaaccgcgcgtcagtttgtcgaccatcaccgttgaacgcggagaggatgacggcgcgatgtacgtcgatatgaccggcacgcgttcggcatcaggccagcctttttctatcacccttccactgagttaa

SEQ ID NO: 32173 - DNA, 642 bp, Escherichia coli
atgaataatttaaattctttacaggaaatcgctcgggcgatccgcaaccttatccgcaccggcattgtgaccgacgtcgaccccgtcgaggggctttgtcgtgtacagaccggcgggatgcaaaccacctggcttaactggctgacctgccgcgccggccgctcgcgggtgtggtgggctccttctgttggcgagcaggtgctcattcttgccattggtggcgagctggacacagcctttgtgctgcccggcattttctctgatgaccatcctgcgccgtcggcctcgtccgatgcgtttcacgtcacttttcctgacggggcggttatcgagtacgaacccgaaaacggggcgctcaccgtatccggtattaaaaccgccgacgttaccgcgtcggagtccattaccgccatcgtgccggtggtgctagtgaaagccgaaacccgcattaccctcgatactcccgaggtggtgtgtaccaacaagctcatcaccggcacgctcgaggtgaaaaaaggcgggacgatgtcggggaacatcgagcacaccgaagggaaatttacctcaaacggcgtgcaggtcgatgcccacgatcatggtggcgtggagccgggcggaaactggacgaagggggtcaaatga

SEQ ID NO: 32174 - DNA, 579 bp, Escherichia coli
atggaaaatactgaatactatgatggatatcgttcattatttttatccttaaaagaaattattaaggagacggagcaacaggctatccttgaggaaaatgaattcttcaataagaacattaatttttttgttaaatcgtatcttattacactctgcacttatttagagtcgtatttgactgaggttgcaacatggcactgcgataccatcaatcgcaggctcaaagcagcctgcttgccacacaattttttgctttggcgagtcaaaaaagatgttaaagataaggagttgaaatatatagatgctgatttaaaggttgagaaaagtgaggtgtcggatagcctgtctggtaatccttacaagacgattaaggcattttcttatttgggtgttaatcttttgaattcggcggaatttaatgcgaataaggatgttgtgaatgcagtggttgtaaagagaaataacattattcatcataacgacaatgcaaatgatattagtctcactgacgtaagtggttatgtagatctgtttgtatcctatatggctgcgatagataatatggtttgtggaaaataa

SEQ ID NO: 32175 - DNA, 1050 bp, Escherichia coli
atgtctaacgatgataaaacattgaatttattccccatagattatccatttgagactttatgttctaggatgaagtccaatcccatcaaactaaaactgaatccagactttcaaagaaagtacaaatgggatcaggacggatggctgcgatcttcaaaattcattgaatcttgtttaatgcgtattcctcttccatcttgttactttgcagaagatgatagcggcaatcatattgtaattgatggtgttcagcgattaaccacaatacagaaattttttgatgacgagttcgctttggagggaatgactacatttaaagagcttgaagggaaaaagttttctgaattaggatctctacgttcagagttagagtcgacaacaataagatgcattgttctaagaaaagaaaatcccaaaaaattaataagagagatattttctagactcaatcagggggcagttaaactttctgatcaagaaataagacatgcgttatatccgggagggtttgatgaattattagaagagttaggtaatattgatgccattaaaaattttggtttggcggaaacaactacagtaaaaagagatagtcgtgagccagacgaacaagttttgcgtttttttgcattttatgaagataacttttttgattactttgatagctccttgaaagaattcttggatgatcatatggaaaaattttcagacttaaaagatgatgaactgaatattatgagggagagattcaaaacatcattatctaagtgtgaaaaaatatttggtgaagatgtatttacaaaccctacagttaggagaaaacgtaaagggttagttcattatgacattttaatgcctacaattggcaagttaaatgatgatattgtaaatgaaaagtccgaacaaatacggaatgcttggtttactctttgttcaagtgctgagttcaaaaaaactttatcaggtgggctacagaataagagttcggtgatgaagcgtagggctagttgggtggcacttcttaaggaagttattgatggaaaatactga

SEQ ID NO: 32176 - DNA, 447 bp, Escherichia coli
atgaatgaatttaagccttttgatgacaaacttgcggggttgattgcggcaatatcaccggcgggtcggcgtaagctggccgctgaaatagcaaagcaactgcgcagatcgcaacagcaacgcatcaaacagcaaaaagcgcctgatggcacgccgtatcaggcgcgaaaacgccagccgctcagagcgaagaaagggcgtattaagcggacgatgtttcagaagttgcgaacgaaccgctacatgaaagccagaggccgcgatgatgcagcggtggtcgagtttaccggcaaggtgcaacgtattgctcagattcatcagctcggacttaaagaccggccaaacccacatgctcaggacgtgcaatacccagaacggcagttgcttggtgttgactttggagacaatttgttgattgaaaaattggttattgaacatctaaattga

SEQ ID NO: 32177 - DNA, 468 bp, Escherichia coli
atgcagaaaatgaaaagcctgcgcaaagcgctgaatgacgccgtccctcagatcctgaataaccccgagatgatgcgcatctttgccgatgaggggaatatcgatgcgcgtctcgcagactcgctgtctcatgaaaagaattacaccctgaatgtgattgtctgcgattttgtgggcgaccctgacctgattttcgtgccggtggcggtgtggctgcgtgagaaccagccggatatctgcacgctggatgaggggcgcaaaaagggctatcgattccagatggatttaaacgacggtgataatgtggatatcagtatcagcctgcaactcaccgagcgcaccctcgtcagagatgaaaacggcgcgttacacgtcagctatgcgcctgaaccgccattacctgagcctgtcacgcgaccgactgagctgtatatcaatggcgagctggtgagtaagtgggatgaatga

SEQ ID NO: 32178 - DNA, 159 bp, Escherichia coli
atgccgggaagcgaccccgtcaataacggtgatctgagtgccgatattcggaggcttgagcacgcgctcaccgcctgtgcaattaaggtcgaaaccatcaaagactgtcaggataaaatcgatgcagaaaatgaaaagcctgcgcaaagcgctgaatga

SEQ ID NO: 32179 - DNA, 426 bp, Escherichia coli
atgaaagtgctgatgattctgctggcagggttgctcgccatggtgctgtggctgcgccacgataacgtgaacttatcccggtcttttgagaaagcgagccgcgttgccagcgagcaaaagacgacgattggcatgctgaaaaatcagcttgccgtatcgcagcgaatcgcaagtgcgaatgaggatgcgcaggtcaggctcggtgatgagctggccgttgccggtgagcaggcggtaaagcgggaagaaaccataacgaggttgatgaatgaaaacgagacgttacgccgctggtacagcgataagctgcctgatgctgtgcgtcggttgcacatccgaacgggctgcgcctccgccgcccgttgtttacaacgcctgcccgaaggtgagtctctgcccgatgccgggaagcgaccccgtcaataa

SEQ ID NO: 32180 - DNA, 510 bp, Escherichia coli
gtgagctcaatcattaaacgctgcagtgtggccgccgtgctggcgctggcggcactggtgcctgattttcgtctgcttaacacctcgcccgaggggctggcactgattgccgacctcgaaggatgtcgcctgacaccttaccagtgcagcgcgggagtgtggacgtcgggcatcggccacactgccggggtggtcccgaaaggggatattaccgaacagcgcgcggcggagaatctcattgccgatgtgctcaacgtcgagcaacggctcgcggtctgtgtgccggtggatatgccaccgcgcgtctataactcgctggtcagttttgcgtttaacgtcggaaccggtgcggcctgtcggtcgactctggtctcttatatcaagcgtcaccagtggtggcaggcatgcgaccagctcacccgctgggtgtatgtcaacggcacaaaaaataaagggctggagaaccgccgtgcgcgggagcgggcttactgcgtaaaggggatgcaatga

SEQ ID NO: 32181 - DNA, 222 bp, Escherichia coli
atgggactgagtgtggaaaaaatcacgacgtttttcgcttactggctggccgtggggctggcgtatttcggggctatgtcccccgaaaagctggcgctctatgtggggagtgcctgcgccatttttaccgcgctgacgaattactggtttaagcgtaaaacctaccgctacctgacctcacttggacccgataagggggctgcccgtgagctcaatcattaa

SEQ ID NO: 32182 - DNA, 189 bp, Escherichia coli
atgcagggtgacaccctcgatgcgatttgcgcccggtattacgggcgcactgagggcgtcgttgaaacggtgctgtgggcgaatccggggctgtcggagctgggcgttattctgccgcacggcacgacaatagaactgcccgaaaccgacagcgccccgaaaactgaaacggtgaatttatgggactga

SEQ ID NO: 32183 - DNA, 507 bp, Escherichia coli
atgacgacagtgattattgagccaaaaaaagagccgcaggacgtgccgggcgtggtcattccgccaccgggcgtgagtgaacctgtaataaaaaacaccttcttttttcctgatgtggatccgaagcgtgtgcgtgagctgatgcgtctggagcagaccgtttccgcgctgcgcctgaatgatgcgattaaagccggtatggctgaaaccaatgcggagcttgctctgtggcgggttgagcagatggccgcagggcatgacacgctggctgatgtgcctgccgatgatatcgatggcgaaagcgtgcgctgttttcactatttccgcgccgtctgcgccatgaccagcgccacgctgtttgagcgttatcgcggcatcgatgcgacggcgaaaggcgaccgtaaagcggaaagcactgaggcggttatcgatgaactgtggcgggatatgcgctggtctgtggcgcgtattcaggacaagccgcgctgtattgtcggtcaaatctga

SEQ ID NO: 32184 - DNA, 756 bp, Escherichia coli
atgacgagtcccgcagcgcgtcacatgatgcgggtctcggcctctgaaactgcgcggcgggctgctgctccgctgcgtaatgcaactgcctatgagcagatgctcgtcaagctggccgcagactgtcgcacgttaaaacaaatccgctccaacgagcgcaaggcagacaaaaagcgcgagctgttgccgttttatctgccgtgggtgggtggcgttctcagctccggtaaaggggcgcaggatgacattgtcatgaccgtcatgctgtggcgtctcgatgcggatgacatcgccggtgcgctggagattgcccgctatgcgatgacctatggcctgaccatgccgaccggcggccaccggcgcaccacgccgtatttgctggccgaagaggtcgccctgtcagcgcagcgcctgctcgatgcgaaacagcctgtcgggctgccgctcctgctcgacaccatcgcactgaccgaacgggcagacatgccggatatcgtgcgcgcgaagctgcacaaaattaccggctacgtgctgcgtgaggctggccgtctgactgacgcgctgacgcacctgcagcgtgcgatccagttagagcgggctatcggtgtgaaaaaggatattgaacagctcgagcgcgcgctgaaacccaaagcagaacctgcacccaaacagaataaaccgcgcacgcgcaaacctgccgctaaaccggcggcacggcgcgggcgtcccccgaaagcggcaaaagccgcaggttaa

SEQ ID NO: 32185 - DNA, 1068 bp, Escherichia coli
atgcgtaaagatacccgctttaaatttaatgcttacctgtcccgcgtggcggaactgaacggcgtcgacaccgacgatgtggcaaagaaattcaccgtcgagccgtccgtgacgcaaaccctgatgaccactctgcaggcgtcatccgcgtttctgaccaaagtgaatatcgtgccggtcgacgagctgaaaggcgaaaaagtcggggtgggcgtcaacggtacgattgccagcaccaccgatactgccgctgatgatgaacgtaagaccgctgattttaccgcgctcgaatccaacaaatacgaatgcgcgcaaatcaacttcgatttccacatccgttacaaacagctcgacctgtgggcgcgattccaggactttcagacccgtatccgtgacgcgattatcaagcgccagtcgctcgatttcattatggccggtttcaacggtatcacccgtgcggcgacctccagccgtaaaaacaatccgatgctgcaggatgtggcggtgggctggctgcagaagtaccgcaatgaagctgcagcgcgcgtgatgtcaaaaatcaccgacgaagacggcaaggttatttccgatgtgatccgcgtgggtaaaaatggtgactatgaaaacctcgatgcgctggtcatggatgcgaccaccaacctgattgatgagatttatcaggatgacccggagctcgtcgttatcactggccgtaagctgatggcggataaatatttcccgctggtcaacaagacgcaggaaaacagcgaaacgctggccgctgacatcatcatcagccagaagcggatcggcaacctccccgccgtgcgtgtgccgtacttcccggcgaatgccctgatggtgacgcgtctcgataacctgtcgatttacttcatggatgacgcacaccgccgcgccatcattgaagagccgaaaaaagaccgtatcgaaaactacgagtcaatgaatattgactatgtgatcgaggcttacgcggccggttgcctgattgagaacatcaatttaggtgacttcaccgcacctgccgcaccggaaagcggagagtaa

SEQ ID NO: 32186 - DNA, 855 bp, Escherichia coli
atggcaaagaaagtttctaaatggtttcgcatcggcgtcgagggtgacacctgcgatggccgtgtcatcagcggtgatgacattcaggaaatggcggattccttcgacccgcgcgtctacggttgccgcatcaacctcgaacacctgcgcggcattctgcccgacagtgtgctcaaacgttatggcgacgtgaccgaagtgaaagcggaaatcatcagcgatgactctgccctgaatggcaaaaaggcgctgtttggcaaaatcgcaccgctggacgaactggtcagcatggtgcgcagcggtcagaaagtttacacctcgatggagatccgccctaacttcgccaacagcggcaaatgttatctcgttggcctggcggtgaccgatgacccggcaagcctcggcaccgaatacctcgaattctgcagccgtgcgacccagaacccgttggccggtaaaaaagctcaccctgacgacctgttttccgttgccacgctggctgagctggaattcgaggacgtccccgatactgtcctcaacagcctgaccgacaaggtcaaagccattttcagccgcaagcaggcgagcgatgacgggcgtctggcagatgtgcatgaggcggtcactacagtcactgagcaggtgcagaccagcctgagcaatagcgaaaaacgtttaaccgaactcgaaaccgcatttgcgcagtttaagcaggatgtgacccgccagaccgaagaaaacgcgcaggcgtttaccacgctgaaaagttccctcgataacaccgaaagccatcgccagccgcgccgcgagaagtcgaaaggcggaatgggcgacgagctgctgaccaactgctga

SEQ ID NO: 32187 - DNA, 1770 bp, Escherichia coli
atgaccatttcgactgacctctcccttttgcatgacccgcgacgacaggcgcggctgttgttctggcagggattttccgtaccacaaatcgccgacacactgcaggtaaagcgcccgaccgtgcagagctggaaacagcgcgacgggtgggaggaaaccgccccgcttaatcgcgtggaaacgacgctcgaggcgcgcctgatccagctttatgcaaagcctgacctgacgccgcatgacttcaaggtcgctgattttctgtcacgccagatggagcgattcgcacgcatcaaccgctacggccagaccggtaatgaagtggatttaaaccccaacattgcgagccgcaataaaggggatcgcaaaaagccgaaacgcaattatttcagcgacgaggccatcgaaaagctggaagagattttcttcgatcagtcctttgagtatcagctcaactggcacaaggccggtatcgcgcaccgtattcgccacatcctcaaatcacgccagattggcgcgacgttctactttgcgcgtgagtccctcctgcgtgcgcttaagaccgggcaaaaccagatatttttgtcagccagtaagacgcaggcttacgtgttccgaaagtacatcatcgcctttgcgcgcatggtcgacgtcgacctgtcaggagacccgattgtcatcggcaacaacggcgcagagctgatttttctcgggacaaactcaaacactgcgcagagccataacggcgacctgtatgtcgatgaaatcttctggatccccaactttcagaagctgcgcaaagtcgcctcggggatggcgtcgcagtcccacctgcgcaccacctacttttcaacaccctcaacgctggcacatggcgcgtatccgttctggtcaggtgaactgtttaaccggggacgcagcaacgcgagcgagcgcgtcgacatcgatatcagccacaaagcgctcgccggtggcgtgctgtgcccggacggccagtggcggcagattgtcaccatcgaggacgcactcgccgggggatgcaccctgtttaatctggatcagctgaaacaggaaaacagcgccgacgattttcgcaacctcttcatgtgcgagtttgttgacgataaagcgtcggtattcccgttcgaggagctacagcgctgcatggtcgatgcgatggaagaatgggaggactttgcgccgttctctgaccgtccgtttaactggcgcccggtctggattggctatgacccgtcgcacaccggcgacagcgctggctgtgcggtactggctccaccactggttcccggtggcaagttccgcatccttgagcgtcaccagtggaaagggatggattttgcgacacaggccgaggctatccgcgagctgaccgggaaatattgcgtcgagtacatcggcatcgatgcgaccggcatcggccagggggtttaccagctcgtgcgctccttcttcccggcggcgcgtgccattcgctacacgccggaaatgaaaactgcgatggtgctgaaagcgaaagacaccatccgtcgcggatgtctggaatatgacgccggtgcgaccgacatcacacagtcatttatggctatccgtaaaaccatgaccagcagcgggcgcagctccacctatgaggccagccgcagcgaagaggccagccacgcggatattgcgtgggcgaccatgcacgccctgttaaacgaaccgctttccgccggtagcggcatgcaatcaacctcaattctggatattaactaa

SEQ ID NO: 32188 - DNA, 1008 bp, Escherichia coli
atgaaaaaacgacagaagaaacccgccaacatgaccgccagcacaccgcaaaaaatggaggcgttcacctttggtgtgccttccccggttctggatcgccgcgacattctcgactacgtagagtgtatcaataacgggaaatggtacgagccgccggtcaacttctcggggctggcaaaaagcctgcgcgcctccgttcatcacagctcgccgatttacgtgaaacgtaacattctggcgagcacctacattccgcacccgttgctgtcacgtcaggacttcagccgcctggtgctcgattatctggtctttgccaacggctatcttgagaagcgcatgagcgtcaccggccagctcttaaaactggaaacctcaccggctaaatacacccgccggggtgtcgaagatggcgtttactggtacgtgtcgaactacacccagccgcacccgttcgcacccgattccgttttccatctgcttgagcccgatatcaatcaggagttgtacgggatgccggaatacctgagcgcacttaattctgcctggctgaatgagtccgctacgctgtttcgccgcaagtattaccagaacggcgcgcacgcggggtacatcatgtacgtcaccgacgccgcgcaaagcagtaccgacgtcgagtcgctccgcaacgcgatgcgtgactcgaaaggactcgggaatttcaaaaacttgtttttctacgcgcccaacggcaaaccggatggcatcaagattgtgccgttgagtgaagtcgccacgaaagatgattttttcaatatcaaaaaggttagtgcagaagatttgttgagtgctcatagggtaccaccacaaatgatgggaattatgcctaacaatgttggcggttttggtgatgttgtaaaagctgcacaagtgtttgtccgaaatgagttaactcctttacaggaacggttcaaagaactaaacaactggttagaaatggaagttataagatttaaaaaatattcactttga

SEQ ID NO: 32189 - DNA, 1113 bp, Escherichia coli
atgttgattaatatcgaaaatgcgacacctgagaaggtgctaaataactcatttgccatagcggttgaaaatatacttcgggcattcgctgaacaaaaacacttggttataggggcaagggttttttttaaaactattatcaatgatcaaagcgggctttatagcctttcatcaaaaagttacgcgcaagaggctttgtcgggtctaacagagtactatgctatcttggatcaggtctcattttatgtatctgtcgactttaatattagtgataaatcatttaaatgggttcagatcggtgaatcttttaaatttgtttgtggtccattgtattttaatgactcggcacaattgcaaaaaacgaaaatagtatgtgaaaatcctttggattctgatttttttaaggttatagcggctcattatgccgaaggtattaacttatctcgctgcgaaatgggttttatcgctctaaatggcggtgggggcagtactaaggatatattcgagcgtgcaattcaaaataatgagatagttttttgtattgtggataatgacaaaaaacatcctggagccccattcggaggtacttgctcacattttttgggctcacaaattactcgctcaggtttcgtggagattttagatgtacatgaaatagaatctctagttcctttatcgacaattgaagatgtattaagaagtcaaagtcaattgcaacaaaaagaaaaatctctcattttctttaagcatctttgctccgtagatgaatcagtaaaattttatattgaccataaaaaaggttttgattttaaaacagcccttgaactcgatcgaaaacatggtgcatattggcgtccgatattaaagaagcttgatataaaatatgattgtgagtatatcgaatcaaaacgttgtagctgcaacgctgcttgtgtaagttatgatggttttggagagaatttgctcagcaatacattgaaatatatacaaaagggaagtttaaaaaaatataatcctcacctaacaccagtgctttctgataaatggtataagttaggtaagaatttctttagttggagttgtggtccatataaaaaagcaagggttggttaa

SEQ ID NO: 32190 - DNA, 1557 bp, Escherichia coli
atgattaagggtataggtcttcaaaacttcaggagctttgtcaacaaaacgtttattgatttaaaaccaattacagtatttgttggtaagaacagcagtggtaaaagttccctattgcgcacatttcctttacttcgtcaatctgtagaagaaaatactactggcccaatactatggtatgggagatatgtggattttggcgattttacagatgtactttcccgaaagtctgaaaaaaaagaaattacgtttagtttttcactctcaattccgccagaggtttcacaaagatatacatattatcgttctactgatttagcaaagcaaccaacagatattgaagcagagttaactgtttactctaaagataaaaaaacaaaaacgaaaacgattaagcttatattggctgatttaacaatatttatttcaatggatgagagtagtaatgttaaattactcattgaatcagatgataaaacaatagagcgtgatgggataatagctaaaaatcttgggcagttcataccaaatctaattttgaagggtaaggaagacagtcctcctccaagcacatcattctatttgagacattctaggcatgacagggcgttagaattgtcatttattgattcagcggcgaaatatataaagaaatatttccatactaaatctgatataaatcaagtgacagaggcattcaaaagaattggctttatacccaaagcgtacgctagtaaattagttgcttttctatttaaggaacaaaaagtttttagtagaaactttgaatttcaacatgatgaaataatgaatgagttatatccatttataattggatggaatattaataatcttatagatataataaatacatccttgtcagattcattcagaaatgtaaagtacatagctccactgcgtgctacatcagaaagattttatcgttttcaagatttacaggttaatgagatagatcatactggttccaatcttgcaatgcttttgaattcattaagaccggctgataaatcaaaatttgaagattggacaaagttaaattttgatttcattatcaaggttgaacaaagtggctctcactttgcaattttaataaataccggtgaaaatagtgagaactataatgttagtgatatggggtttggttattctcaggttttgccgatagttacagccatttggcttgagacagaacgtcgtgctaccacggttagaaaacctataacatttatcattgagcagccagaattgcatttacatccgtcatatcagcataatttagcaagtatttttgcaaaagtagtaactaaagcaaaagaaaataatgtagatttgaagataatttttgagacacatagccagaccatgattgaagcacttggtgaatatattgaggaaaatgaaagtctttcacaggatgatatttcaatactggtatttgaaaaagatgataagcagcagactatagttaagaaatcttattttgacgagaatggtttcctaaaaaattggccggttggctttttctcgggtaagtag

SEQ ID NO: 32191 - DNA, 225 bp, Escherichia coli
atgatgccagtgccgccgatacattcaacgcaaaacattaagctgatggccgtcgtacatcgcctgcaacaaattatgattaacgagaatctgacccctgacgaactggtcgggtgtgccggtgtcgtccgggataatcaccgcaaatacagcgatatcagcaatccgaaaattgaggcgtttcggccaccaaatatggcaaagccaccaccgcgtcgaccatag

SEQ ID NO: 32192 - DNA, 459 bp, Escherichia coli
atgagcaaaatccatgagttaaaaattgcacctgagtattttaactctgtgatatctcaggaaaaacgtgctgaatttcgtctcaatgaccgcgattattctagcggtgatattctcgggttgcatgaatgggaaccggtaaacagatataccgggaaacgtgtatcagtgagggtgacaaacgttacggatttatctgaatgggcggaaaattatgtgatgctgagttttcagttaatgatgccagatgtccagtgcggtatgtccctaatgaactggaaagagttaagcgagaaggggcttgttttcagagttaatcacgaaattctacacccgttagggctggctattagatatgaaacacttaacagcgtttctggtagggcttacatcgctgatgatggtgtctggcaatattccgacaagttggtcgcagatgctaaaaaaatgggtggttaa

SEQ ID NO: 32193 - DNA, 2292 bp, Escherichia coli
atggccgttgagactcgggggcgtattgccccctcgctagccctgccaatatctaagcgcaccggcgatactttcgttggtgcttatccctggaatgctccccgcgctgccattggccgtgacagaccccttacacgtgccgaattccgtcaggtgcaaggtgttttataccggattgaccgcctgcctttctttcttaagacgttgtttacttcccgttataacttcattcgtcgcacaaagagcccgctcggggcgctctatttcctgaaaaacacctttgagcggaagctgttgccgcgtcttgagcgcgttaacgagctgtgcgggatgaatgaatctgcgtcgattggtttcttgtctgagcgtgacgaatatgcgcgcttgcctgatatgaatgacaaagagctgaaaaaatttgcggccagaattgccgcgcagctctggcgtaaatacgaggaactcagcgacgaatgggctgaggcattcggcggtaaagagacccttttcaccgatgaggcgcaggtgcacatatatggtcaggtggctggtgttgcacgcgcgttcaacttaaccccgctctactggaaaaaataccgtaagggtcagataacgatccgcatggcgttttccgctatttcccgtctgataaaagatgattggtgggttaaccagctcaaggcgcagcgtatgcgctggcgcgaggcgctgcttatcgctgccggtgaagtcaacaaagaccgttcaccttacgccagcaaaatggcgatccgcgaggttcactcgcgccggctggctaatctcgaatacctgaaatcctgtgagctggaaaacaaagttaccggcgaacgtatcgacctcatcagtaaagtcatggggagtatttcaaaccctgaaatacgccgtatggagctgatgaacaccattgccggaattgaacgctatgcggccagcgttggtgatgtgggaatgtttatcacgctgaccacgccgtcgaagtatcacccgacccgacaggtcggcaaaggtgacagcaaaacggtgcagctcaatcacggctggaacgaaaccgcattcacccctaaaaacggccagcgctatctgtgccgaatctggagcctgatgcgtaccgctttcaaagataacgatttggaagtgtatgggatgcgcgttgtcgagccgcaccacgacggcacgccacactggcatatgatgcttttttgcaaactcagtcagcgtaaagctatcaacgaaattatgcgtcgttatgccctcaaagaggacggacacgaaaagggcgcggcaaaacagcgctttgagtcgcgtcaccttaatcaggggggcgcggcgggttatatcgccaaatacattgccaaaaatatcgacggctacgcgcttgacggtcagctcgatcacgataccggcaaatctctgaaagatacggccgcagccgtaaccgcatgggcgtctacatggcgtatccctcagtttaaaccgattggcctcccgacaatgggcgcttaccgcgaactgcgtaagctgccgcgcggggtgagtatcgccagcgagtttgacgaccgtgtcgaggccgtccgggctgctgcagatgagggggaatttgacctgtacatcagcgcgcagggtggggcaaacatgcagcgtgatgctcaggcggtcagggtcgcccgtaaggtgacggatgaggtaaacgaatacgaggaggatatcgagaaagtggtcggtatttatgcccctcatcttggggtgagccgcgtacatgtaacccgtacagcggaatggcgcatagttccaaaggttttggccgttgagcctttgaccttaaaaagcggctttgccgcgcctcggagtcctgtcaataactgtggaaagcttgccgacggtggcgatccagttatgacacctacaccgtctgagcaagccgcagcggtgttaaatttgattgaggccggggttatcggctggaatgagccagacgtcatgaaggttcttaacggcgcgttaaaagctggcgcacctcgcaataatcgccagcaaagaagcaatgcgccactcaaaacgagcgagcaagctccatcagccaggatgacaaaaccagaaagggatcgcgtggcgaaaattcgtttcgatttggctcaggagggcattaccccggaacggtgggcgctcgaagcgctggcgcgtggggcaacggtgatttatggcgataaaaaaatcaaatacgcggctgctgatgagtggccgggattctcaattcaagaggagcagaattaa

SEQ ID NO: 32194 - DNA, 276 bp, Escherichia coli
atgagtatccgtatcgagataaatcatcagtatgtagttacaagcgatcgctaccagttcattttgcaggaaaagaaagtggcgactgctggaaaaaataaaggtagcgaatggcttgatactgtcgggtattacccgacgattcaaaaactgatttctggtctggtgctacatgaccttttaaatggcggtgctgatagttttgcggcgttgggtgagcaggtcgagcagttgggactgcaatgtcagaccgcgttttgtgctgatggccgttga

SEQ ID NO: 32195 - DNA, 219 bp, Escherichia coli
atgcataaacaaaataaagtgccgacgtgtgtgctctcggtacatctggcgcaagcgttgcgcgatgcgcagctcgataccgcgacccgtttatcctctcattttgatcgcctaattgcgcacatcagtaagttagaactcaaccgcaccgagatcatcgagctattggggcaagagtccgaaaaattgcacaactcaatttttcattgtgcttgctaa

SEQ ID NO: 32196 - DNA, 501 bp, Escherichia coli
atgacggttatgactcttgcattagttcaaaaacaacctgcagctctacgcgtcgttataggaaagcatcttgcggaacctcgctggcacgatacctgtgatttttataatcagatgatggagcgtgaccgcttgactgtctgttttcatgctcggttaaaacagcgtcacgcagtaatgcactttgaagaaatgaatgatgtcgaccgcgaacgtctggcttgtgctatcgatgagctgcgcgctgctttttcaaaacgtcgtcaggttggcgcaagtgaatctgcatatattagttttctaacggtgggtcagcgccgctctttatttctacacgcgggattgagtgaggtcgagttcaatcagccttactggcgcattgacgaagatgcttgttattggcgagagaaactattccgcgctttgcgtgagctttttgggttatttgaacacgcgccaacgatattaacctcggtaaagcctgagcagtatttacattaa

SEQ ID NO: 32197 - DNA, 171 bp, Escherichia coli
atgaaagagccacgttgtatagctcagttactgcgtaacgaaagtccacgcccgatgaagttcaacatcactcatggtaaagggcgtaaaggcatcatcatccgcactcgcaagcctggatttattgctatggctaaacgctttatgaaatcccgagggatatcgttatga

SEQ ID NO: 32198 - DNA, 276 bp, Escherichia coli
atgaatagggtcattgagagcgcgagcgacgcggttccgtatcaggagtttgcgcgtcttattggtaaaacccctgctgctgtcaaagggatgattgagaaaggcaaactaccgatagttgagatgactgatccgcagtctacaagtgggagagcaggggaatactgggtatatctgccagcatggaacaaaggcatgaagatggcctatgacagtcgccctaaagaaattcgtgatggttggttgatgtggttgggattaggtgaaccagcataa

SEQ ID NO: 32199 - DNA, 297 bp, Escherichia coli
atgatacccgtcaacgagaagctggccatcatgcgtgagtcggaacgtatgaatagaaaagaattcagtgacttaactggagttccgtatagctctctttctagttatgagaagggagtaaaagatatgggcatacaagcagtgatgaagattttgaatcatccacagttcaaaaaatataccatgtggttcatgactgagacgatatcaccagaagctgggcagattgcaccggctctcgcgcactttgggcagcagacaacaacgtcaccccactcagaccagaaaactggctaa

SEQ ID NO: 32200 - DNA, 1014 bp, Escherichia coli
atgtctgttaaaaagctcgatgatggtcgttatgaagtggacattagacctgcagggcgcaacggaaagcgcatccgcaggaaatttgacaagaaaagcgaagctatcgctttcgagaagcatacccagtacaaccatcacaacaaagaatggttggcgaaaccgacagataagcggcatctgtcagagctaacaaaaatctggtgggagctgaaaggcaagtatgaaactcacggccgagattacctgggcaagttagagttgttcacaaagataaccagtgacccttgtgcctttcagattactaagtcattgataagccaatacagcactgtgcggcgttctcaaggcatcaagccatcgagtataaatcgtgatttaacgtgtcttagcgggatgtttaccgcgttgatagatgcggagctatttttcggggagcatcctttccgaggtcttaaaagactcaaagaggataagccagaaaccggctacctgacgcaagaggagatcgcgcttctgctgtcaaaagtggacggtgataataaaaaaattgcgattctttgccttagcaccggcgcgagatggagtgaggcagcaaaactgaaagcggaaaatatcattcaaaatcgcgtcactttcgttaagacaaaaaccaacaagccgcgaaccgttcctatatccgaggaactggcaacaatgatcacaacgggtaagcgtggctatctgttcactgatgctaactatcccgcgttcagacggctaatgaaggagctgaaacccgacctaccaccgggtcaggctacgcacgcattgcggcacagcttcgccacgcactttatgataaacggaggcaacattatcacgcttcagagaatacttgggcattcaagaattgagcagacaatgacatatgcgcacttcgcccctgagtacctacaggacgcgataacgcttaatcctctacgtggtggtgttggctctcagagtgtccacacagtgtccacagtagggtag

SEQ ID NO: 32201 - DNA, 318 bp, Escherichia coli
atgggatttccttcacccgcagcggactacgtcgagcagcgactgtccgttaactcgatatgcaatgttggtcctaacacccgcgttttcgaaagggatggcggttatgttgtgctggatatctccctgaagccaaagcagggtagtcaggttctgatccagcacggcggcgggactgagcttgccacgttgagagggagggccctgattactgaagacggcgaagctattgaaggcgaggccctggatgatatcactgtcgccggcgtggtgacacacaccatcatcgatgtgagaagtgacagcgtagcggtataa

SEQ ID NO: 32202 - DNA, 1584 bp, Escherichia coli
atgactgataccattaggcctaacgttgttgtttcaatgccttcacaactgtttacacagtcccgatcatttaaaggtaatgctaacgggaagatttacataggaaaaatagatacagatcctaccattcctgaaaatcaaattcaggtatacctgcagaacgaagatgggagtgtagtgcctgtctcgcagcctgtcatcattaattcaggtggttatcctgtttataacggccaaatcgctaagtttgtgactattgaggggcacagtatggctgtttacgacgcatacaatgtgcagcagttttactaccctaacgttttgaaatatgacccagacatgcttcgcactgatttaagcagccccactggaacttcgcttgttgggtcgctaggaaataatcccttggttgccgtcagtagttttaaaaaccgtgggcttagtgatcaaagtgcggttcaggctgctttcgattcatctaacgttatattttttgatgttgatgtgactctatctggcccagtgacatacgacaggagcgcagagtgcacaattttatatcgccctgacattaccgtgactcgaccaggatttttgccaaaaactagaactaatccagcgcatgttcttggcggtacggcattcaggcaaagaaagaccagcgacccaaattattccgagtatgaaagaatttatagtcatcaatcacttattgctgaaatggcggtgcatgatgtagctgctaacgcaccttcatctgaaaacttcgttgctatgtattctggaattgagagctttaactgtgccaagcaacgtatgtgggcgttcaattcggtaacgagtgcacatggattaaagaccggagatgagatatacggttatgaactagatatgaacgttgacggaactctggatggcggcggtcaatatgtgggcctgtatatcgcggggattggggatttaacagcttgcgcaaatgcggatggtattcgcgttcagcgcctgcgaaacaacctttacaagtggcaatatggcttgcgtatattcgactcaatcacaggtataaacatcactgacgcaaccacttattcaattttcgcctctggatctgcgcctattgttaggcgcaaaaccacccaagacggaggttggtcatttatacaccagatttcggcatctgaaacgccatggggggttgacgatttcggtgccacatactcaaacaagctctatttgggtaacggtagtggaaaaagtaaaaacagggtgaatttggacggcggagttaagttcttcgcaacaaacaaccctgttggatggggttctctagcagtaaatggctcggctgaaaagacagtaacggaactttttgggcttagcatttcagactggtctacatacactattgacgttgtaccgatcgccaacacgatttcaatgccagttgttcacgtgcaggcatatatatccaatgacagaactcaggcgtacgtcagagtgacaaacgtcagtggctcgcctatgtcttcgtgtaactttgctctacaggcaaaagtgtgcggtcatactgtgtcaaatatctaa

SEQ ID NO: 32203 - DNA, 513 bp, Escherichia coli
atgccacttgcccgttatctctgcattttcataaacgttggtttgggagaaggctctgtattacccgttggtgtgcctgttccgtggccttcagccacactgccaacaggctggctgaaatgcaacggggcggcattttctgctgaagaatacccggaactggcaaaggcttacccgacaaatatattgcctgatttacgtggtgaatttattcgtggctgggatgacgggcgcggagtggacagtagccggacgttgttgtcgtggcaaaaaggctcttatctggttcaggaagccaatatatcacccgacagcgtggtgcagttttcggtaaacgacattgccctgctgggatgggataaaactgaaaccaattcagatattctcagagcgaaaagtatacctacagaacatatctggaaccccgttccagtgggagcctgggggattcagtatctgggttatgcaaggccacgtaacattgcatttaactacatcgtaagggctgcatga

SEQ ID NO: 32204 - DNA, 618 bp, Escherichia coli
atgagcaagaaaaccatgactacagcggtgctgaatgaatcgcggctggcaacagttgcaggagaggttgttgtccacagctacgataataagacgcgggaatacctttgcacgtcaaccgaatatctggctgtgggcgttggccttcctgcacattcatgcactgatgcccccggggaaaggcgggctggttatgcaatttgccgcacagccgacctgaccgcgtgggagtacgtgccggaccatcggggtgagacagtctataacacagaaacccgtgaggcagcagaaatcaccactccgggggattaccctgaaaacacaaccactgtcgccccgttaacgccatacgatgaatgggatggtgagaaatgggtgacagatactgaggcacagcatagcgccgcagtaggcgcggcagaaacacagcgacagtcactgattgatactgcaatggcttccattaatctgattcaactgaaattgcaggccgggcgaaaactgacgcagacagaaaccacccggcttaacgtcgtgctggattacattgacgcggtgacggtaactgataccagcaccgcgccggatatcaattggcctgctcccccggaggcgtag

SEQ ID NO: 32205 - DNA, 210 bp, Escherichia coli
atgggctatggtgtcccctttaatacgaggttgcatcaaaaccgccccatgaagcgggcgggcgaggcggggaaagcactgcgcgctggcggtggtgctgattttattttttcagcgtctcagcgcgtcgtgacggcgcttagtctgtccgttgaggcgttggtttgcctgcggactgttttgtgcggtggtgagcgtgtgagggcgtga

SEQ ID NO: 32206 - DNA, 2484 bp, Escherichia coli
atgtctggttttttccttgatttaaccaagctttcgcccagtgtaaatagcgacacagcgattccaccgcgagatatatttacagctctaccgagcaaagacaccaaatttcaataccctcgagatgtgcaatcagaggtctgggaaaaatggtatgaagcaaggagaagcccaaccaatgtaataaaaatgaataccggaagcggtaaaacttcagttgggttaatcattcttaaaagctgtataaatgaaggagaaggtcccgctgtatatgttgttcctgacaactatctagttgagcaagtggttttggaggctaatcaacttggtatacctgtaactcaagatgagaggtcccccaaatttattgcaggtaaagaaattttagttacaaatatattcaaagtggttaatggacgttctgcatttggcgttggagatgatggacaaagaataccaataggttctataataattgacgatgctcacgcttgcctttcttcaattgaagaacaattctccattagcattcaaaaaaacaaccctgcctatgataaattattcagaatttttgaaaattcactaatgacacaagctggtgcaaaaacactagagataaaatccggcgatagaaatgcttatgtgagagttccattttggaaatggcaagaaagcataaatgatataatgacaatcttgttagaaaataaagaccatgatgacttgagtttcaaatggccattaataaaagacaatctaatattatcgaaatgcgttgtaagtgcttccaaaatagagatatcacctcattgcataccaatccaaatgatcccaagcctatcaaacgcaagaagaaaaatattcatgacagctactcttgtcgatgaatccattctagcgagccacttcggaataacggatgaatcactctctaatccgataacaccaaaaacaattggtgatattggtgatagaatgatactaatgcctcaggttataaaccctagtctttctgatgtagatatcaaagctatgtgcaaggagatatcctccaaacataatgttgttgtaattgtaccatccgattacagaactagattttggcaagatgttgcagacagaatattagataaaaatacaatttatcaaggtgtacaagaattaaggacacaacatgttggcttagtagtcctagttaatagatatgatggtattgatttaccaaataccgcatgtcgtctattagtaatagatggacttcctgacgttcgtagactaatagataaagtctcacaaagcttattgcttggaagcgaaaaaaccaaagatgaaattatccagaaaattgaacaaggaatggggcgaggagtgagatcaagcgacgacttctgcggagtgatcttacttggcaaagcattaaatggcgctgttttccttggctcctccttagaaaggttttctccagcaacgaaagcacaaattcaactttcacagcaattggtatcgatactgccggatacaactattgattcaatcaaaggtgctcttgattattgtctgttacgcaattctgactgggtctcaaaaagcaaaggtatattgactggcttaacattggaaaataagcagattgaccagcatactataaataaaagattggcatatgacttagcatcacgaaatatgtttcaacaagccgctttaactctaaaaaatgatagtagtacagctgacaaagtttataagggttatctaaaagaacatgctgcggaatatgtaaacttatatgacaaatctgaagctcagatattgcttcagtctgcatcaaacgataactatcgggtattaaaaccactaatcggcgtaacatataatagacttaatggtgcggcacttgaacaggccagggaatgtagctcctatctcagaagtaattttgaatcggccaatcaagtcgttgtgcatactaattcaataatagaaaaccttattttctccgagggcacatcgaatcccttcgaagatgctatcgaaaaagttgcatatttggtcggttttcgtagccaacggccagaaaatgatacaggtaaaggacctgacaatttatgggcaatgggagaaaacaattatctagtaattgaatgcaaaaatggagcaaccgcagaaagaataagtaagcatgactgcaatcagttaaatgggtcgggtgcatggttcagaaacatgtatgatcaaactgctaccgccacacctataatgatacatcactctaatatgcctgaatatgccgcaacactaaacgaagggtctcgaataatgaccataaatgatcttgaacgttttaaagcatctatcctcagttttatcacggccatttgtacaagtgataaacgacacgatgagatatttataagagaacaattgatcacatgtaaattacgtgcatcagacatagttgaaacctatacgcgaaaccctcgttaa

SEQ ID NO: 32207 - DNA, 1263 bp, Escherichia coli
atgaaactcaacgctcgccagatagagaccgcaaagccgaaagagaaagcttataaaatggctgatggaggcggtttgtatcttgaggtctcccctaaaggttctaagtactggcgcatgaaatatcgccgcccctctgacaaaaaggaagatcgactcgcttttggtgtatacccgacggtcactttggctgaagcgcggggtaagcgcgatgcagcaaagaaattgttgtctcagggtattgaccccaaagctgagcaaaagggggcacaagctgaaattgagggggcatatttatttgaaactatcgcaaggcaatggcacgcaagtaaccttacttggagcgaagatcatagccgtcgtgttctgctgacacttgagcagtatattttcccctcgataggtcaaatcgatgccagaacgttgagaaccagccagcttctcaatccaatcaaagctgtcgatacggcgggtaaacatgatgtcgcgcagcgactgatgcagcgcgtaaccgcaattatgcgttttggtgtgcagaatgacctccttgaatcaaatcctgcatgcgatatggctggagcgcttttaagcgttaaagcaacccaccacccagcactacccccaaaaagaatccctgagcttcttgaaagactatcacgctataaagggcgactaatgacacggcttgccgttgaattaacgctactcacatttatacgttcaagtgagatgcgttttgctcgctggagtgaggttaactttgaacgaagcgagtggacaatacccggaattcgtaagcctattcccggcgtaaaacactctgagcgtgggatgaagatgaaaactgaacatattgttccgcttagcaaacaagcatttgatatttttaaacgtttacatgccttgagtggtaaaggtgaggttatatttcccagcgatcatgatcctaaaaaagtaatgagtgaaaatacagtaaataacgccttacgtgtaatgggatatgatacgaaaactgaagtatgtggtcatgggtttagaactatggcgcgtggtgcgctaagtgagtcgaaactatggaatgatgatgccattgaaagacagttaagccacgttgaacgaaaaaatgtgaaaggttcatatatgcatacttccgaatatcttgaagaaagaagattaatgctgcagtggtgggctgattatattgatgctaataagaatggatctgtcacaccatatgattttgcgcgtatgcatggaaaataa

SEQ ID NO: 32208 - DNA, 639 bp, Escherichia coli
atgaataatactcaatttgataataatttgttttattttaataggttaacttacataacgccacacgaagtggcgcttgctatgaatggttttgactatgataccgaaaatgatgaattgactgaggttcaattaaaagaggttattagattaagaaaggcaataaccagaaatctacaattaattaatgaatataaaaacgtatccgccacgcaaaaagtggaggcgaacttattattaactgccgcttatatctttcagagggaaggtattgtacctgtggagattaaggagagaattgagaacgcattacgacaacaggtaaaaaataaagattggagtgatattctaatgacgttaggaggaagtgaattatatgaagttggtaaaaaattaaggagtaatggtagagggcagtacagaaaagatgatgaggataattatagttgtaaattaatttatttactaattgaattgcttaagagacatggaaaggtaagttatagcgataatagtgttatatataatgatattgtttctttttgtaatgagaatgagattctaatgaaaggggttaaaaaagctacgttttataagaaaataaagcttgggaaagacattataaaatacggagagtaa

SEQ ID NO: 32209 - DNA, 231 bp, Escherichia coli
atggaatatgcaaacagcttttcagataatcagactcttatctcagcaaaagaggtcttaagacgcgttcagcgtagcaaggcatggctttacaaacagcttgcaaacaatacatttccccgtccggtgaaaataggaactcgtgcaatttcatttgttgaaagcgaagtggatcactggattcaagagcaaatatatgcctctcgtggtgagcgatatgaaaatcactaa

SEQ ID NO: 32210 - DNA, 186 bp, Escherichia coli
atggcaacgagttcaactaacaacaagtcgcagcaacttaatgctcgtttcccacatgatgtagttgcagaattagaaagcaaccttgaagatggagaaacgaaagcgcaattcattgttacggctgtaaaaggcgagattaaacgccgacagcgcaggaaaaataagccagagcaaggtagttga

SEQ ID NO: 32211 - DNA, 987 bp, Escherichia coli
gtgagtgattctgcatatatgaatgcattacaagagcagtttggagatttgaaatattcaaatttcactgttcagttcatgcctcctattatttttgtttgtggtgggccgataaattccactccaatgagtgtacgagaccacatatttacttatgtagcaggccacaaacctgaattgtcagattctcttattttagctgagaacttccatgactacttcagagagggggcatattcagatctaatgagctttgaagatgatattgcaaatatttcaacattagttgttatctgtttagaaagtgcaggttcgttagttgagcttggattatttgttaataggaagtctctagctcaaaaattgcatgtagtcgcaccatttgaggagattgagggaaatgaacgaaaaaatattcctgctagatcttcttttatatatttaggccctttggagtatcttaaaaaaatagatgaggcctcagtatcagtttatccatggccaaaatcggatcgtatgaaatatgatgaggttgagcttatctaccatgatattcattctagattaaaacgtgtaaaaaaaacggagcgatataaccctgaaaatactgggcacctagctatattgatttacgaaataatccttttatcagaaccaatcaagaaaagcgaaatagagtgggcactatactgtatggatatagatgtgccacaaaaaataataactcgtttactttatttgcttgaaaagatgaaattaacctcatcattatcttacagtggtacagactacttctattcccgagggcatagagagagtaaacttaaatttggtatcagtgctagtggtaaaataaaggattctatgaatattaaggttgcaatccgacaatcttacttaagtatggatgctaaagatatggacgagactgcaaaaaaaaggaaaaatgctctaaatcaaatcaatatcgtgcgtggaggggcttag

SEQ ID NO: 32212 - DNA, 933 bp, Escherichia coli
atggagttgctaagttatatttcaaaaggtctttttcttagcgaagaagaggctaaaaggtatattgttactattccacgcagatataaaatttatcctatcgccaaaagaaatggtaatggatatagattaattgcacaaccagctaggcaagttaaagccttacagaaggtagtaatcaatcatatgttggctaatttgaaagttcatgaaaatgctttcgcttatgaagccgataaaagtattagatctaatgcgttaatgcattgtaataatgattatttgcttaaaatggattttaaaaacttttttatgagtatcaaaccccataatcttttatctgtcttaaaagattatggcgttgaactaactgatactgatatctttgttcttaaaaatcttttcttctggaagttaagaagaaatagcccgttacgcctaagtgttggagcaccttcttctcccattatttcaaatacagtaatgtatttcttcgatgaggaaatatcgaaaagatgcaaggatttgggtattacctactcaaggtatgctgatgatcttacgtttagcaccaaagtcaaaggagctttatttgatgttcctaagttagtaagggaagttcttaacgtagtaaatcttaggaatattaaaataaaccatgagaaaacagtttttacctcaaggaagtttaatagacatgtaactggtgtaactattacgactgatggttatttgtctttaggtcgtgatagaaagcgtcttttaagaagtaaaatacattattatgtgtgtggggttttatctgagaaagaaattctaacccttaaaggagaattaggctatgcgaaatttattgaacataaattctttgcctccatgattaagaaatatggggatgatgtaatcagcgaaatttcaaaatatgaaatttaa

SEQ ID NO: 32213 - DNA, 444 bp, Escherichia coli
atggcagataatgaacaaccgaaagtttttcagttgggtattaatacagtaactgagtattccgacgggaaaaaagttattgaacaaaatgggcataaagtgacttattatccagacgggagtatggtggctgagatgaatgggggccatcgagctgccattagcaatagtggaaccgtgctcaccatcaactattcgtcaatcaaatatgcttatccaaaaaatttagcaaacgtggtttctgtaaatacaattaccaatgtatccggtgtgaccaaggaagtgttgtttactaacggtggaacggcaacttgcgtatatgggcctttaggtgatttagtgtccgttaagacaaataatgttgattctttcagcttcaataaagatggggatgagttttcattcgacatctctgataatccatcaaagcttacggtgcactaa

SEQ ID NO: 32214 - DNA, 1266 bp, Escherichia coli
atgtttgcgctttgtgatgtgaattcattttatgcatcgtgcgagaccgtatttcgtcctgacctgaaagggcgtccggtggtcgttctgtcaaacaacgacggctgtgtgatcgcccgctcgccagaagcgaagcccttcgtcaaaatgggtgagccttatttcaagcaaaaggacgtgtttcgccggcacggtattatcgcgtttagcagcaactatgagctttatgccgatatgtccaaccgagtgatgacaacgctggaggaactctctccacgctgcgaaatttacagtattgatgaggcattttgcgacctgacaggagttcggaattgtcgcgaccttaccgactttggcagggaaattcgcgagacggttctgcgcaggacacacctaacggtcggcgtcggcatagcccagactaaaaccctggcgaagctggccaatcacgccgcgaaacagtggcagcggcagaccggaggcgtggtggatctgtcgaacctggaaagacagaggaagttgatggctttgcttccggtggatgaggtctggggcgtcgggcgccgcatcagtaaaaaactggaggccatggggattaaaactgtactgcaactggcggataccgatatccgttttatccggaagcattttaatgtggtactggagcgaaccgtgcgggagctacgcggagagccatgtctcggtcttgaggagttcgcgccggtaaagcaggagattgtctgtagtcgcagctttgggcagcggatttccacctacgaagagatgcgccaggcgatatgcttatacgcatcccgtgccgcggagaaactccgtggtgagcatcagtactgccgctttatctctgcattcgtcaaaaccagcccatttgctctgaatgagccgtactacggcaatagtgcatcagtgaaactattgaccccgacccaggacagtcgggacataatcacagcggcgacggaatgtctcgatgcaatctggcgagacgggtatcgctaccagaaagccggagtgatgctgggggatttctacagtcagggggtggcccagctaaacttgtttgatgataacgtgccacggcggaatagcgagaaactgatggaagtactcgaccatctcaatgcgaaagacggaaggggaacgctgtattttgcagggcaggggatccaaacggcctggcagatgaagcgggaaatgctttcaccttgctatactacaagatactccgacctgttacaggttaagtag

SEQ ID NO: 32215 - DNA, 420 bp, Escherichia coli
atgcagttctacacgcccgttgagttacgccagatcatgctgctcccgttgtacagtgaccttgtgcagtgcggctttcctagtccagcgcaggattatgttgagcaacgtattgatctgaacgagttgctcgttaaccacccaagtgcgacgtattttgtcaaagccgccggcgacagcatgaaagacgcaggcataggggaaggtgatcttctggtcgtggatagctcaagaacagcagttcatggcgatatcgttattgctgctgtggatggggaattcaccgttaagaagctgcaactgcatccgcgggttcagcttaacccaatgaaccctgcatattcgccaatagtcgtcggtagtgaggacactctcgacgtgttcggggtggttacgtacatcattaaatcagctggctaa

SEQ ID NO: 32216 - DNA, 570 bp, Escherichia coli
gtgctgattggctatgcgagggtatcaaccggggatcaaaacctcgatttacagaaaaacgcgctgatccgcgcagaatgtgagctggttttcgaggatatggccagcgggaagaatgcccggcggccaggtttgaagcgagcgctgcgacggctccgcccgggtgatgtgctggtggtctggaaactggatcggctgggccgcagcgtgcgcgatctgattacgctcgtgtcagagttgcaggcgcgtggggtgaatttccgcagccttaccgactcgatcgacacttcgacgccagcagggcgattcttcttccacgtcatgagcgccctggcagaaatggagcgcgagctgatagtggagcgtacccgagccgggttagccgcagcgagggagcaggggagagtcggcggccgccgccgggtaatgactgaagaagtggtggagcggtgccgcagaatgctggagaacggcgctactcggcaacagatcgcagatgtgataggcgtagatgtgaagactatttacaaaaatttgccggtacaatgcggcgataaaaaatccccttga

SEQ ID NO: 32217 - DNA, 2340 bp, Escherichia coli
atggccgaacttaacccgccactgggcacgacgacgccggaaatattcatggacaacgttaagcgcgctgacgagctggttaacggtccggccggaacggttgacgaccgcggcggtgaaccactcgatacctggcgccagatgatggcgaaaaacgatgaggtcaggcagaacctgatcccgctcagtaagcaataccagacgctggcagcggcgcaggcggatatcgcgaatattccggtggggtcgaccacgtattaccgtagcccggatgacaacgcgttagctgtagaagtgatcaataacgccggtacgctgcagcctaccgggcggaaaatgccatcttattcttcgctacgcggggcgaacattctgtttgatgctctgaatgaatattcagcaaatgatcctaaattcggtgcgtgggactggtatcgcggagcagtgatcaccttcagcactactgatgccaatatttcgttaccgactccagtggcacagtattccggcgtatggtctgcagataaatattatgaccttgcccgcctgcctgtaagggttggtgataagttaaccttttccgtgctggcgtggttccaggatgccggtgctatgttccatattttctggatgtccaccgctggcgctgttatttcgtctaaatcacagcttgctctggccgcaggtataaatacgccggttatcacagatgtcattccatccggcgcatcctacgtcaggatccgggttgaaaatactacggcagggatatttaaggtcggtgcttatgctgctgcgttgggggctattcagcctgattttgttcgcgccacgccggataaaacttatctgtcagccgtcatatcatccggtatttcggggttaacatcacgcgtcgatgcgctccagggagctatctctgttggttatgcttatgcagctgcctggcaagtcgggaaatttatcaacccaactacaggggccatcactgataactctgcgctgaactgcgcaatcattccgcattccgacggggatggctggctggtgacagcccttgtgacaggatcggcgactgctctggccgtgtacatgaacagcgccgggatggtattgggtgttgaagggcggggaacggcaaccccgcagcagtatactaattatcgtcttaacgttcctgccgggacaacacagatcggtataacgggtcgtaattctgcggaaattgctgttaaaaaacttgctgtcgttgagacggccaaagtactggcatcgatcgattctctggatgtcagggtacaaacaatagaggactctcttgtttatgattttattaaacacgacgtcacgattacctcaggagcatatataaaccgtgctgatggcagtgtggtggcaaatgctgcatttgactgtgcaatttttaattacacagcaggagaccgctggaaagtcacagcgagggttaacggcagtggagtttcgctcgcggtgtatatgaacagtgccgggacggttatcggcaccgaagggaacggtactacagaatcggtggactacaccgattacgagctaacacctccttccggcaccgccaaaatcgggatcaccacccgtatagccgtccccattattgccaaaaaatatgtagtcgttcccggtggtagcacggtcagtccgtggtctggaaaagtcatcgatgtgatgggtgacagcaacgttgcttataacaaatggcaacctcttgtcgcggcagaactgggctgcacttttctgaatcacggggtcggtggttcgaaaatagccaaaccggatagctcctcaacgcaaatcagcatgtgcgacgatgtgcgaatcaatgctctggatacatcggcggcggcgtggatttgcggtccgtgggcaacaaacgactgggcgcaaaatattccgattggaagtatcaccgactcagtgaatacaaccgtttacggcgcgctgaacatcatcgctcagaaactgcgggcgcgggccccaacaaaacctatcctgtgggccacgccgttcaatggggactatgattctccacgttcagcggcatgggttgacggtgaaacaaatggctatgggcgggtttctgactatgcagcggccatacgcgccgtggcgttgcgatatggattccccctaatagaccttaacgctgactgtggctggacaaaattcaatagcactagttttttattaaccgagggggatacaaatccgtcccgcatccacctcaatgcggacgcggggcctgtgcgtatttcctcactgataaccgatcggcttactgccctacagaaactggtgggctag

SEQ ID NO: 32218 - DNA, 717 bp, Escherichia coli
atgtctaatcagggattatctattaatgttgatgccgtctgggatgatgactgtattattggttcgagttatccgcagccgtctatcgcgagcattgccacatttggcagccagaactttggggctatttttggggaagagccaaccatagtgggggcacctgtcatcaacacgtactggtttacgggtggtgttggtgcggggggttatgatctgaaagtcacggataacccggttaaaaccatgatggtgttactccggcctaaaagcactaccagagcgctgggcatgggtaactatctcggctctgctgtacaaccgcagggggatacgtttgtttttgaaccggccattcctcaaatcagggggattgtggggcggtcaagcgggacagcaaccgccaccctcgcgactccactggacaccagtaaattccatctggttttcctcgatgtgaataactctatggttcagcttcataaaatgacgaacagtgagctgttatcgactgaacaggtcgctgttaccgcccgcgcaatccctgttccgaataagtcgatttatgctggctactcctatatcacgtcagattttttaggcgctgtggatattgcaatgacaggggtgtgggcgggcggaatactctctcaggctgaaaaaatggatatggttgacctcgtcactcagagctatgaagggattttatcaatcgcgtaa

SEQ ID NO: 32219 - DNA, 2160 bp, Escherichia coli
atggccgaacttaacccgcctttgggaacgacgacgcctgaaatattcctggataacgtcaagcgcgctgacgaactggtgaacggtccggccggaacgattaacgaccgcgcaggtgaaccgctcgatacctggcgccagatgatggcgaaaaacgatgaggtcaggcagaacctgatcccactcagcaagcagtatatgaatgaggcggcagcgcaggcagatatcgcgaatatccccgttggctccacgacctatgttcgcagccaggacgtctgggcgctggcggacgagtacatgaataacggcgggacgctgcaacctaccgggcggaaaatgccatctcaggagctggtcaatatcatgactgatttgatcagagcaacgttcagccagaatgcgccagcgggtatgtctcttgcctttatggatgaacgaaaaaattattcggtagggctggatgaggcgggccggttgcttgccgggtggattaaggcgaataaagcagaattaaaaaagctctcagcggatgaatttatttcgtcgatcatctcgtcatcacgtctgaatatcgggaattctgctttatcattagtggctgacggtaacgctgtttcagtttatgacacccttaaacggctttgttttgccattaataaaaaaggggtactgaaatcagggaaggctgagatcaacaatcttacgattgccagtatcttagggttaccagccaacgccagcatttctactgcgacattccgcgatttcgttatggcgtggcgtgatacgttaaatcgtccggctgtgggtatcaaaaaaaacggggcatttgctgcggggaaaattgaagcgaatcatggagaggtaaaatcgctgaaagccgaaactctggaagttaaagcgattatttcccctgaatttctgcgctattttaatcagtccatttactcacgcctgccggatattgcccataaaatcggttacggacaatcgcttgccgctggcgtgaatactcaggccctgattacgatagccgcgctgtataccgcattgcgttttatcggtggggcacgggcgcaggatggctccggcacttcggcagaaaaccatgctcagctggttccctacgtcgagacgtataaaaacaccgataacggccaggcatgggaaaccccaatgggggccagcattcgcggctggtacgaactgatgattgccgagaactatggctttaacccggatgatctgatcattctgggttctgttccggcggagggcggtcaacccattgatgtgctggcggcgtatcccggaaagtacattcagcgagttttcgatgatatcagttatggttacgcccgcgctcaggagctcgggaaaacctaccggcctgtggcgatgtactggatgcagggcgaagcagaccagacgaaaggcaccaccaaagcagactatcaggctattttcgacaccatgcaacagcggatcgatgcccacgcctcagctgtgtgcggcgaagaagtccatgtgccgatttttgtttatcagttcagcagctggataaaccggacgccgaacacagcctatcccaccattccgatggcgctgctggagctggcgcagacacgcgaaaatgtctatctcacgaacccgatgtacattcacgattacacggatggcgcacacctcaccgccagaagttcctatattcaggggctttatatttccgtgatggaaaagcgggcgctggttgacggcaaagcggcaaaaccactgatgccagttagtcatcaacgccagggccgcgccgctacggtgtggctgaatccggtgggtcggctgagctttgataccagcattgtttctgatccgggtaattatggtttccggctactgcaccctgacacacgtgcgattatcccgctgaccagcctcaatatccgttatgacgcggtgactgtctcaacggcagcggatatccctgccggggccattcttcagtatgcctttcacggcggcaccaccggccagtcaccgggtcgcctgaccgggccgcgcggttgtctgcgtgacagccagggcgacattatcagttttacccttaatagcgaggttatccgtatggataactattgcgtcatgtttgaaatcacgttgtga

SEQ ID NO: 32220 - DNA, 3069 bp, Escherichia coli
atgaccattcgtttctacccgtcccggcttcccggtgaaccactcgaaacgcatgagcatggtgtaaccagtatccgcacctggctggtggaaaatgttgaaaactataccgatcgggatgtcccaccgctgaccgttgaggttgagggtcagtcaattccgccaggcgagtgggctacctgtgtgatccgccctgatagtgatgtacggctttatccggtccccttcgggctggaggccgccacaatcgcgtggatcggcgtcggtatctccgttgccgctgcagcctattcgcttgttttgatgagccgcatcgatacgggcggctatacctcatccacagggcggagtctcgacctgaacccggcgcgggccaacaccgcaaaactcggtgatgccattcgtgaggtgtttggccgggtgcgtatctacccggattatgtggtccagcccgttacccggttcgatgccgccgatcctacgaaaatgcgcgtccagatgctgctgtgtctcggtgtcggtgaactgatttataccactggcgatatcagggtaggcagtacgccagcttcaacgctgccgggtttcaacatcacctattttccaccaggcgcggacgtttccggcgatgagcgcagtgaaaactgggtcaatagtactgaggtcggagggacatcatccggtaccgggctggatatggcccagacgtcgccggatgccgacgatattatcgcagacagcatgaccgtatccggttcgagcgtaacgtttaccgggctggatacggatgatgatgacgataatgacgagaacgataactcactgccgcccagctgggtcgctggcgccgtggtcgaactgaaagcccaggcgaactaccagatcaccacggcggccggatacagcgttatcgcaagcccgctgctgacggagatcgcgccggtggttggaatgccggtgacgctggggtttaactctgtcgattacgatctgtttatcgcgtcatatacccccggtcaggctgcagtgcccggcaccggggggagtgtggcaaaagtccaggccagtgcggccccgaccacctacgatttttcgaccagctccagcacgttcacgatcacctggcagggagttacctacccggtgtcgctggtggctaactacgtctcgatgtcgggactgctggcggccatcaccgagggactcactggcgccggcctggttgcgcaggacaacggcggcaccgtactgataaccgagtcggccagtccgttcgcgggtggggagatcacgtcctcttcgctgcctgcagctgttttcggtgatgccccggtttacacctccggcacggcatcaaccggcggcagcccggcggtaacggcgaatgtgacgcttgcctataacagcgccacgggaacggccttttccggcatgccggagggggtgcaacggctttcacttgctcaccgcgggaatgagtaccgcattgtctcgaccgacggcacaacggcgacggtggcgcgcctggttaacggtgccgttgatgagtcatggccgggattcaccgcccggacgatgatcgactatgaggccactggtcttaacgacacgctgagctggctggggccgttcctggtttgccctgaaaatgagaccgtcgatatgttcgaggtgaatttctctttcccgaacggtatttgcggctttgacagtaagggcaaaaaacggatccgccacgttgagtgggagatacagtatcgcgtctacggttccggatcggggtgggtgagtcaccagggcgagtatgcgctgaaaaacgtcaacgggttaggtttcactgagcggatcaccctcagttctccgggactggtagaggttcgctgccgtcggcgcaatgagcagggctcaaacaacgccagggattcgatgtactggcaggcactgcgcgggcgactgctgacgcgcccttcatcctatcccggcgtgtcgctgatggcggtgaccgttgagacgggtgggaagctggcggcgcagtcggaccgccgcgtaaacgttgtggccacgcgggcctacgactcaggaaccgccagaaccatttcgggggcgctgctgcatgtcgggaactcgctggggctggagatggacgtcgacaccatcaacgcgctggaatccgcgtactggacgccacggggcgaaaattttgatttcgccacgggcgacagtatctcagcgctggaaatgctgcagaagatagccaatgccgggaagtcacgttttctgctgagtgatggcctggcgacggtcaaccgtgaggggattaagccctggactggcgtgatcactccgcatgagatggtggaggagctgcagagcggatttaccgtaccgtccgacgatgattttgatggcgtcgacgtgacatacatcaacgggactacctgggcggaggagaccgttaaatgccggacgcctgataatcccacgccggtgaaaatcgagaactacaaactcgatggggtactgaatcaggatcacgcctaccagatcggcatgcgtcgcctgatgaaatacctgcagcagcgggtgacgttccagaccactaccgagctggacgcgctgtgctacaacacgggcgatcgcattgtgctcacggatgatattccgggtaacaacacaatttcctgtctggtggaggcgatgacaacggctggtggcgtgacaacgttcaccgttacggagccgctggactggtctttcgaaaatccccgcgcgctaatccgctatcaggatggctctgcatccgggctgatggtggcgagccgggtgggtgattttcagctgtcagtcccgcacctgagcgagtttgatgatcccatgcgggttgacctgtcgtcggcaaccatcgagccgatccgcctggtgttctgcggctcaacgcgccacgtctacgacgccattgtagaggagatcgccccgcagtctgacggaacctgccaggtcaccgcaaaagaatacctcgaatcgttctaccagtacgacgacgccacataccccggcgacgctgcttaa

SEQ ID NO: 32221 - DNA, 381 bp, Escherichia coli
atgtttattcctgataaataccgttcagtcacctggctgaagggcgggcgcgtatatccgcagctcgactgcttcggcattgtgaacgagatacgccgcgatttgtgcatgcctctctggcctgattttgccggggtcaccaaagacgacggcggactcgaccgggaagcgcgccggatgatgcttacccttgagcgctgcgaaccctgcgaaggggccggggtggcctgttattccgggtcgaccgtcacccatgtggggattgtcgtcagtatcggtggcctgctgcatgtggcggaatgcaacccgggaacgaacgtcacctttctgccgttgccgcggtttaagcggcgatttgtcaaagtggagttctggcgatga

SEQ ID NO: 32222 - DNA, 483 bp, Escherichia coli
atgacgcagattaaacgcctctacgccagcagcggcccggaggtgatcattgaaacgctgcagatcaccgttggctcagatattcactacctgtgtcagggctacgaggatattacggcaacgacggagaacggcgataccgtaacgtttaccgcctgtgcgatagacattgcgctgccggcgcgtaatgcggacggcacgcaagatttgaaatttgccctgtgcaatatcgatggtgttgtgtcaacggcgatccgcaatgccctggctaacagattgcctgcatcgctgacataccggagctatatctccacggatttagcagtgcctgcggcagtgccttatacgctgaaaatcaagtctggttactggacggcgacagaggtgcagatcactgcgggctacatgaatatcctcgataccgcctggccacgttaccgctacacgctccctgtcttccccggactgcgttatatcagctaa

SEQ ID NO: 32223 - DNA, 480 bp, Escherichia coli
atggctatcaccacaacgctttattacccctccgcttacctgcctggtccgcttaaagagagttttggtttaactcctgtatctcctctgaaacggactcagatggtaactggccgggcacggcagcggcgtgcctacacctcgacaccaacccaaacagatctggcctggattttttctgatgcccaggcgcaggcttttgaggcgtggtttcgggatgagttatcagatggggcggcgtggttcaacataccgttattaacgcctgtagggctgaaaaattacgtgtgtcgtttcacggatatttataaaggccccacgccagaaggcggactttactggagatataccgcgccagtagaactctgggagcgcccattgccgccgtctggatgggggcattacccggaatggatagtcggaagttcgttgcttgatatcgccctgaataaggagtggccgaatcatgacgcagattaa

SEQ ID NO: 32224 - DNA, 2436 bp, Escherichia coli
atgtctggcaagtccctcggtacgttaacaatcgacctgatcgctaaagtaggtggatttgttcagggcatggataaagccgaaagatcttctcagaagtggcgcgaccaggtaaaaaaagacgctaaagaggtaagttcttcaatcattgctgtgggggctgcagcggctaccgcagctgttggtattggcgctgctgggctagccattgttaaaaatactgcacagcaggttacagaagttgatcgctgggcaaaatctcttaaaatgtccacccaggatttgttatcctggcaatatgctgctgaacaagccggtttaaccggtgacaacatagccgatattttcaaagacattaatgataaggtcggcgatgcggtcctgaataaatcaggtgaggctgctcaggcgctggatactttggggctttcagctcagaagctggctcagcaatccccagataagcagctgatggcaatcagtgaagcattacagaaaatacccactcaggccgggaaaactaatattctcgaaagtctgggtaatgacctgtcaaaaatgctgccgttgttcgacaacaacaacgagaagctgaaacagtttatccagctatcaaaagattttggtgtcgcaccaccgcaagaagatattgataaccttgttaaggttaatcagttctttcaggatatagagactagcgcccgcggtcttaaaatggaaatggcttcggggctggctaaggttgaccttacgccattgcaggatgggcttgatgacattcgtgacgtcttcaccgatcctgctgttcttcaggggctatcagacttggttggtgaagccataagccttgccggggttgtggggcgtattgctggtggcttgggggccattgctacttatacccgctctcgtataggtgctgtatcaggtaattataatgctgctgatgaaagtgatatttcacagcgcattgaattccttaataaacgagggaatcaaagtaaggaacaaaaagacgaattagactttttaactaaacgtcttcaatttcttcgcgcgataaagtcaagaatgaccccggagcaggtagatagaggagcgaaaggactcacatctcttctttctgatcttggcattgatacggctaaggataatgatttttcgttgggaaaaggggagtctaaccagaatcagcccaaaataaaaccaaaaagcaatccgactgacaacgctttcaaaagtaggcttcttgatttacagaagcaggccgccctcattgaaacaaccggtaaaaaaactgcagaagtaaccgagctggagaagattaattttgatataaccagcggaaacctgaaaaaattatctgaagggcagaaggaacaacttcgaactgcggctaaaatccttgattccaagaaggaagagttacggcttaatcaggaaaatgcgaaagtagctgaatatgtttcagatctcgaaagacagaataaattagtccgccaagggtttgaaaaccaaatagttggccgttattctggtagtcgtgaacgttcacgcatgcaggataataatgatattcagcaagattttgcttctcgacaggaagagcttttaaatcaatttcagtctggagatattgaaaaaagtctatacgataaaaagaaagaagcgcttcaaaactcgctgaatgaaaggctaagaattcaagaggaacactataagaagttagaagagttacaaaacgatggtgtcgcaggtttcgtttctggaatatcagatcaagctgctgcatattcaaacctatatgcaaatatgcagcaagtaggtacacaaacgtttagtagtttaactgatatggtaattaactgggcggaaaccggtaaattaaacgctcaggactttgcggcgacattcattcaatctgttggggctgcattactgcaatatgcggctgctcaggtagcaatggcagcgttgagtgccttcactgcctggattggtgttccctatgtaggtcccgtggtggcgtcaacccaagcaatagctgcggcagctgctgctggcgtgttcatgactgctatcggatcggcgcttcatggacaggctcacgacggtatcgactctgtgcccgaaacaggaacctggctcctgcagaaaggtgagcgcgttacgacagctaaaaccagcgcaaaactggatgccactctggatcgagttgcaaaccagtcaacaggtggcggcgcgatttattcgcccacaatcaatatccccatcaatggtaacccttccgatgcaacgttggcgctggtccgtaaagctgcagatgagggggcagaaaggggataccggaaggcggttaattcagtcgcaagcggtcagggtgatttgcataaggccttgatggggaaaactacctcggggaggaaaattagctga

SEQ ID NO: 32225 - DNA, 393 bp, Escherichia coli
atgaagaaaatagcgattatgttatttgcattattgttaactgcgtgcgccgcaaatccacctagccaagttcagttgcactcggctgattatggggtgttaccggataactatcagcagcagataaaggattggtggggaaggatgttaaaagacccatattctgctcattatacttttggtacaccagagaaagcatggtttaaggatggcattttagctgaatcaggtggggctatgcgatatggatggcttattccgataaccattaatgctaaaaactcctatggtggatatacaggtgctgaagcacatactattttttactcccatgggaaaatagactccgctgatgctcaggtgaatgcgggctatacgggaaaagttaaataa

SEQ ID NO: 32226 - DNA, 264 bp, Escherichia coli
atgaacggcatcggtgggcggaccatagcggaggctcaggagcgaatgagccttcgtgagtttcaggtgtgggtaaagtaccgtaataagtatggtcagcttaacgttatgatgcgtaccgagtggggggcttcgctggtggcttctgtcctggctaacatcaataaggcaaagaacacgcctccgttcaaggttagtgactttgcaccgcacatcaacgaagcgccattatctcttgaagaagctatgaaaagttggcattga

SEQ ID NO: 32227 - DNA, 384 bp, Escherichia coli
atgcaacttactctcgatacgttaaaagaaaccggtgcctttaccgggcgtcccgtgaaaaaagaaattaagtggaaaggccgtgacaggaaagagcatatcgcaaccgtctatgtgcgcccgatgggctaccacaccactaaagctgaactgctggcgtataacgggaaatcggacccgattgctgagcgcattgcggcgcatatttgcgatcaggacggcgccccagtgtttaccgcggctgacattcttggaactgctaccccagatcgtggcgcgctcgatgggccgatcgttattgctttgctggccgtcatccaggaagtcaacgatctgggaaagactacgaactcacaggagaagacgagttctggtgtgagttag

SEQ ID NO: 32228 - DNA, 492 bp, Escherichia coli
atgtctgtattaacgcaaggcacgcaattttttgtgctcaagtctggcgtggtcagcgaggttgaatgcatcaccagtttcaaccccggcggcaaccctgccgatcagattgaagatacctgtctgagtgagcgggattcaagaacctacaaaaaggggcttaaaacgcctgcggccgcaaccgtcgggcttaacgctgatccgacgaacgccagccacattatgttgcatggtctcgctgaagcgaatgatcagacgccgttaacttttgcggttggctggtcagatggaaccagtatcccgacagccgccgctcctggcgctgaggatgctgttgatggcctggtgctgccatcggatcgcacctggttcattttccagggttacgtttccgacttcccgtttgattttcagggtaacgctgttgtgacgacctccgccacgatccagcggtctggctcttccgtatgggtgccgaaggccgcagcgtaa

SEQ ID NO: 32229 - DNA, 366 bp, Escherichia coli
atgattgctccaatatttgcagtttgcgcagccagccaggcagtcagggatttgttaggctctaatcccgtgcggctttatccgttcggtatgcagaacgataatatcgtttacccctatgcagtctggcaaaacataggtggcaaccctgaaaattatctaaaccagcggccagatgcagatcactattctctgcaggttgatgtctatggtgatactgacaccgacgtgatcgccgttgcccgtgctttacgcgacgcgattgagggcaaggcctatatcacccgatggggtgaacaaagccgtgatcctgaaacaatgcgataccgctattccttcgatgttgactggataacgcccagataa

SEQ ID NO: 32230 - DNA, 540 bp, Escherichia coli
atggctgatggcgtagaagtaaacctgactgggctcgattccgtcctggggaaactggatgccgtctcacaggtcactcgcgataaatccggtcgtgcagcgctgcgtaaagcggcaaacgtgatcagggacagagcgcgcaataatgccgcgcgggttgatgaccctctcaccaaagaggctatctacaaaaacattgtggtcagtttcagcagcaaggcatttcgcagaaccggcgatccaacgtttcgtgtcggggtgatgggcggcgccaggcaatacgccaatacaaaggccaacgtccgaaaaggcagggtgggtaaaagctttaacactgccggagataaaggtaatcccggcggggatacctggtactggcgattcctggagttcggcacagagcacgcagcagcaaagcctgttttgcgaccggcgatcaatggtgttgataccgacgtaattaatattttcgcagcggagctggaaaagtccattgatcgcgctgtgcgacgggcggctaaaaaaggaacgccggtatga

SEQ ID NO: 32231 - DNA, 333 bp, Escherichia coli
atgcaggccgggaaattgcgtcacaggataaccctgcaggagccggtaaaagaacagaacccgacaacgggagccgtgattaatacctggcgcgatgtcgcaaccctttgggccgaagtcgctgctttatccgcacgtgagtttatcgccgcccaggcctctcagggcgaagttaccacccggataacgattcgttaccgtgagggtgttacccgcaaacatcggatcctgtttcgtggccgcatctacaacattgagggcgttttacctgacccccggagcggcagggaatacctgacactgccatgttcagagggggctaacgatggctga

SEQ ID NO: 32232 - DNA, 213 bp, Escherichia coli
atgaacgagcaactggtaaacgcgctgatagcagcgctgagagaacaaacagcagcacagagagagcagacggaagcgataaaccgcctggctgaatctaacgtcgccctgtccgatgtaattatccagtcgctggctgcagatgacgatattgatatcacttcactgggtgatgatcgccctgtgtacctgagtcaaagaacgagggggtga

SEQ ID NO: 32233 - DNA, 327 bp, Escherichia coli
gtggaaataagcgaggaacagctggcgcagataaaggcgcatctgaaggttgatggtgacgacgaagatacgcttatttctgcctatgcgtcggcctccgtcgattatgttgagcggttctgcgacggggcgctggtcgaaacattaacgccgccagtggaaggggaaactcagccccgtgagattatttttacttccggcatctgggcggcaatgcttttgctgattggacactggtatgcgaaccgcgaagcggtagcgcagaacctttcggaagttccgctgggtgttgaagcgcttctgattcggcaccggaggtggaattaa

SEQ ID NO: 32234 - DNA, 288 bp, Escherichia coli
gtgcataacaaaaagggcgcggccagcaatggccgcgtaaatgcgatgaaaattaaagctctccgtatgttctcgcattatcacctgggtacggtatctcagggggaaatccgcgaggtgcataaaggaatcggcgaagtactggtgaaactgcatctggccgaggcggttgagccggaaaaggcaacagactctggttctgcggagcctgctaaagccaaaccagggggtaaaggtggaaataagcgaggaacagctggcgcagataaaggcgcatctgaaggttga

SEQ ID NO: 32235 - DNA, 1164 bp, Escherichia coli
atgtctgaattatctgtactggaaaaagctatcgaaaactcccaaaaagaagtaaaggagcttatcgaagaacagcgtaaatccatcaaccagaccggtgaaatcaacaagcagatgcagaccgatctgacgaaagcacaggaagaactgaaagccaccggtgcccgcctgttcgatcttgagcagaaactggccgggaactctcctgatcagactgcgcagaagtcatttgctcagcgcgtatctgaagatctgatgaagggctgggacggctcgcgtaccaaagcgaaagtcaccagctttgataaagcgattggttccggcgcagcgtcggcaggcgccctggtccagccgcagcagctgccgggtattcttatgccgggccttcgccgtctgactgtgcgtgacttgctggcacaggggcgtatcaccagtaacgcgctggaatacgtgcgcgaaaacgtgtttaccaacgctgcagcaccagtggcagaaggtaccctcaagccggaaagtaatatcaccttcaccaaagaaacggcgaacgtgaaaactatcgcccactggatccaggcatcgcgccagatcatggatgatgccccggcgctcgagtcttacatcaattcccgcatgatgtacggactggcactggtggaagagaaccagatgctgaacggggacggtaccggcgataacctgcaggggctcaacgtagtagcgaacgactacgaaaccacactcaacgcaaccggagatactggcgctgatgttctggcacacgccatctatcaggtatcgctgagtgagttcgaagcagacggcatcattctgaacccggcggactggcaccgtattgccctgctgaaggacgctaacggcaattacattctcggtggcccgcaggcgtttgcctcgaaagtgctttgggggcttccggtggtgtcgaccacggcgcagacggcaggcaaattcaccgttggcgcgtttggcctggcgtcgcaggtttgggatcgcatggatgccaccatcgagatcagcaaccaggaccgcgataacttcgttaaaaacatgctgaccatcctttgcgaagagcgcctggcgctggcccactatcgcccggcagcgattgtgacgggtgatattgctgtcagcactggtgcataa

SEQ ID NO: 32236 - DNA, 669 bp, Escherichia coli
atgcctgacattcagaagacgctggctttcgaccagacagaaatcaagttcatcggcgacggcagtaagggaacatttgaagggtatgcctcggtttttaataacaccgacgccgatggcgacattattttgccaggtgctttcgctggtgtgattgctaaccagagtcgcaaggtggccatgttctttaaccaccagacacgtgctatcccggtcggtaaatgggatgcaatgcatgaagatgacaaggggctatttgtccgtggtcaacttactccagggcttagcctggccgaagacctgaaagctgccatgcagcatggcacggttgaagggatgtcagtggggttttccgttgggcctgatgattacaccgttggcacgtcagggctcatcttcaaaaacatctcttacctgcgggaaattagcgtctgtactttcccggccaacgagctcgctggcgtaacggctatgaagagcatcgacagtatcaaatctattcgcgatgcggaggcctggctgagggattcagtcgggctttcgcgttctgaagcacaggcatttatcgcccgtgttaagtctgcaggccgaagcgagttcggtagcgacgacattgacgcgctggcacagcgcattaactcatttgccgctaacctgcggacaccttaa

SEQ ID NO: 32237 - DNA, 1278 bp, Escherichia coli
atggcagataccgattacagcattgacctgcggacgcgatcgccattctgggcgcgcatggcctctatcctgaccggcggccgcctggtgacacccgataagggctcgcaaatggcgggtacgtcagcgcacggtgtggttggtgattctgttgtgactgatgagcgtaatatgcaaatcagtacggtatgggcctgcatcaggttaatctccaccgtaacagcatctttaccactcgatgtttatcagaccaaaaatgatcagcgcacgaaagtggacaacagtcaccccctggcgaagctgctgagattccgtcccaacaacttcatgaccgctcttgagtttcgcgaagcaatgactatgcaactatgtgcctacggcaacgcctatgcacatgttgagcgaaacagtgttggtgacgtgattagcatggttccactgatgagcgccaatatggaagttcggctcagcgataacggtaaaaatattatctatcgctaccgacgggacactgaatacgccgacttttcacagaaagaaatttttcatctcaaagggtttggcttcaatgggctgactggtctttcgccgttggcgttcagtgcgaagtctgctggtgtggccatagcgatggaagataaccagcgtgaatttttcgccaatggtgcgaagtctccgcagatcctgatgactgacggcaaggtgctgacgaaagagcagcgcgggcagttggaggaaaactttaaggagattgctggtggcccggtcaaaaagcggctttggatccttgagagcggcttcaccacgcaacctatcggcgtttcgcctcaggattcagaaattctgtctgcgcgtaaatttcaggtcgccgaactggcgcgattttacggcgtgcctccacatctggtcggcgatgtggacaaaaccacctcctggggatcggggattgaacagcaaaacctaggctttctccagtataccctcaaaccctaccttgatcggtgggagtacagcattgagcgctggctggtcaaagagtcagaacagggcatcattcacgccgagcataacctcgacgggctgttgcgcggtgattcaacaagccgggcatcatttatgcaaatcatggtcaataccgggattcggaccgttaacgaggttcgaaggctcgataacctgccgccgctgcccggaggtgatgtggcgacacggcagtcgcagaacgtgcccattaccgatctcggaacaaacaaagagccccgcaatgccggggcttaa

SEQ ID NO: 32238 - DNA, 1533 bp, Escherichia coli
atggctaaaaaaactctgacaagagccgagaggaatatcctctggtgcgaaagaaatatttatattcccgaaggtaagtttgtcggccagccgctgaaaatggctgagttcatgaaggatgacttcagagccattttcgacaacaagcatggtacacgtcgcgcaatcatcagtcgcgggcgaaaaaacgccaaaacggtggaaaccgccatgctgatgctgctctacctgatagggcccgaggctgcaccgaactcgcagctgtattctgcggcacgctcacgcgaccaggcggccattctgtttaacctggcctcgaagatgtgccggatgaacccggtactaatgcagtacgttgcgatcaaggattcagctaaagaaatccactgccctgagctgggttcttattaccgcgcactgagtgccgaagctaccacggcctacggtttctcgccgcgatttgtcgcacacgacgaactgggccaggtgcgtggtccgcgagatccgctttatgaagcgctggaaaccgccaccgctgcacaggataaccctatttcgataatcatcagcacccaggcgcccgatgcgagcgacctgcttagcctgctgattgatgatggcctgaccggagccgatccccggacggtggtccggcttcagaccgcgccggaagatatcgatcctttctctgtcgaggcaatcaggctggcaaacccggccttcgatgtgttcatgaaccagaaagaagtgctggatatggccgccagtgcgaaacgcctgccgtctcgccaggcagagtttgagaaccttgttttaaaccgcagggttgaagcgaaaagcccgttcgttagccagagtgtatggcatatgaacaaggaggaacccggcgaacttgcgggggctaccgtatggggcgggctcgatctttccagcgtgtcagacctgaccgcactggtgctgaacaccacgcagggcgatgtgcactgtaaattctggctaccggaggaagggctggcagataaggcgcgtaacgatcgtgtgccttatgacatatgggcgaagcagggctggctaaacacgacacctggtaaggctatcgagtatggatttatcgcgagggagctgcggcgcgtttttgatctctgtaacgtcagggcgctggcgtttgaccgctataacatgcgcttccttcgcccgcatctcatcgatgctggtttcacagatgtggagctcgaacgattcgtagagttcggtcaggggtttgtttccatgtcgcctgctctcagggagctggaagccaaactgctcggtgcgcagctgaagcacggcaatcatccgatcctcgaaatgtgcgccaaaaacgccacggtaatcactgaccctgccggtaaccgcaagtttgtgaaaggtaagtcgagcggacgtatcgacggcatggtagcgctggcgatgtctattggcgcgcagactagtgacgaggtagaggagcagggtgacgttaatgatttcatttacaactttttgagcgtgtaa

SEQ ID NO: 32239 - DNA, 435 bp, Escherichia coli
atggcacagcgaggcagaaaatctcttgccgcgacgacggctgtgtcgcttccggctctggctgaaagcaggctgcagccctcgtttcaccttagcgatccagagataaacgtttggatcagactggttaacgataacccggccagctcatttactgaaacacatcgcgacatgatggaaatgtactgtcggcatgtggtgcaggcgagactgttaaccactcagatcgaggagtttgagctggagtggctggctcgggatgatgggctgaagcgctacgataaattgctcacgatgcgcgaacgtgaagtacggtctgcgtcttcactggcaacgcgactgcgtatcacccggcaggcgactgctgatcctaaaacagtaggacgcgccaacaaaaatctgccgcgggagaaaaaaccctgggaaattgaataa

SEQ ID NO: 32240 - DNA, 210 bp, Escherichia coli
atgcaagacctgaagattgaataccaggatggcaagctggtggagctgagcattgatggtatgagctttctttctgcatccgccatatccttcagtcatacagcaaaagagacgctaccaacgatcatcctgacaatgtctgtcggtgtcggtgagcgcctggtgttacccagtcctccccgtgaaaacctgcggatcatcgagaaatga

SEQ ID NO: 32241 - DNA, 291 bp, Escherichia coli
atggcgtcaagttcaccctggcatcatctctataacactaaacggtggtaccggctgcgttatcaccagcttcagaagcaaccactctgcgagtttcacctcaggcgaaatcaggtgatatccgcaaccgttgttgatcacatcaaacctcacaagggcgatgaaaccctcttccacgacccgaacaatcttcagtcgctatgcaagcgctgccacgactcggttaaacaacgcatggagaagggcggaacggttaccgagttcgacaatgaaggcagggttatctggtaa

SEQ ID NO: 32242 - DNA, 375 bp, Escherichia coli
atgggcgaatatataagcgctactattactggattatgggaatgctatttgtcatggtccaaacagaatcgagagctaacattatccaagttggaagcgctatcaaatttattgatagataatcgggcctacctgagggatttcgcacaccaaggtgttaaagacgctcaaagggaacttgaacttgcaaaggagtggaggcgtgtcggtctcttgtttcaagatatttctcctgagttgtcagacatatgtgagaagaaatcagactactggatatattcagaacgatataccaagcagaaagttaatgagctagggataacaataagaaatctcgaacataagctaagaatggcaaagaaaaaccttctatag

SEQ ID NO: 32243 - DNA, 627 bp, Escherichia coli
atgaaagttggtggatgggacattaatcatgagaatatacttaaaataattaagtctattccatatgttggtgcaatttttatcattgccaacttttatgctaattctggagttttatcagaaaggaagcgaattgcaaatttcaaaaattgggtgcggagggtactttctggtgttttatttacttttgttttaagtttgttgattgtgacatttttcagagatgggctttacaatcccaactcaaacactgcaggtctcgacgcaacccttgttgctttatccatatttccgagcatattaggttttggcattggtgtgtttgttgttgtttttgcccttccgaatcaattcattgagaaaataaatcttatcaaacataacggtaaaaataaaacatttggcgcatcgttaatggttgtcgatatggcttatcctctaatggtatatgctgttgtcctgatgggtgagttttttctgaaactattccaggttgggtttattacacatgtgttgagtatctttttattattatatggaatgctgatgacttttgatttaatatctatgattttcatgacagcgtatgcgcttttagctacgcaagcatcaagaaaccctaaatag

SEQ ID NO: 32244 - DNA, 936 bp, Escherichia coli
atggctacttacaaatattataatatacagatgctacctctaaccaatagtaaaaaacatattggtaaagagggttatattaaattattccagcatctgggagacaaacttcgcaaagttttgtcatcggaaggtgatttaagaaatatcgctgttccattgaggaatgatttcttttttgctccgtatgaaataaatgctagagaggacatggtttatggtcgttttttaaagtttgacaaggtagatgttgttagaaaaactattagcagagttcagacttatgcagctggttttggcgagtctagtaagatttatgagtataggtttgtatttgatcctgtattgcatatccttgctatcgaagatagcccttcattacctagcgcaagtgttttatataaggtgcttaatgaggtgtttaaagatgcgcgcaggaaattatatccatcctttcgcatgagtgttgatgaattaacatcttctgctagtctagataatgttataaaagagtctaaaggatattattcctttaaaacagaaataactttctctaactctaatgattttattgaaggactagaagaattgctagagggggttgaggctgaaatgaaagataaagggattgataagctggagcataaagagtcatcagacaaagactcaataatgactgacgttagtacaatcgcgttggtttatgcaggtttatcatgcaagtttgggaatactgaaatatcttataaagacaaaagcaataagaaaaaagttttcaaaatggccgattatcctgtaagaaaacgtgtgtctgagtctatgaaaaaaagggcatcaattttagactattattatgatgtgaaaaacacaattaatgcagctaataatgagtccagaacaggaagtggattgctaaagaaaattagaaaaggatag

SEQ ID NO: 32245 - DNA, 276 bp, Escherichia coli
atgagcttagaaattattgctgggctggtggtcgtaatcctgggcactatcgctggtgcattcggcattggtcacgctcgcgggaccaataaggcggaagccaaagccgatcagcaacgtaccgaagaaaacgccgccgccaccatcgccgcggcagaacgtaaggcggaagttgtgaaaggggccagtaatgtacagcagactgttagccatatgcctgatgacgatgttgatcgggagctgcgcgaaaagtttacccgccccggtagtcgttga

SEQ ID NO: 32246 - DNA, 309 bp, Escherichia coli
atgcaactgaaaatatgtgtggtcgcttttgcgcttcttctttctgcgtgtgatgccagccctgaacctgccaaatcgactatggctgtatcatcccaactttctgcagatgcagaccggattagcgtgacaaaaatgtctgagttccgcgatgggcttgcatatggaaattggcggggtgtttatctcattcaggataagcagaccggacaggaatacatcggtatcagcggtattgggatttccgaggtaggttcgcatagccagatggttggcaaggttccgcaatcagtaagggatgaacgatga

SEQ ID NO: 32247 - DNA, 630 bp, Escherichia coli
atgaatcaaacacaattccagaaggcggctggtatcagcgccgggttagctgcgcgctggtttccgcactttacagccgcgatgaaagagtttggcatcacttccgctatcgaccaggcaatgttcattgctcagtgcggccatgaaagcctcgggtttaacagggtagtggagaatttcaactacagcatcgccgggcttgctgattttgttcgttacggcaggttaacgcaggatcaggccaattccctcgggcgcagccagtcggaaactgtgttacctctggagcgccagcgggctatcgccaacattgtctatagcaagcggttgggtaacagcagggcaactgatggatgggtttatagagggcgcggacttattcaaataaccggactttctaattacagggactgcggcaacgggctgaaggttgatctggtggcacagccagaattactggagcagtcctcctacgcagcccgtagtgcagcatggttctatgtctcaaaaggttgcttgaaatatccgggtgatcttgtccgggtcacgaagattataaacggcggacaaaacgggattaataaccggcgcgctcgcttcctgaaagcaaaatcggtactggtggtgtga

SEQ ID NO: 32248 - DNA, 282 bp, Escherichia coli
atggtaacaagtgatccgagcgcaatcgtcaatgcggtgatatgcgctgtaattgttggtgcgttgatgttctaccggcgcgacgggtcaagacaccgccccatgatatcgctgatggcttacttcactgtgctggtttatgccagcatccctttccgtttcctgtttggcttgtacgagtcatcccactggctggtggtactggcaaacattcttatctgcggcgcggttctctggttcagggggaatatagcgcgtctggttgatgcactgaggcactaa

SEQ ID NO: 32249 - DNA, 396 bp, Escherichia coli
atgtccgatcctgtttctggcacaacggtagctgctggcgggctgatgggggccagtatgttcggccttgcaactggcattgattatggcgtggtatttggtgcgttcgctggggcagtgttctatgtcgcgacggcggtaaatatcagccgcctaaagctggtgggctacttcataacttcattcatcttcggtgtgattggtgctcctctgctggggtcttacttctcaaagtggacggggtacagtgacaggccgcttgatgctctcggtgctgtaatcgttgcagcaatagccattaaattgctgacgttcgttaacagtcaggatctgggtagcctgtttgggattctctctcgcttacgtggaggagggacaagcaatggtaacaagtga

SEQ ID NO: 32250 - DNA, 597 bp, Escherichia coli
atgaccagttcagaacttttggaattgatcaaaaaagatgtaagtgatgtaaagcaacaaggttcagaaaccatcccggtcgataatttacttcactatctttcagaaatagatgtgacagagcagccagaggctaatgctttaactctcgaagggattaaacatcaaaactccacccaattggaaataatgaaaattgaaaatagctttcaaatagagtctttcaaagctgctatcagtattggtgcgaatgcttgcagaacatttctaataatgaatggaggtgcagcaatcgctctgttggcttttttaggaaatatttggaacaagaattcctcagctgaagctgcgtctgctatcgcatcagctctctatcttttctgtggaggagtcgttctggccggactttgttcgggcttatcctatttctcacagtgctgcttcgcatcatcatatcttggaaccaaaaaattttatctttggctcgggcatacaataaatgctgtagcttgtatatgcggcgccggttccatcttcatatttgcttatggttcctattgtgcttatcaatcaatgattgctcagttagtaaaataa

SEQ ID NO: 32251 - DNA, 579 bp, Escherichia coli
atgattaacccgtccgaggttggaaaagctggtgaaatggtcaggctgaaaacgctggaggccatctggattcaggggaagctgcgcatgtggggccgctggtcttacatcggcggcggtagtggcggcaatatgtttaaccagttactggcttccgggaaagtcactaaaacagccatcaacgaagcattacgccggatgaagaagtctggcatctcgaagcctgagcttgaggcgttttttcgtgaaatactcgcggggaaaaacaaaagcggcctggccttctgtacagacgatgaaggactgctgattgataaggtactgggggcagtccttattacgggtggtcacaaagagctgtatcacctgctggtggagcattaccggttacggaagagcaaacgccgcatagcggaagagctctatgaaaagcatcctgactggtgctttatgacctgtaggagaagagttgatgcatggataagtttggcagaatcgatgctgtacgcaccaatgtgtgacgcattcggcacaaatcgcgacagattttacttgcaaagtgagccagaaactgcttga

SEQ ID NO: 32252 - DNA, 378 bp, Escherichia coli
atgaaactgactttaccatttccaccgagcgtaaatagttactggcgcgccccgagcaagggaccgctgaaaggcaggcatctggtaagcgagacagggcgcaagttccagcaggcagcgagagcggcgattattgagcaactgcgggccgttccccggccatcctctgatctggccgaggttcacatagtgttgtatccgccggatcagcgccgtcgggatatcgataactacaacaaagcgctgttcgatgccctgactctaacaggcgtctgggaagacgacagtcaggttaagcgcatgctggtggagtgggggaacatcgtgaagaaagggaaagtagaaatcactatccgtcgttttcgtgcagctgcctga

SEQ ID NO: 32253 - DNA, 810 bp, Escherichia coli
atgagcaagccatttctgaaatgggcaggtggaaagtatacccagctggctgacctgttcgtgcatatcccggcagggaaacgcctgatagagccattcgttggtggtgggtcggtattcctgaacagcgataagcacgcagattatctgctggcggacgttaacccggacctgattaatctgtatcagatgttagcggtcgtgccggatgaagtggaattgaaggcccgctggatgttcgagcacatgcggtcaccagatggctatgagctgatccgttccgagttcaacgctcagacgctggatgctactgaacgcgcagctgcattcctgtatctcaaccggcattgtttcaatggcctgatgcgctacaaccaggcgaacaagttcaatgtgggatggggaggctacaaggcgccgtattacccgctggtcgaaatgaaatccttcgccgctatggcgcataactgcgtcttcatgaccgctgattaccgccggacaatcagcctggccgggaaaggggatgtggtttactgcgatccgccttacgaaccgatgccgggaacaaccggattcaccgcctatgccgctggtggttttagctgggagaaccaggtggacctggcgaagcaatgcgtatctgcctttcaccgtggcgctcgggtagtgatttctaactcatctgcaccgaaggttctcgacctgtaccgggagcatggttttaacctgcaattcatcaaagcgcgccgttcgatttcctgcaaaagcagtacgcgggaagtcgcaaaagacgttgtcgcgatcctttaa

SEQ ID NO: 32254 - DNA, 915 bp, Escherichia coli
atgagcctgttaatgccatcaaggccgatagtcatcaatcctgaccttgcgtacagcataggcctgaatgaagccattgcgctgcagcagcttaactactggctgcaggagactaactcagggctggagcgtgacggcgtacgctggatctacaacacgacagagcaatggctggagcaattcccgttctggtctgaatccactctgaagcgcaccttcacccggctgaagagcctgggcgtgcttaaagttgagcagctgaacaagtcccaacgcgacatgacgaactactacacgatcaactacgagagtgagcttttagatgaggtcaaagtgaccaaatcgaagaagtcaaaatgcgccgttccatcaggtcaaaatgacacgatggaagaggtcattgtgaaacgctccaccgggtcaaaacgaaccgctgtcatcaggtcaaattggcacgatgatcttacagagaatacaacagagagtactacagagattacaggtaaagactcttgtccggttgcgctgcaaccagaccagaccgatccggcagaactcgttctggatcatttcaatcgggtaaccaactcgacctatggcaaggggggacgaaccaaaacgacgctgggttatatccggggacgcctggccgaagattacagccctaaagacctgatgctggtggttgactacctgaacgagaaatgggctcaggatccgaagatgagcgactacctgcggcccaaaacgctgtttgctcccgagaactgcgtcgagtatttcgacaaggccaaaaaatgggaagcagccgggcgcccagcctggactggcggaaagtgggttaaacaagacacggcgttcaagtccagttattccgacgtggattattcagtgccagcggggttccgttcatga

SEQ ID NO: 32255 - DNA, 462 bp, Escherichia coli
atggtagagccaaacctcaaagaagccgtcaaagcgatgtgcaaagcatatccaggtgggcgcgaagcaatggctggcgcactgggaatgaccgtgacgcagttcaacaacaacctctacgagaaaaacggctgtcgattttttgaagtatcggagctggaagcgatggaagacatttccaacacgtcactactggcagactacttcgcccgccgtcgtggtgctttgctggtggatgttccgcacctggaagagctggatcgcgtggacttgtttagccgggcaatgcgtacctctgccgccaggggacaggttgatcagattatcgaacaggcacttgaagatggcgttattgaaaggcacgaggccgaagaaatcatggtgcatcaccgccgccatctggcagctcgggaagaagagattgccgcaattatcacgttattttcacgcaaaaagaagtga

SEQ ID NO: 32256 - DNA, 243 bp, Escherichia coli
atgcaatcaccattaagaaaattgcgaaaatcgcatggcatgaccttattgcacgttgcaaccggggtacaggtagatcctgcaacgttgagccgcattgaaagatgcgagcaagtcccatctgtcgaactggcggagagattagccaagttctttagaggagaaataagcgaattacacattttgtacccaagtcgctatcaaacagatgacgtaccaagtgcaaataatcgtactgcttaa

SEQ ID NO: 32257 - DNA, 696 bp, Escherichia coli
atgaaaataggatctcgcatacgacaacttcgcttagcgaagaacattaaaatcgcagagcttgcagaagctgtgggcgttgatgctgccaatatttccaggcttgaaactggtaaacaaaagcagttttcagaacagacacttaaccgacttgctcaagctttaagcgtaagtgtacctgacctatttacctctgacgaaaatgatactactgtacatataaacagtaaaaaatatgcatctcccgtaaaggatgtggatgtatacagagtcgaggtacttgatgtgagcgcaagcgccggggcaggacatatacacggtagtgacgtcatagatgtcattcatgctatcgagttcagcaatgatcaggcattggcaatgtttggtggcaggactccatctggagtaaaggtcatcaacgttcgcggtgatagcatggcctcaacgattgagcctggcgacctaatctttgtggacgtaactatcaatgagttcgatggggatgggatttacgtctttggttttgatggaaaagtttatgttaaacgcctgcagatgataccagaccaactgctagtcatctctgataaccctcgttatagagaatggaatataactaaagagaatgaacacagattctatatctatggaaaggttttaataagccagtctcagtcctttaaacggcatggatag

SEQ ID NO: 32258 - DNA, 300 bp, Escherichia coli
atggctaagacagcaaatcaattgattaaacaggcgtacgaaatagccaaaactatgccaccagaacaggcagcaatcatcaaggaactggctaccgtcctcgatgtttcgaatgtagctctgcgccagacacgcaccgaacgtgacgcccttctcgcagaggtcaaatcttgggcgaaggagtgtgatcgtattactgagcgatataccaagaagcgcataaatctgcatgtcctcgaagcaatgcgcgatttgaaagcaatttgccccaccagcttccgtaacgtggaggctctctga

SEQ ID NO: 32259 - DNA, 786 bp, Escherichia coli
atggctaaagactcaaagctggtatatggcgcgagtggcaaaacgaacgttttgacgttcgaacctgaaaacctgcacctggttaccgacaaaacgcacccgctttacgatgagcgtatccacctgcctatcagcgaggcaatggtgctgaacatcatggaccagggcgttcttgagccgattatcgtctggaaagacccggagacagggctgtcttgtgtggttgatggtcgccagcgtgtgcgacatacactggaagccaacaagcgtctgtcgaaagagggcaaagaaccgttactggttccggcagtcgctaaacgtggctctgccgttcgcatggcgcaggcgatggtaagtgctaacgaaatccgccaggctgatacgccgctgggccgagcaaagaaaatggctgatgcgctggaccgcgggcacgacgaggacgatttatcgctgatgtttggcgtgagtgttcagacagtacgtgcaacgctgtcgctgctggatgccacccaggctgtccgcgatgcagtggaatctggaactgtcaccgttacccaggcgcgtcagcttggtgcgctcccacctgaagagcagcgtgccaaagtgtcagcaatcgagctggcgacagctggtacaaccggccatgaaaaagcccggcgtcagcgtaagattctcggtgaggaaaagccgcgtctgaaaacccgcaaagaaattactaaagccctggaatctgccgagggtgagtatgcaagcgcactccgttgggtgcttggggagtccgtatga

SEQ ID NO: 32260 - DNA, 192 bp, Escherichia coli
atgacaatcataaaaacccataccggtaccgtgatcaccaaagacggtccgaagcttaaaaaactgcatcagacagagcggatgtgggtcgttggcaaaaacgagttttaccacaaagcgaccggatgccgtcattttgcagaaaatacgcgccgccggctgctgctcgacaccatcaagcctatcgagtga

SEQ ID NO: 32261 - DNA, 237 bp, Escherichia coli
atgtcacgtatggtctctttactcgaatgggcaaaagatgaattcggtagtgaagcccctagcgagcgagtattaaaaaaatatgctaaaggccagatgatagcaccaccaccgatgagagtcgggcggcgctggatggttgacaaagaggctcgttttataggtgtagttgctgaacctcaacttccaataaatgttaacccaaaactgagacggataattagcgatggcagctag

SEQ ID NO: 32262 - DNA, 1143 bp, Escherichia coli
atggcagctagaccgcgtacccataaaatcactattccaaacctatattgcaaacttgataaacgtaccggaaaggtttactggcaatacaaacaccctatctctggtcgttttcatagcctcggcacggacgaagctgaagcaaagcaggtggcaagtgaagcaaatacgattattgcagagcagcgcaccaggcagatccttggtattaacgagcgtctggctcgcatgaaaggaaaccgcacggatattacagtttcttcatggctcgacaaatatgaattggtgcaggaggaaagattgaaacacaacgaactgcgcccaaactcttttcgacagaaagctaaaccaattcgtctttttcgtgagcattgtggtatgcaatatctaaaagatataacagcacttgatatttccgaaataacagatgctgttaaggcagagggtcataacaggatggctcaagttgtacgcatggtactaatagatgtttttaaagaggctcaacatgctggtcacgttcctccgggatacaaccctgcccaagcaacgaaacagccacgaaataagataagcagacaaaggctatctctggaggaatgggaggctatttatacatccgccgaacaacaacaaccttatttgcaatgtggaatgttgcttgccattgtaacagggcaacgcctcggggatatttgcaatatgaagttttcggatgtatgggatgatatgctgcatattgagcaggagaaaacaggaactcgtttagccattcccctttctctcagaaatgaggcgttaaatattactctgagtgatgttatttcaaaatgtagagatgctgtggtgagtaaatatcttgttcattttcgccatagcacctcacaggctagtcgtggtgaccaagtgtcagccaaaacacttacttcaacgttcaagaaagcacgggataaaagcggtcttacctgggaagaaggaacagcaccgactttccatgaacagaggtctctttcagagcgattgtatcgtgagcaaggaatagacactcagaaactattgggccacaaaacaatgaaaatgactgacatatacaatgatgaccgcggcaaagagtggatcgttgttggtaaaaaagcagtatga

SEQ ID NO: 32263 - DNA, 186 bp, Escherichia coli
atgcttcaagattattatctttacttcttacaagatttttatcgctacttgaaaaaaattcatcaacataatcgccatgactatctgcaccgtgagtatgataagcagcaactctatctgtacctgtgggacattttcttttcagaggatatgactcctttcttaaattatcagtttctgccttag

SEQ ID NO: 32264 - DNA, 981 bp, Escherichia coli
ttgttgaaatatagaaacttcgttgctaagaagaaaaatttataccaaaacgaagtgtcgtatgttaaaaatttacatattgcactatgctttgaccgtgaattcataatgccagcgggtgttgcattatattcaattatatccaacaatagacatattaaccttcattttcaccttcttatatcaggcatagaagaaaaggagtgttcagctttttacgaactagaaggtcctaatacatcaatatctgtatattatataactgataaatttgacattaatccggatacattagttcttggtattcctttatcaacatgtttacgttttttaatcccagaagttattgatgataaaataaataagatactttatcttgactgtgatgtcatatgtaatggtcctttagatgaactggttgattataatttaaatgctgatattgcatgtgtaattccagattcgccagaaatgcaagaacgtgtaaaaaaattagactatggcattgagtttattaattattttaatgccggggttatgtttattaataccagcgaatggaaaaaaaataatataacacaaaaagcgttagaaatgatcaacagtggaaaagtatataggtatgcagatcaggatgtgctcaatattttacttaatggacgagtgcattaccttgataagaagtacaataataagacaacattgtcagtacgatgtgatgaagaacaaaaaaacttgcccaacacaattataatgcattatgttacccagaataaaccatggtacaaaatatttagagcacaaaattttgatcattatttttcaaattctccttggaagaaccataaaagaaatctagctccatcatcaagtgagattaggttaaagtctaaagttttttggctagaaggaaaatattgtaaagccatttcttattattataagtatttacttgttaaattatttggcttaaagatttag

SEQ ID NO: 32265 - DNA, 804 bp, Escherichia coli
gtgagtgaggaaagccgccgctggctggcatcgtgcggcctgaccgtggagcagatgcaaaaccagatggacccggtgtacacgccggcgcgaaaaatccacctgtaccactgcgaccatcgcggcctgccgctggcgctcatcagcacggaaggggcaacagcgtggtgcgcagaatacgatgaatggggcaacctgctgaatgaagagaacccgcatcagctgcagcagcttatccgcctgccggggcagcagtatgatgaggagtccggcctgtattacaaccgccaccgctattatgacccgctgcaggggcggtatatcactcaggatccgattgggctgaaggggggatggaatttttatcagtatccgttgaatccagttacgaatacagatcctctggggttagaagtttttcctagaccattccccttgccaattccatggcccaaaagccctgcacagcagcaagcagatgataatgctgcaaaagcattgacaaaatggtggaacgatacagcatcacaaagaatatttgactctctaatattgaataatccgggactagcattagatataacaatgatagcttctcgtggaaatgttgcagacacagggataactgatcgtgtcaatgacataataaatgacagattctggagtgatgggaaaaaacccgacagatgtgacgtacttcaggaactaattgattgtggtgatattagtgctaaagatgcaaaaagcacacagaaagcctggaattgtcgtcactccagacagtcaaacgataaaaaaagatag

SEQ ID NO: 32266 - DNA, 687 bp, Escherichia coli
atggtaagtggtcgttatgtcacggcaaacgaaagcgcatcggaaaaagataatcaggataataacgggtattatgactggaaagatacctggatgtttggcacatctttaacgcagaaatttgataaaggtggcttcaacgaattctccttcctggtcgcgaataactctatcgccagtaactttggccgttatgctggcgcaagtccatttaccacctttaatggtcgttattatggtgatcacaccggcggaacagcggtacgtctgacttcgcagggcgaagcctatattggcgatcatttcattgtagctaacgcgattgtttactccttcggtaacgatatatatagctacgaaacaggcgcccactctgatttcgaatctattcgtgcggttgttcgcccggcctatatttgggaccaatataaccagacaggtgttgaactgggctatttcacccagcaaaacaaagatgcgaatagtaataaatttaatgagtctggttataaaaccacgctcttccatacctttaaagtcaataccagtatgttgacctcgcgtccggaaattcgtttctacgccacgtatatcaaagccctggaaaacgaactggatggcttcacctttgaagacaataaagacgaccagtttgctgtcggtgcccaggctgaaatctggtggtaa

SEQ ID NO: 32267 - DNA, 1263 bp, Escherichia coli
ttgaataaaagaatactatcaaattcaatatggatgatgtctgaaaaaatcatatcactatttggattgatttttgttacatcatttgttgcgaaatatgtaggtgctgaagtatttggtcaaattgcttttgcaacctcactttttcagattgcaatgataatagctcaattaggcagcgatgttataatttttaaacgcgttagtaaaaaaatagattcgggtgtaaggcttattacgtcaacaatctatttaagagctattacttatattttgatagctatcccaatagttattgtaagttatgagaaaaatgatgttaatgcacttttttttattattgcctgtgctatctcatgctttttcaatgcaatggatgtttttggtatatattatgacgcaagattagaatcaagaaaaaatacaattattaatatgttaggtttgattattagtttatctttgagatggcttattgcttttgttcaccttgaaccagtatatttatgtttgccgattattctaactggttttattccttgcgcctttagatggggtcttttccgaaaggaacatcaatttgatagtattaaattgaaacataaaataaagtacatgaaatacttgctagttgcaggtcttacatttgttgtatcaacaatctctgtcgccatatatactagggtttcaatgctatctctaggattcttttacgataaatcaattgttggggttttttcaattgctgtttctttagctgcatcatggtcatttgtctgtaattcacttatcacttcgtcattaccatcaattttttctgaaaaaaatgataacgttgctacccataaagcatcaaaacttaatttgcttgttgtaattattagtttgccaataatcttatctacatatgcttttggttcaatgattataaatgccttatatggtgaggcttacaaagcagcatatatacctttaatgattttgtcattttcgactatgatttcatcacttggtgttatttcatcgagatttattgcgaggtactcaggttatgcttttctttctaaaaaaatgttcgccatacttatatttagtttggctgtgaatataccatttatatatatgtatgggatgtgtggtgcagctgctgcgactttattgacagagttgttttctcttactgttttcaattatttatttaggcgtgggcttgtattaaaaatgcatctgcaaacattcattccaagagctggtaatagataa

SEQ ID NO: 32268 - DNA, 1065 bp, Escherichia coli
atgaagattcttgtcaccggtggcgcaggctttatcggctctgccgtagttcgtcatatcattgaaaatacccgggatgaagtccgcgtggtggactgcctgacctacgccggcaacctcgaatccctggcgccggtggccgggagcgaacgctactcgttttcccagactgatatcacggatgccgctgccgtggcggcccagttcagtgagttccgcccggatatcgtgatgcacctggcggcagaaagtcatgtggatcgctccattgatggcccggccgccttcatccaaaccaacgtgatcggcaccttcactctgctggaagcggcccgtcactactggtccgggcttggggaggagcagaagcaggctttccgcttccaccacatctccaccgatgaagtgtatggagacctgcatggcaccgatgacctgttcaccgaagaaaccccgtacgcgccgagtagcccgtactccgcctccaaagcgggcagcgaccatctggttcgcgcctggaaccgcacctacggcctgccggtggtggtgaccaactgctccaacaactatggtccgtatcacttcccggagaaactaatcccgctgactatcctcaacgccctggcgggtaaaccgctgccggtgtatggcaacggggagcagatccgtgactggctgtatgttgaggaccatgcccgtgcgctgtataaagtggcgaccgaaggcaagagcggcgaaacctacaatattggcggtcataacgagcgtaaaaatatcgatgtggtgcgcaccatctgcgccattctcgacaaggtggtggcgcagaagccgggtaacatcactcatttcgcagacctgatcacttttgtcaccgaccgtccgggacacgacctgcgctacgccattgatgccgcaaaaattcagcgcgatctgggctgggtgccgcaggagacgttcgagagcgggattgaaaaaaccgtgcactggtatcttaacaaccagacctggtggcagcgcgtgctggatggctcctatgccggtgagcgtctgggcctaaataactga

SEQ ID NO: 32269 - DNA, 870 bp, Escherichia coli
atgaaaggtattgttctggccggcggctccggcacgcgtttatatccgatcacccagggcgtctccaagcagctgctgccgatctatgacaagccgatgattttctacccggtgtccgtcctgatgctggcggggattcgcgacatcctgattatctccaccccggacgacatgccttccttccagcgcctgctgggtgacggggcgcagttcggggtgaacttcagttacgccatccagccgtcgccggacggcctggcgcaggcctttatcattggcgagaagttcatcggcaacgatgcctgcgccctggtgctgggagataatatctactttggccagagcttcggtaaaaagctggaagcgacagcggcgaagacttccggtgccacggtgtttggttatcaggtgctggatccggagcgcttcggggtggtggagttcgatgagaactttaaggcactgtctatcgaggagaaaccgctgaagccgaaatcagactgggcggtgaccgggctctatttctacgacaataacgtggtggagatggcgaaggacgtgaagccttctgaacgcggcgagctggagatcaccaccctgaaccagatgtatctggagcaaggtgacctgcatgttgaactgctggggcgcggttttgcttggctggatacgggcacccacgacagcctggtggacgcgtcgcagttcattcacaccattgagaagcgccaggggatgaaagtggcctgcctggaagagatagcctaccgtaatcagtggctgtcggcggaaggggtggcggctcaggcggaacgcctgaagaaaaccgagtacggtgcttatctgaagcgcctgctgaacgagcgttaa

SEQ ID NO: 32270 - DNA, 891 bp, Escherichia coli
atgaagattttactgattggcaagaatggccaggtgggctgggaactgcagcgttcactgtccaccctcggcgacgtggtcgcggtggactactttgacaaagagctgtgcggcgacctgactaatctggaaggcatcgcgcagaccgtgcgtaccgtccgcccggatgtggtggtgaatgccgccgcgcacacggcggtggacaaggcagaaagcgagcgggagctctccgacctgctgaacgacaaaggggtggcggtgctagcggcagagtcggcgaagctgggtgccctgatggtgcactattccacggattatgtgttcgacggcgccggcagccattatcgccgggaagatgaggcaaccggcccgctgaacgtctacggcgaaaccaaacgcgccggtgaactggccctggagcagggtaacccgcgtcacctgattttccgtaccagctgggtgtatgccacccgcggcgccaactttgccaaaaccatgctccgcctggcgggtgagaaagagacgctctccatcattgacgaccagcacggggcgcccaccggcgctgagctgctggcagactgcacggcgacggcaatccgtgaaacgttgcgtaatccggcgctggccggtacctatcatctggtggccagcggcgagaccagctggtgcgactacgcccgctatgtgtttgaggtggcgagggcgcacggtgcagagctggcggttcaggaagtgaagggcattccgacgacggcctatccgacgccggcgaagcgtccgctcaactcacgcctgtcgaatgaaaaattccagcaggcatttggggtgactctcccggactggcgtcagggtgtggctcgcgtggtaacagaagtcctgggcaaataa

SEQ ID NO: 32271 - DNA, 555 bp, Escherichia coli
atgaacattattaaaacagatattcctgaggtgctgatttttgaaccgcgcgtgtttggtgatgcgcggggcttcttcttcgagagcttcagcagcaaggtgtttaatgaagcggtgggccgccaggtagattttgttcaggacaaccactcccagtcccagaaaggcgtactgcgcgggctgcactatcagctggctccgcacgcccagggcaaactggtccgctgtgtggaaggtgaggtgtttgatgtggcggtggatatccgtcgttcatcgcccacctttggcaaatgggtgggcgcggtactcagcgcagagaataaacgtcagctgtggatcccggaagggttcgcccacgggtttatggcgctgagcgacacggtgcagtttgtctacaaggcgacgaactactacgcgccgcagtcagaacggagcatcatctggaacgatccggagatcgggattgactggccggcgctgagcgattgcgcgctctcgctgtcggagaaagatctgcaggcacatactcttgccactgcagaagtatataaataa

SEQ ID NO: 32272 - DNA, 1167 bp, Escherichia coli
atgaaaattactatttccggtacaggttatgttggtttatcgaacggtgtcctgattgcgcaaaaccacgaagtggttgctctggatatcgtacaggccaaagtggatatgcttaaccagaagatctctccgattgtggataaagagattcaggaatatctggcagaaaaaccgttaaatttccgtgccaccacggacaagcacgacgcctatcgtaatgccgactacgtgatcattgcgacgccgaccgattacgatcccaaaaccaactacttcaacacctctacagtggaagcggttattcgcgatgtcacagagatcaacccgaacgcggtgatgatcattaaatcgaccatcccggtggggttcacccgcgacatcaaagaacgtttagggattgataatgttattttctctcctgagttcctgcgtgaaggccgtgcgctgtacgacaacctgcacccatcgcgcattgttattggtgagcgctctgcgcgtgccgagcgtttcgcagacctactgaaagaaggcgcgattaagcaggatatcccgaccctgtttaccgactccactgaagcggaagcgatcaaactgttcgcgaacacctatctggcgctgcgtgttgcctatttcaatgagctcgacagctatgctgaaagccaggggctgaacagcaagcagattatcgaaggggtatgcctggatccgcgtatcggcaaccactacaacaacccgtcctttggctatggcggctactgcctgccgaaagataccaagcagctgctggcgaactacgaatcggtcccgaacaatatcatcgcggctatcgtggatgctaaccgtacccgtaaagactttatcgcggattctattctcgcccgtaagccgaaagtggtgggtgtgtatcgcctgatcatgaagagtggttcggacaacttccgtgcttcttctattcagggcattatgaagcgcatcaaggcgaaaggtattccggttattatctatgaaccggtgatgcaggaagatgagttctttaactcccgcgtcgtgcgcgacctggatgccttcaaacaagaggcggatgtgatcatctctaaccgtatggcggaagagctggcggatgtggcggacaaggtatacacccgcgatctgtttggtaacgattaa

SEQ ID NO: 32273 - DNA, 2124 bp, Escherichia coli
gtgtgcgtatgccacgatctgatcccgctgttaaataaagagcgttatctcggcgatccgaatttccgtgagttttatatgaataagctggcggaatttgagcgggcagacgcgatcttcgccatttcgcagtcggcagctcaggaagtgatcgaatataccgacatcgccagcgatcgggtactgaacatctcctcggcggtgggcgaagagtttgcggtgatcgattattccgctgagcgtattcagtctttaaaagacaaatacagcctgccggatgagtttatcttgtcgctggcgatgatcgagccgcggaaaaatattgaagcgcttattcacgcctacagcttgctgcctgccgagctgcagcagcgctatccgatggtgctggcgtataaagtgcagccagaacaactggagcggatcctgcgtctggcggaaagctatggtttgtcacgcagccagcttatctttactgggttcctgaccgacgacgatctgattgccctgtacaacctgtgcaaactgtttgtgttcccgtcgctgcatgaaggtttcggcctgccgccgctggaagcgatgcgctgcggggcggcgaccttaggttcaaacattaccagcctgccggaagtcattggctgggaagatgccatgttcaatccgcatgatgtgcaggacattcgccgggtcatggagaaggcgctgaccgatgaggcgttttatcgtgagctgaaggcgcatgctctcgcgcagtcggccaaattctcgtgggccaataccgcccatctggcgatcgagggtttcactcgtctgctgcagtcgtcccaagagacggatgccgggcaggcggaaagcgtgaccgcctcccgccttcagatgatgcagaaaatcgatgcgctgagcgaagtcgaccgtcttggtctggcatgggcggttgcgcgcaatagctttaagcgccatacccgcaagctgctggtggacatttcggttctggcgcagcatgacgcgaagaccgggatccagcgcgtctcgcgcagtatcctcagcgaattactgaaatctggcgtgccgggttacgaggtttccgccgtctactacacccctggcgagtgttatcgctacgccaaccaatatctgtccagtcatttcccgggcgaatttggtgctgacgaaccggtgctgttcagcaaagacgatgtgcttattgccaccgatctgaccgcgcatctcttcccggagctggtgacgcaaattgacagcatgcgcgccgccggggcgttcgcctgcttcgtggtgcatgatattctgccattacgccgtccggagtggagtatcgaaggcattcagcgtgatttcccgatctggctgtcctgcctcgcagagcacgccgaccggctgatctgcgtctctgccagcgtcgccgaggatgtgaaagcgtggattgcggaaaatcgccattgggtgaaaccgaacccgctgcagaccgtcagcaacttccatctgggagccgacctcgatgccagcgtaccgtccactggcatgccggataatgcacaggcgctgttagcagcgatggctgcagctccgtcatttatcatggtgggtaccatggagccgcgcaaaggccacgcccagacgctggccgccttcgaggaactgtggcgcgagggcaaagactacaacttgtttatcgtcggcaaacagggctggaacgttgacagcttgtgcgaaaaattacgccatcatccgcagctgaacaaaaagctcttctggctgcagaatatcagcgacgagtttttggccgagctatacgctcgttcacgcgcgctgatctttgcctcgcagggagaaggctttggcctgccgttgattgaagcggcgcagaaaaagctgccggtgattattcgcgacattccggtgtttaaagagattgctcaggaacatgcctggtatttctccggtgaagcgccgtccgatatcgcgaaggcggtagaagagtggttagccctgtacgagcaaaacgcgcatcctcgttccgaaaatatcaactggttaacctggaaacagagcgcggaatttctcctgaaaaacctgccgattatcgcgccagccgcgaagcaataa

SEQ ID NO: 32274 - DNA, 1146 bp, Escherichia coli
atgaaaattatttttgctactgagccaattaaatacccattaacgggcatcggtcggtattccctggagctggttaagcggctggcggttgcccgtgaaatcgaagagctgaagctgtttcacggcgcgtcgtttatcgaccagatcccccaggtggagaataaaagcgatagcaaagccagcaatcatggtcgtctgtcggcgtttctgcgccgccagccgctgctgattgaggcgtatcgcctgctgcatccgcggcgccaggcgtgggcattgcgcgattacaaagactacatttaccatggtcccaatttctatctgccgcatcgcctggaacgcgccgtgaccacgtttcatgacatctccatttttacctgcccggaatatcatccaaaagatcgggttcgctatatggagaagtccctgcacgagagcctggattcggcgaagctgatcctgaccgtctccgacttctcgcgcagtgaaatcatccgcctgttcaactatccggcggatcggatcgtcaccaccaagctggcctgcagcagcgactatattccgcgcagcccggcggagtgcctgccggtcctgcagaaatatcagctggcgtggcaggggtatgcgttatatatcggcaccatggagccgcgtaaaaatatccgcggtctgctgcaggcctatcagctgctgccgatggagacccgcatgcgctacccgctgatcctcagcggttatcgcggatgggaagacgatgtgctgtggcagttagtcgagcgcggtacgcgtgaagggtggatccgttacctgggctatgtcccggatgaagacctgccttatctgtacgcggcggccagaacctttgtttatccctccttctatgagggattcggtttacctattcttgaagcgatgtcttgcggtgtgccggtagtatgttccaatgtcacttctttgcctgaggtggttggcgatgccggcctcgttgccgatcctaatgatgtagacgcgattagcgcacatattttgcagagcctgcaggatgatagctggcgggaaatcgccaccgcgcgcggtcttgcccaggcgaaacagttttcgtgggagaactgtacgacccagaccattaacgcctataaattactctaa

SEQ ID NO: 32275 - DNA, 1116 bp, Escherichia coli
ttgagagttctacacgtctataagacctactatccccatacctacggcggtattgagcaggtcatttatcagctaagtcagggctgcgcccgccggggaatcgcagccgatgtttttacttttagcccggacaaagagacaggtcctgtcgcctacgaagaccatcgggtcatttataataagcagctttttgaaattgcctccacgccgttttcgttgaaagcgttaaagcgttttaagcagattaaagatgattacgacatcatcaactaccattttccgtttcctttcatggatatgttgcatctctcggcgcggcctgacgcaagaacggtggtgacctatcactcggatattgtgaaacaaaaacggttaatgaagttgtaccagccgctgcaggagcgattcctcgccagcgtagactgcatcgtcgcctcgtcgcccaactacgtggcctccagccagaccctgaaaaaatatcaggataaaaccgtggtgatcccgtttggtctggagcagcatgacgtgcagcacgatccgcagcgggtggcgcactggcgggaaaccgtcggcgataacttcttcctcttcgtcggcgctttccgctactacaaagggctgcacattctgctggatgccgccgagcgtagccggctgccggtggtgatcgtcgggggcgggccgctggaggcggaagtgcggcgtgaggcgcagcaacgcgggctgagcaatgtggtgtttaccggcatgctcaacgacgaagataagtacattctcttccagctctgccggggcgtggtattcccctcgcatctgcgctctgaggcgtttggcattacgttattggaaggcgcacgctttgcaaggccgctgatctcttgcgagatcggtacaggtacctctttcattaaccaggacaaagtgagtggttgcgtgattccgccgaatgatagccaggcgctggtggaggcaatgaatgagctctggaataacgaggaaacctccaaccgctatggcgaaaactcgcgtcgtcgttttgaagagatgtttactgccgaccatatgattgacgcctatgtcaatctctacactacattgctggaaagcaaatcctga

SEQ ID NO: 32276 - DNA, 3921 bp, Escherichia coli
gtggtgacgaataacagtgacagcgtgcagcttacggcgatggtgaaagatccgtcgaatcatccggtggcggggataacggtaaacttcaccatgccacaggacgttgcggcaaactttacccttgaaaataacggtattgccatcactcaggccaatggggaagcgcatgtcacgctgaaaggtaaaaaagcgggcacgcatacggttaccgcaacgctgggtaataacaataccagtgattcgcagccggtaacatttgtggcggacaaaacctcggctcaggttgtcctgcagatgtcaaaagatgagatcacaggtaatggcgtcgataacgcaacgctaactgcaacggttaaagatcagttcgacaatgaggtgaataatcttccggtaacattcagctcagcctcttcaggactcaccctgaccccgggagtaagtaataccaatgagtctggcatcgcgcaggccactctcgcaggcgttgcctttggtgagcagacggtcactgcatcactggctaataatggtgccagcgacaacaaaactgtgcattttattggcgacacagcggcggcaaaaattatcgagttgacgcctgtcccagacagcataatcgccggtaccccgcagaacagctccggcagcgtcatcaccgccacagtcgttgataataatggctttccggtgaaaggtgtgactgtgaacttcaccagcaacgcagcgacagccgaaatgacgaacggcggtcaagccgtgacgaacgaacagggtaaggctaccgtcacttataccaatacccgctcctcgatagaatcaggagcgagaccggataccgttgaggccagtctggaaaatggtagctccacgcttagcacatcaattaatgtcaacgctgatgcgtctacggcacatctcaccttgctacaggcactttttgatacagtctccgcaggcgacactaccaatctgtatattgaggtgaaggataattacggcaacggagtaccccagcaggaggtaaccctcagagtatcaccaagtgaaggcgtgaccctcagtaataacggcataaatactaccaaccacgacggctatttatacgcaagctttaccgctacaaaagccggggtttatcaagtgacggcaaccctcgaaaatggcgattcgatgcaacaaacagtgacctatgtgccgaacgtcgcgaatgccgaaatcacgctggcagcctcgaaggatccggtgattgccgacaataacgatctcacgacactaacagcaacagtcgctgatacagagggcaatgcgatagccaacactgaagtaacatttactctgccggaagatgtgaaggcgaacttcacgctgagcgatggcggtaaagcgattactgatgctgaaggcaaagcgaaagtcacgctgaaaggtacaaaagcaggcgctcatactgttacagcatcgataactggcggtaagagtgagcagttggtggtgaactttactgcggatacgctcactgcgcaggttaatcttaacgttaccgaggacaattttatcgctaataacgtcgggatgaccaggctgcaggcaacagtgactgatggaaacggcaacccgttagccaatgaggcggtgacattcacgctaccggcagatgtgagcgcaagctttactctcggacaaggcggttccgccattactgacatcaacggcaaggctgaagttacactgagcggtacaaaatccggcacctaccccgtgacagttagcgtgaacaattatggtgtcagtgatacgaaacaggtgactttgattgccgatgctggtaccgcaaaactagcctccttaacctctgtatactcattcgtcgtcagcacgaccgagggcgcgaccatgactgcaagcgtcactgacgctaacggcaacccggtagaaggtataaaagttaatttccgcggaacttccgtcacgctaagcagcaccagcgttgaaacggatgatcggggtttcgctgaaattcttgtgacaagcaccgaggtcggactgaaaacagtttcagcctctctggcagataaacctactgaagtcatctcgcgattactgaatgcaaaagcagatattaattctgcaacgattaccagtctggagatacctgaaggtcaggtcatggtcgcacaagacgtagcagttaaagctcacgtcaacgaccagtttggcaatccgattcttaatgaatctgtaacattcagtgcagaaccaccagagcacatgaccatcagccaaaatattgtctctactgatacgcatggtatagccgaggtcactatgacgcccgaaagaaacggttcgtatatggtgaaagcatccctggcgaatggatcctcttatgagaaggatctggtggtaatcgatcaaaaactgacactctcggcgtccagcccgcttatcggtgtcaattccccaacaggtgcaactctgacggcaacgctaacttctgcaaatggcactccagtggagggtcaggtcatcaactttagcgtaacgccagaaggtgcgacgttaagtggcggaaaagtgagaaccaactcttcaggtcaggctccagtcgttctgaccagcaataaagtcggtacatatacggtgactgcatcgttccataacggcgtcacaatacagacacagacaaccgtgaaggttactggcaacccaagcaccgcacatgttgctagctttatcgctgatccgtcgactatcgccgccaccaacagtgatttaagtaccttaaaggcaacggttgaggatggcagtggtaacctgatcgaaggtctcactgtgtacttcgccttaaaaagcggctccaccacattaacgtcattaacagcggtgacagatcaaaacggaatcgcgacaacaagcgtgaaaggagcgataacggggagcgtcacggtaagcgcagtcacgaccgctggtggaatgcaaacagtagatataacgctggtggcaggcccggcagacgcctcaaagtcagtccttaagaacaatcggtcatcattgaaaggagactttaccgatagtgctgagctacatcttgttctgcacgatatatcaggcaatccgatcaaagtttctgaagggctggaatttgtgcagtcaggtaccaacgtgccctatgtgcaagttagtgcaattgactacagtaaaaatttctcaggcgagtacaaagccactgttacaggcggcggagagggtatcgcaacgctgatccctgtattgaatggtgttcatcaagctggtctgagtaccacaatacaattcactcgcgcagaagacaaaataatgagcggtacagtgtcagtcaatggtactgacctaccgacaactacattcccttcgcagggattcaccggggcgtattatcagttgaataatgacaactttgcccctggaaaaacggcggctgattatgagttttcaagctctgcctcctgggtcgatgttgatgctaccggtaaagtgacatttaaaaatgtcggcagcaattgggaaaggattacggcgacgccaaaatcaggaggccctagctatgtatacgaaatccgtgtgaagagttggtgggtgaacgccggcgatgctttcatgatatacagccttgctgaaaatttttgcagcagcaatggctacacacttccccgtgcagatcatttaaaccatagtcgttcccgaggcatcgggtcactgtacagtgaatggggagatatggggcattacacgactgaagctggttttcaatcaaatatgtattggtcatctagtcccgcaaactcaaacgaacaatacgtagtttccctggcaacaggtgatcaaagcgtatttgaaaagcttgggtttgcttatgcgacatgttataaaaacctctga

SEQ ID NO: 32277 - DNA, 2082 bp, Escherichia coli
atgtctgcacgtttaaaattattgcctgggttaaagtcaactgagtatgtgtattcagatcttcatgctttacttgatactaatggtgggagttccttaggtccgaacattggtagtgatggttctaacctaacaataacatgtttatcgatgagcagagtttttcttactgaaaaacttgttaattctatatatcagcatataccttattttaaaggtgatattctgattgttgataatggcagcacagtagaagaactttcaattttacaaaatttaagtgataggatcccgttaaatattagagttgtcgagcttggtaataattttggcgtaagtggtggaagaaacaaaactttagagcatataaaaacagaatgggcaatgtttctcgataatgatatttatttcataaataatccacttccgagattgcaaaatgatatttcaagacttggttgtcattttatcaatatgccattgcttgattctgacggagaaacattattcgcaaatggagggaatgttttcctcgatattgatgatgattcggtgcatgttggtgcaggaagtgcatgtattcaggaaaaaacaattacatatgatggtgaaggcttcctttctacatttctttttggtggtgcgagtgttattaaaatcgcgaccctgaaaaatttagggaagtatgacgaaaatatgtttattgggtttgaagacattgatttatcgatccgtctttaccagtcaggaatgaaagttggtacatgtggtgcaatttctttaatccatgatcacccgaagcctagttctaacaaagataaagattatgagaaaattcgcttcacgcgaagtatcttaaaagaatccgcggattatcttgaaaacaaatggggaatggttttctggtcagctccagttgatgattggttggaagagaagcaacgtagttttgaactgacaactcagcataatgataatttgtcccaattcgatgacaataaaaaaggcgcgacttatgatttatctgtgtcaaaaccgaaaattgcattgattattgatactgaaaactgggcattctcaaatattgcaaatcaaatagtcaattatctgtcagattcatatgactttacaataataccaactgaaattgttgataatatcagtcaggttattatgatgactagaaattatgatataacacatttcttctggcgtgaatcgcttagacttatatatgatgagtattatataaactataaccggactatcggatttgatgagctcagctttaaaaaagagttcttggatggaagaataataaccagtagcgtttatgatcatttattcctggatgagcaagctataaaattaagaaagacattttataacgatttaataactgcttatacggttagttcatcaaaactatatgacatctactcatccatagttgagtatcctaagccatcagttcttgcggaagatggggttaatttaaaactattttatccaattaatcttgaacgttttgataatatagaatcgagggccttgcgcgtaggttgggctgggaattctaaatgggcgggagagttagaggatttcaaaggttaccattctttattaaagcctgcagttgagcaattacaatcagaaggattaaatattgaattagtccttgccgatcgtcaactcggatttattcctcatgatgaaatggtaaaatattatagccaaattgatgtatatgtctgtccttcaaaaattgaaggcacaccaaaccctgtccttgagtctatggcatgtggcgttcccgtgataagtactgatgttggtgtggtcaaagatgcttttggtgagatgcaaaaagaatggattttaccagttagaagcaaggatactttgatagataaacttagagatttttatcataagcgtaattcagtggtaaaatgtctatcttcagaaaatttgcaacaaataaaaaaatgggattggaaagttaagtctgagaactttcggacttttttcgacaaagtactagaatctaaaaagcacagcgagataagcaataaaatgtga

SEQ ID NO: 32278 - DNA, 1011 bp, Escherichia coli
atggaaagattaaatttgagtgaaaaacctgctcactctttacaggaatcggctattcattgtgccagatatgctaatatcttacatcttgttaaagataaagtagttctggacattgcctgtggtgagggatatggctcagcactattaatgaaagcaggagctaaacgagttgtgggggtggacatctctgaagagtcaatcgagcgtgcaaagaaactttttgggaaatatgatgtagaatatattgtaagtgatgcaaataccatctcagagcgttatggcgaagacttttttgatatagttgtttcaattgagacaatagaacacatcaatacccctgacgtctttcttagttctatcaaaaaaactgctaaagaaaatgcgattttctatataacttgccctaacgattattggtactatccaaataatgaacaatctaatccttgtcatgtacgaaagtatacttttcaagaattcaaagagcttagtacaggggttttgggtaataatgtccaatgggcatatggtggttctgtttttggattcggcacagtctctgctaacaatcgaggtcttgaaaagataggttcttcatggatggaaataagcgagtcagaaaattcaattaatgttttaaacacagagattgacgctgttaatgaaaataattgtagtttctttgtgggcttatggaatgcgcctgaaacaaactttagcaacagtacttttccaataagtatggatgcttattcgcgcatgacagaagaatttgagtcaaatgtaagttctgtacttcgtgaagatcaggcggaaaataaaaaagccatatcaatattaaaaaaagatatgaaacaattaacaatgaatttgagaaaatcaaatcttttattatctgcattaaaaattgaaaatgttacactgcgtaagaatatttccgaattgcaacaacaactcgccaaacaaatcgcgatgtatcatgacgtaacaaatgcaaaaataatttag

SEQ ID NO: 32279 - DNA, 1155 bp, Escherichia coli
atgaaaatagcattaatcggtactacagcagaaagtctaatccaattcagaaaagaactgattaatttattacataaaaatggccatgttgtatatgcatttgcaattgactatgatgatgtgacaaaagaaaaagttaaatcatttggcgctataccagtacattattgtttcagtcgtacagggctaaatccattttctgatgttatcaacacctataaattgtataaaattttaaaatcacttcagttagacttggcattttcttatttttcaaagccagccatttttggtactttagcagcaaagttcgcaagaatacaaaaacgatatgcgatgcttgaaggtcttggttttttctttaccaattctggaggacaggtttcattacgaactaaattactaaaaaaaatattggtttcgctttacaaagtgagtttcagacacattgaaagtctaatcttgcttaatgcggatgataagcgagatcttttagttaatgaaaaaattcaagtaaaaaaggtacatatattaggggggattggattaaatatgtctgattatccctactgcccacctcctgtcgagccagtgtctttcatttttgtcgccagatttttgcaagaaaagggagtttatgaatttattgaggctgcaaaaatagtcaaaaagaagtttcctgaaactcatttttgtatgctgggccatctggatcttcataacccgggaagcttaactatagaacgacttaatgatttgaaatgtaataacatcattgagttacctggtcatgttgataacgtacaggagtggcttgctaaagcgagtgtattcgtattgccttcctggcgtgaagggtttccgagaagtacacaggaggctatggccatgggccgcgctgtcataaccagcgatgtgccaggttgccgagatacagtggttgatggcgttaatggatttttgattaagccacgttcttctcatgccttagccgaaaaaatgctctgcttcttacatcaacctgagctaattacccaaatggggaatgcaagtcaccaaatagctttacaacaatttgactcaagtatagttaattcgaagctaatgaagatactacgtgtagattttgaaaatacaaaatctaatgtctgttaa

SEQ ID NO: 32280 - DNA, 1032 bp, Escherichia coli
atgcaggttgtcgaattgcttcttgagcttcaaaaatgtgggcattctgttcgattaatttcgcttacaccaccagttgatttgattgataagctaatcagtaatgacataccagttgtttcattgggtatgaaatcaaaattagctttacctatggctgcatttaaattagcaatgttgatcagacaaaactctccagatattgtgcattcgcatatgtttcatgccaatatcttggtacgtttcgtaagagcactcttgggaaggcgttcatctattatttgtactgcacacagcgttcgtgaaggtggcagtgccagagactggctctatcgtttgactaataaattaagtgacttgaatacagttgttagcgatgctgcacggcagcgatttattaacgacaaagtatttccacctgagaaaacacttactgtttataattgtatcaatattgatcatttttgtatcatcgatagacagggcaggaaacgatttcgctggataacagttgggcggcttgtaaaaataaaaaaccaactgttgattttgcaagctatgatgcagttgccacatagtgaactcatcatagttggagagggcgaagaacggcttacattgcaaacatttatcgatcaaaattctctcagcgagcgagttactctcttgggaaaaaaggataatgttgttgattattaccatgattccgatgcctttgtgctggcctctgactatgaaggttttgctcttgtcgttgccgaagctatggcatgtggattaccagtggtcgcaacagattgtggtgggccagcagaaattattggaaatggacaggattttggcataacaatatcggttaatgatgtacatcacttaactgcagcgatgcaacagattgaatcattagatatcgaacaacgtaaaggaagcggctatcgtgctcgggaaagagtcattgagaaattttctgctaaaaaaatcgtatctcaatgggaagatatatacctgtgcatacagaaaaacagaatttag

SEQ ID NO: 32281 - DNA, 753 bp, Escherichia coli
atgtctcatttgattgacttaaaagatgtgggtgtcgaatttcccatttacgacgctaaaagtagatcgtttaaatcgcaggtggctaacttaacccgcggtgttatttcttcaaaaaaagaaagcagcacggttacggttaaatcattagacggtttaacgtttagtctgaaagaaggtgataaactcggacttattggaaacaatggcgcgggaaaatctacgctactgaagctgttggctggtatctatgaaccaacctccggcacaattaaaagaaagggtaagatagttccactgttggatatcgctctaggaatggatgatgattccacaggataccaaaatataaaactacgcggtttgttacttggtatgacgaatgcagaaatcgaatccaaaatagaagagatcgcttgcttcacagaactaggtgattacctgaatctaccaattcgtgtctactctaccgggatgcgcgtgagattagcatttgcagtatcaacttcagttgatccagatgtacttttactcgacgaaattattgggactggtgatgcttctttcttaaataaagcaaagaaaagattccaggagttgcaggagagggcaaaggttgttgtgctatcttcccatgacaacaatgtcattctgaaaacttgtaataaagttctgtggttagaaggtggtaaaccaaagatgattggagatccggaagaagtattaaataaatatatggatagcgtagtttaa

SEQ ID NO: 32282 - DNA, 780 bp, Escherichia coli
atgaaagaatcattaacagatatatattcgtcaataaaatcctggcatctttggactacattaggttggttggaattaaggcagagatataaaagatccattgttggaccgttttggattacattaagtatggcggtccttattattgctttaggggtaatttatggagaactatttaaattagaagttaaagagtatctcccgatgctagcagttggtttggtgttctggaactttattagtggcgttataaatgaagggtgtgtaactttcatatcgtccagctcttttataagtcagttaccaactaaaaaattcatatacattatgcaaatgttatggcgaaattttatgatgctttgccataatatagtaatagtgattggtgtgttgattatattcaacgtcttttcgttgaagaatttcccgctttttatacttggatttatgatcgtagttgttaatctgatctggattgcaactttatttgcagtaatttctgtacgttttagagattttccgcaaatggtcatgagttttatgcaggttgtcttttatataacgccgatattattttctggaacaatgttggctaaatatagcttgctgctgaagttaaacccatttgcttggtttatcgagattattcgctcgcctttagtagggaaaatgcccgagttatactgctattataattctattatccttgcatgcgtaggaacagttatctcactaattacatttgcaaaatgtagaaatcgcattgcatattgggtgtaa

SEQ ID NO: 32283 - DNA, 2217 bp, Escherichia coli
atgaatttatttttcatagtcgataagttggattgggcattcggaaaaatagcccaaaatatagcaaaagagttgagtgactttaatgtaaaaatagtttgcaccgatgattttaaaacggtggcggaccttgttttacacttggataaaaacgtaaaagaaaagagtatcttacactttttctggcgtgactatctcatggaagtgatgaacttcactcagcggaatccccagtataaagaaattttgatcagcaatattgtcaccacacatattcctgatcacctattcacttatgatgatatcgcgaactatgagagacgaattcctcttatgaattttgtggatgggtattttgttacatccgcaaagttgaaagagctatattctgaactgtctgattttccacctcctcatagtgttatctatgataatccagaaattcctatgagcgaaggaaatagtcatgataatagcgatagaaaaaaactcgtatggattggaaatagcaaatggggcgaatatcttggttataaagattataaaggcctgaataaaatagttttgccggctctggataaattaaaaaaatctggatatacgtttgattttattgagtttgatagttctaagggcaagaccgaacgtgaagtaattcttaaaacactgtctgatgcagatattctactcatcagttctgaatgtgaaggtacgccattgccacttcttgaagcaatggcaaacagttgcgctattgtgtcaacagacgtcggcatagcaaatgaagtgttacctgaaaagcagcggcagtatattgtgtctcgggatgccgaggcattttatgattctttgagaaatcttcttgatgatcaacgtggtcttaaagaattacaaagaatgaattatttagcatatcgtcagcaatttgtagatgatggccttatagctgataaatgggcattgttcttcaaagacatgtgttcaaaatcgcaaaatgaatttaagaatatattccttcgcgagcagaaagcgccatcgttgaaagaacgtttaatttcaaaaactatttataatctaagcaggcttgctctccgtttgaatttgatgaatacgctgaagcaatacagtctgctacgaaaaatatattataaggttgctggtacaactaccaatcaagttgattatgatttgttggatgagttctatagcaatgcaatagcggataaagaagtcttagcattttactcggcctattggtctggtgttgccacatcaacagccagtttctttaaagatgatagtatccaatatccgtactattcatatgagttcccacaagtttctaaccatgtctatctaaacaggttggctgaaaaacttgctgcttcgaagacactaaaaagtgtgatcatgagcggtggaacacaattacaaatggaacttgctaaaaagattaaggaattaaatccaaaaataaaaatattttttgcatggcatggctcacctgctcagtgggttgactcctcgcaatattcaacttttgatggatggtatgaactttatcgggaacggattgttgatggggtcatctcgtttaagcctgagctagatgaaatacttaatgcatacggtattcgtgcattctcagtatcgaactatgctgtatcaggcacttcgttttctaaaaagttagctgtacctgattcgggcaatttccgcgtcggtttgtttgccgcaatgttcagttggtataaaaatccatttcctcagttactagcgattggttcattaaaagggtgtgagttggttaccaacttgcatcttgaaaataatatgaagtggattacctcaaacatcaaacttacggcattatcagagaatttaaataataagcggtttatcgagctgctatctcgtttacatgttgtgtgctatgtaacgaatacggaatgttcaccaatgatcgcgctggaatcagcaagcgttggaacgccatgcgttgtaggtccagccggaaacatatataaaggttttcctgagttagaattgtatttggttgaaaaagaggttgataatccaactgcaatcaggaatcggttacaattagttcgtgataattacgcggaagttaaggttttacttaacgcatttgttttggaatacaattccagattagaactaattaaagagaagatgtataaagagctgaagcaatga

SEQ ID NO: 32284 - DNA, 1017 bp, Escherichia coli
atgactatacttgtgacaggtggcgctggttatattggttcacataccgttttacagttaattgagggcggatatgatgtggttgtgcttgataacctgagtaattcatctcaagagtcacttcatcgtgttggttctttggtttcgaaaaaaattccattcattgaagctgatatcaacgataaacaaaaacttgaagaagtttttaaaaactacgatatcgatgcagtgattcattttgcaggattaaaatctgtgggtgaatcggtaaaaaaaccgctggaatattatattaataatgtcagtgggaccctcaccctgcttgaagttatgaagcaagcaagtgtttataagttcatttttagttcgtccgcaactgtttatggtaaccattctccggttcccaacctggaggaatatcctattggaaatgcttcctgcccctatggtactactaaagtcatgctggagcaggttttatcagactacgcgaaatctgatgataaattgaagattattgctcttcgttattttaaccctacaggcgcacatcctagtggtcttattggggaggacccgaacggcattccaaataatcttgtcccttatatttctcaggttgctattggaaaattagaaaaattgtccgtttatggtggcgattatgaaaccattgatggaacaggggtacgcgactttatccatgtagtagatcttgcctcaggccatgttagtgctttaaggcatattgataaattacaaggatatgacgtttttaatcttggcaccggcaatggtgtatcagttttacaagtaattgatgcctttgaaaaggcaagtgacaagaaagttaactatgaaattgtcgccaggcgagagggcgatataggatcttcttgggctgatgtctctaaagcagaaagggttttaggctggaaagccaagtacaatattgaagatatgatggctcatacctggaattggcaaaagcaaaaccctaatggctatggaagctag

SEQ ID NO: 32285 - DNA, 798 bp, Escherichia coli
ttgcaacagtgccatatcctcatttctgaccatgtcattgaacgtatcaactgtaccaacggcaacgtgaactggggcatcggcatcggtctggcggggagtacctatgacaatacctatcccgatgaactggcggtaaaaaactttgtggtagcgaacatcaccggtagcgactgccgacagttagtccatgtggagaacggcaaacactttattattcgtaatattaccgcgcgaaatatcaccccggattatagtaagaaagcgggcattgataatgcgacggtcgctatttacggatgtgataatttcgtaattgataatatcaatatggagaatagcgcaggtatgctcattggttacggcgtaatcaaagggcgttatttatccattccacaaaactttaagttaaataatatccatctggataatacgaaacgtgaatacaaattgcgcggtattcagatctcctctggtaatgcgacatcatttgtggcgattaccaatgtggagatgaaacgtgccacgcttgagttgcataaccaaccacagcacctttttttacgtaacatcagggttatgcagcaatccgcgacgggacccgcgcttaagatgcacttcgatctccgtcaggatgtgcgcggcaagtttatggcaaaacaggacacattactctcgctggcgaatgtccatgcggtaaacgaaagcgggcaaagctcagttgacatcgaccgggtaaaccatcaggtggtgaatgtcgaagcggtgaattttcgactcccgggacgggagcggtaa

SEQ ID NO: 32286 - DNA, 168 bp, Escherichia coli
atggaattattaaatacttatgatgataaagaaacagctgaaatattttttgaaagaatagaaggagagaaaagattagcaagtgaacgagatgctacggaaacagtctataacctcttcggggtaagcgtacagcctgaaccgtctggtcagaatctgacgaattag

SEQ ID NO: 32287 - DNA, 306 bp, Escherichia coli
atggctaaatatacagtttgtgattaccaatcaactattagaaataatgggaatggttgtgccaatctctatctggaggtcttattgcagggaacatccaccccatcgttacaccaatacagaattgcccccgatacaagacatccagacattaacctaataaaagcgcaccttgacgagggctttcagcaggcaaagtctgagggattaaaagtagagatttcagattataaagaacgtctttacctgtacattagaacacctggtaataacctaatgcaatattctggttgcagagaaaaataa

SEQ ID NO: 32288 - DNA, 312 bp, Escherichia coli
atgtatgtcagatattacaatctcacttccgaaagaagtcaacgggcacgttatctgttcaaccagaatccgacacattctggctatacgaaagagcatacttatgcaaatctatatgcttttccggcaacaagcaggaatctcagcgctgaggcaggaattagaggtaaaaacgccctaccgggccatgaatcacccggtcactggagtagtaaccaaagcagatttagccagcatggaacacatatctttggtgaaatgttggttacgggaagctggagcgcacaacgtgttagtaaccagtgcggttaa

SEQ ID NO: 32289 - DNA, 363 bp, Escherichia coli
gtggtctattttatccccgatacggcagttgaccccattgagccggtggcttacaaaatccgcttttcattcagcaaccctgatctcttactgaagtcggcgatcgagaaatatggagagccttcagtctctgatgcccagagaggtcgttatatctggtgcaaggcactggcggagaaaacgaataagtgtgatgacagtaaatctgagcttacgctgacaacgcgagaagttgaagacactggcatcctgactctcagcgacccaacggtctcatttgatgcctcgcggactgcaacggccaccccggataaagaccaggctgcgactgaagataaccaggggccattgccacagctctga

SEQ ID NO: 32290 - DNA, 492 bp, Escherichia coli
atgacggtgttatctgcccctgaaatgcgctttggaaccaaacaggatgttccctttatcatagcggtgattcgcgacggtatgcgggatgggtattttaactttgatgatgatgacggactgtctcagttcgaaagtcagatctcagaagccattgccaggcgggaacggggagagaattgcgccgatttcttgtttgtctttgatgctcaacataatggcgcagcgataggttttgccctactgacgggcaaaaatggtgcaaatggacttgcttcacatctggaaatcaggatgtttggtgttaccaggagtcaaagacaaaaaggatttgggcgctccatgttgcaaagtattctggatgctactcccggccataaagtggaggcatcctgtcttcctgcatcagttgtcatggccaggatgctgactaatgcgggttttcacgtcaaagagataagcccgtttggaaagcgtactttcagacgctaa

SEQ ID NO: 32291 - DNA, 252 bp, Escherichia coli
atggaaaaacaggactggcataaggcagacatcatagctgcgctacataagaaaggtttgtcacttgcctcactgagtagggctaacggtctttcaagcagcactctggcaaatgcactgacacgtgactggcctagaggcgagatcatcatcgctaatgcaattggtgaagaacctcaagaaatatggccaacccgatattttgataaggcaggaatgccgatcaagagaatcataagaaaaccggtttaa

SEQ ID NO: 32292 - DNA, 252 bp, Escherichia coli; identical to SEQ ID NO: 11287

SEQ ID NO: 32293 - DNA, 1119 bp, Escherichia coli
atgccattacccgattttcatgtttctgaaccttttaccctcggtattgaactggaaatgcaggtggttaatccgccgggctatgacttaagccaggactcttcaatgctgattgacgcggttaaaaataagatcacggccggagaggtaaagcacgatatcaccgaaagtatgctggagctggcgacggatgtttgccgtgatatcaaccaggctgccgggcagttttcagcgatgcagaaagtcgtattgcaggcagccacagaccatcatctggaaatttgcggcggtggcacgcacccgtttcagaaatggcagcgtcaggaggtatgcgataacgaacgctatcaacgcacgctggaaaactttggttatctcattcagcaggcgaccgtttttggtcagcatgtccatgttggctgcgccagtggcgatgacgccatttatttgctgcacggcttgtcacgatttgtgccgcactttatcgccctttccgccgcgtcgccatatatgcagggaacggatacgcgttttgcctcctcacgaccgaatattttttccgcctttcctgataatggcccgatgccgtgggtcagtaactggcaacaatttgaagccctgtttcgctgtctgagttacaccacgatgatcgacagcattaaagatctgcactgggatattcgccccagtcctcattttggcacggtggaggttcgggtgatggataccccgttaacccttagccacgcagtaaatatggcgggattaattcaggctaccgcccactggttactgacggaacgcccgtttaaacatcaggaaaaagattacctgctgtataaattcaaccgtttccaggcctgtcgctatgggcttgaaggcgtcatcaccgatccgcacactggagatcgtcgaccgctaacggaagataccttgcgattgctggaaaaaatcgccccttccgcacataaaattggtgcatcgagcgcgattgaggccctgcatcgccaggtcgtcagcggtctgaatgaagcgcagctaatgcgcgatttcgtcgccgatggcggctcgctgattgggctggtgaaaaagcattgtgagatctgggccggtgactaa

SEQ ID NO: 32294 - DNA, 570 bp, Escherichia coli
gtgaaaacgttcgaagagtatgacttcacattcgccaccggagcaccgcagaagcaactccagtcgttacgctcactcagcttcatagaacgtaatgaaaatatcgtattactggggccatcaggtgtggggaaaacccatctggcaatagcgatgggctatgaagcagtccgtgcaggtatcaaagttcgcttcacaacagcagcagatctgttacttcagttatctacggcacaacgtcagggccgttataaaacgacgcttcagcgtggagtaatggccccccgcctgctcatcattgatgaaataggctatctgccgttcagtcaggaagaagcaaagctgttcttccaggtcatcgctaaacgttacgaaaagagcgcaatgatcctgacatccaatctgccgttcgggcagtgggatcaaacgttcgccggtgatgcagcactgacctcagcgatgctggaccgtatcttacaccactcacatgtcgttcaaatcaaaggagaaagctatcgactcagacagaaacgaaaggccggggttatagcagaagctaatcctgagtaa

SEQ ID NO: 32295 - DNA, 294 bp, Escherichia coli; identical to SEQ ID NO: 15293

SEQ ID NO: 32296 - DNA, 2058 bp, Escherichia coli
atggctgctgattttctgaccgacaaacagacacagaactacgggcgttatgccgcagagccaaacgagatccagctggcacggtattttcatcttgatgagcgagaccttactttcatcaacctgcgtaggggcaggcataaccggttgggaattgcccttcaactcacaactgcccgctttctgggaaccttcttgtccgatctcatgcaaataccgcccggtgtccagttttatgtcgcaaggcaacttaacatccgctatccagagatcatttcccgctatgctcaaagggaaaacacacgttgggagcaccacgggcttatcaggcagcactatagctatcatgatttcggtgatttcccgtggtcgttcagactgaagcgattgctgtatacccgtgcatggctcagtaatgaacgccccggactgatgttcgattttgccaccgcgtggttgcttcaaaataaagtgttgttgccagccgcatccaccctgacgagagtcattggtgaaatccgtgagcgtgcgacccgccgcttgtggcgaaaattggccgcgctgccaaaccgttggcagaccgcacaactggctgggttacttgaaatccccgaaggacagcgactctcagtgatggagcacctaaaaagaggccctgtcactatcagcggccccgcgttcactgaagcacttgaacgttacactcgcctgcgcagcctggagttttcctgtctgaatttcactgggctgcccgccatacagctccgcaatctggcacgctatgccggaatggcatcggtgaaatatatcagcagaatgccagaagaacggcggctggcgatccttaccgcattcgtgaaagcgcaagaaatctcggcgctggacgaggccgttgacgtgctggatatgctgatcctcaatattacccgggaggcgaagaaaaccgggcagaaaaagcgacttaggacgctcaaggatcttgaccgcgcggcgttgctgctggcgcgggcatgcgcacttttacttgatgaagataccgccgatgatttgctgcgaaagaccatattcagcagtgtgtctgtcgccagactggcagagtccgtggaaaaagtgaatgaactggcccgcccccaggatacaaactttcaggatgaaatggtggagcaatacggacgggtaaggcgttttttgcccgcactactgcgcgatctgcacttccgtgcggccccagacggtgaacataccttggctgccatccattacctggcagagctaaacggctcgaaaaaacggatcctggacgatgcacctgaacatatcatttcaggcccttggaaacgcctggtgtacgatgctgacggtcggatacagcgagcaggttactcgttgtgtctgctggagcgacttcaggatgcgctacgccgtcgtgacatctggttggaaaacagcgatcgttggggtgatccgcgccaaaaacttcttcagggggaggaatggcaggcgcagcgggttccagtctgccgggcattgggtcaccccactaatggcagtaaagcatcggagcaattggccgctcagttagatgaaacctggaaaacggtggcatcacgttttgatcgcaataccgccgtggacatctgcaatgaaggtaaacatccttcgctgaccatcagcagcctggataaattggatgaaccaccggcgctgatacaactgagcagccgagtcagacaattgcttccacccgttgacctgacagaactgttgctcgagattgacgccagaactggcttcacccgtgaattcagccatgtcagcgagtcaggtgcccgtgcgcaggatctgcatataagcctgtgtgcggtgatgctggctgaggcctgcaatatcggacatgagccgctgatcaagcacaatatccctgcactgactcgccatcgtctgagctgggtgaaacagaactacatccgagcagaaacgctggttagcgccaatgcgcggctggttgattttcagtcctcgttagcgttggcaggatactggggggcggggaggtag

SEQ ID NO: 32297 - DNA, 1455 bp, Escherichia coli
atgcccgttgactttctgaccactgagcagactgaaagctatggcagattcaccggtgaaccggatgagcttcagctggcacgatattttcaccttgatgaagcagacaaggaatttatcggaaaaagcagaggtgatcacaaccgtctgggcattgccctgcaaattggatgtgtccgttttctgggcaccttcctcaccgatatgaatcatattccttccggcgtccggcattttaccgccagacagctcgggattcgtgatatcaccgttcttgcagaatacggtcagagggaaaatacccgccgtgagcatgcagcgctgatacgtcagcactatcagtatcgtgaatttgcctggccctggacatttcgccttacccgtcttttatatacccggagctggataagcaatgaacgtcctggcctgcttttcgatctggcgacagggtggcttatgcaacatcgtattattctccccggagccactacgctgacccggttgatttcagaggtaagggaaaaggcgacgttgcgcctgtggaacaaactggcactgataccgtcagccgaacagcgttcacagctggagatgctgctggggccaactgattgcagccgcctgtctttactggaatcactgaaaaagggccctgtgaccatcagtggtccggcgtttaatgaagcaattgaacgctggaaaactctgaacgattttggcctgcatgctgaaaacctgagtacactcccggctgtgcgcctgaaaaatctcgcacgttatgctggtatgacttcggtgttcaatattgccaggatgtcaccgcagaaaaggatggcggttctggttgcctttgtccttgcatgggaaacgctggcgctggatgatgcattggacgttctggacgccatgctggccgttatcatccgtgacgccagaaagattgggcagaaaaaacggctccgctcgctgaaggatctggataaatctgcattggcgctcgccagcgcatgttcgtacctgctgaaagaagaaacaccggacgaatcgattcgtgctgaggtgttcagctacatcccaaggcaaaagctggctgaaatcatcacgcttgtccgtgaaattgcccggccctcagacgataattttcatgaagaaatggtggagcagtacgggcgcgttcgtcgtttcctgccccatctgctgaataccgttaaattttcatccgcacctgccggggttaccactctgaatgcctgtgactacctcagccgggagttcagctcacggcggcagttttttgacgacgcaccaacggaaattatcagtcggtcatggaaacggctggtgattaacaaggaaaaacatatcacccgcaggggatacacgctctgctttctcagtaaactgcaggatagtctgaggcggagggatgtctacgttaccggcagtaaccggtag

SEQ ID NO: 32298 - DNA, 372 bp, Escherichia coli
atgctcaaaaacagattttctttattgtgtcttgctgtggcatcgtcacttactcttactgcttgcgatgtagttgatgctgcctatgacgagactttaaatgataatgcacccgaaattgtaatagctggaggattcaaaattgatatccaaggtaatgcagttccggttgagggatatgataattgctctttgaatactcttcagggaagcgttgatacggataaatcaaattgtattgttctggatagaacacgtaaaaaagtaccggttctagttcatttgtcatccggtcccgtcaaagaagaatggaagatcgagcaccaggttgaaaaaccaaatccggcaaaaatttcatccaaactcgtatga

SEQ ID NO: 32299 - DNA, 237 bp, Escherichia coli
atgacgttatccgctgcattgcaaggcacttttaaagagatgaggaaagacaatacagtaggcatcacagttcaaacttgttcagatatttttgacagcaatgttcctccggcttatgttttctggctttatcgtctcaaagcgggagaaactttgccgcgcggaaggttcttcagaaaaagaaagccaatcatcaatgttatggcagttgttcatgatgctgcattcgaaaaataa

SEQ ID NO: 32300 - DNA, 294 bp, Escherichia coli
atgaacgtaattgcagctggaattttttgctttattttttaccctacagctttcgcttatgcttgttataaaaagagatggctagagtggatttttcttactttaattataatttttgcttctgccatttcgattcaacaatacaatgaagcgaattttgtaagtgagttaaattaccctatgtttatctccgccatatatggcctgtcactggcatggtttccttttccgattgcttatgttgttctgcgcttccttcttgatgatttacagcatgagtaccctaaacagtga

SEQ ID NO: 32301 - DNA, 1077 bp, Escherichia coli
atgagctggaaactctttctctatgactggggtggcctgaacatcgcgttgtttcaagccatcaacacaggcacgcccgccacgctgaaaccactggcatggttctttggcctcgtgggaagttactggacagcgccgctgatgctgttgggtctgtggtggtggtcgaaatcggctacaaacccggcgcgtggtacggccgttcggcatcgccttattggttttagcgcggccttcttgctggcgttattggtcgccaccgccttgaagctatggttcgactttccacgcccgcctgccgtccttggcgacctggcgcgcgtcatcggggacaaagagcttcactacagcctgcccagcgggcatgccacctatgccgcgatggtggtcggtgcgctctggcctttgatgggccgccgtggtcgtctcagtttaatgctgtacgccacattggtcggctggtcgcgcatcgcggccggaatgcactttccggccgatgtgttggcggggtggacgctgggatggagctgcacggcactcgccgggtggttgctgccgttggccgcccctgtgtggcaatcggcccgccgcacatcggcttgggtctggttcaccgtggccgccagtgctgtcatgaccgatcagctcacgaagttcgccatcatccgcacgtttgcctacggtgagcaagtcgaaatcaccccgtttttcaacctcgttcatgtcctgaatccgggtgcggcattcagctttttggcgaacgctggtggctggcaacgttactttttcatcacgctgggtctggctgtttctgcttggctggggcgcatgctgtgccagcaacggccacgtctcgaagcgatgggctacagcctgatcctcggcggtgcgctgggcaatgtcgcggatcgtgtgctgcgtggacaggttgttgatttccttgacttccattggcgacttgcgcactggcccgccttcaacctcgctgatgtggcgataactatcggagcgctctgcctgttcttgacggttgtaccgaaaagcagtaaaggcacagaggccgaggtgtccggttaa

SEQ ID NO: 32302 - DNA, 2406 bp, Escherichia coli
atgagcgaatgcgcttcaaaggggtgtggctgcacgactgagccgatcatccaacccacggcaccggccccgctggcaaccggatcggctcaagcggtgtaccgcatcgagaacatggattgcccgaccgaagaggcgctgatccgaagcaaactggccggtctggcgggggtggcgggtcttgaattcaacctgatgcaacgtaccttgaccgtgcgacacgaattgccttcgttgtctcccgtcgagcaggcgctgaaggccatcggcatgcaagctgtgcgcatggatcaggcgtcggccgagcagacgaccaagctgtccattgccaagatggattgcccgaccgaagagacgttgatccgcaacaagctcggcaccgtggccggtgttgctgatctcgatttcaacctgatgcagcgcacgctgtcggtacgccatgcgaaccaggttctgccagacgtgctcgtggcactgcaagcgcttggattcgaggcgcaggtcgtggacacggcagaggtcgcatctccatccgccgcccctgtgaccacgccgaccaactggtggccgctgggcatctccttggtcactgcatcggcggccgaggcggtctactggctccacaacggcaatcactggtcggttgtcgttctggcgcttgtcgcggtcttcacgggtggcctctccacctacaagaaggggtggatcgcgctcaagaaccgtaatctcaacatgaacgccctcatgtcgattgcggtcacgggtgccatgttgatcggccactggcccgaagcggcaatggtgatggtactgttcgcgctggccgaggtaatcgaagccaaatcgctggatcgcgctcgtaacgctatccgtggcctgctcgacctgaccccggaacaggccacggtacagcaggctgacggcacatggcgcgaggtgggcgccaagcaaatcaccatcggcgcccgcgtccgggtcaaaccaggtgagcgcatcgcccttgatggtgaggtgctggaaggccgctctgccgtcaaccaagccccgatcacgggtgaaagcctcccggtcgaaaaatcccccggtgattcggtgttcgctggcacgatcaacgaatccggctcgttcgagtaccgcgtcaccgccttggccaacaactccactttggcccggatcattcacgcggtagaggctgcgcaaggtagtagtgcgccgactcagcgttttgtcgatcagttcgcccgctggtacacccccgttgtattcggcgttgccatcgccgtcgcgttgttgccgccgctgttcatgggtgcggcatggctcgactggatctaccgtgcattggttctgctggtggtcgcctgcccgtgcgcactggtgatctctacaccggtcagcatcgtcagcggcctggccgccgccgcccgccacggcattctcatcaaaggtggcgtctatctggaagaaggccgcaagctgcgctggctggctctggacaagaccggcacgatcacgcacggcaagcccgcacagaccgactttgtcacatggggcaatgcactcgcctcggacagccgcagcatcgctgccagtctggcggcccgctcggaccatcctgtatccaaggcggtggcacaggccgcgcagacggacggggttgccttgctcgacgtggccgaattcaacgcgctgcccggtcggggtgtgcaaggccaaatcaacggtgcgacctaccatctgggcaaccaccggatgctcgaagagctggggcagtgcacaccagagctggagcagcgcatcgctgcgctggaaaccgctggcaagaccgtcgtgatgctggtgggcgcaaaaggggtacatggcttattcgccgttgcggacaccatcaaggacagcagcaagagagccatcgccgagctgcatgctctgggcatcaacaccgtgatgttgaccggcgataacccccacacggcacaggccatcgccgcacaagccggcattgaccgcgcgcaaggcaaccaactgcccgacgacaaactgcgcgaagtggagcaattgtccagaaacggcaaggttggcatggtcggtgatggcatcaacgacgcaccggccttggcgcgtgcggacattggctttgcaatgggagcggcgggcacagataccgctattgaaaccgccgacgtggccctgatggacgatgacctgcgcaagattccgaccttcgtgcgcctgtcgcgtgcgacagcacaggtgctgatgcaaaacattgtgctggcccttggcatcaaggcggtatttttggtgctcaccttcacgggtcacgcgaccatgtggatggctgtgttcgccgatatgggtgccagcttgcttgttgtcggcaacggcttgaggttgttgcgccgatga

SEQ ID NO: 32303 - DNA, 435 bp, Escherichia coli
atggaaatcagaattggcgacctcgccaagcgctctgggtgcgaggtcgtgaccatccgctactacgagaaggaagggctactgccaaagccagcgcgaagcggtggcaactttcggttgtacggtgaggcgcacattgagcgcttgcaattcatccgtcattgccgttcgctcgacatgacgttgagcgagattcgcgcattgctgggtctgcgagacaacccgatgcaggactgtggggaggtcatcacgctgctggaggcccatattcaacaggtggaaatgcgtgtgtccgcgctgttgcagttaaaacggcacttggttgatttgcgcgagaagtgttctggctctcgatctgtagaggcgtgcggcattttgcaagggttgggcaattgccatggtgaaagtgccacgaacagtcaaacatctgggtaa

SEQ ID NO: 32304 - DNA, 417 bp, Escherichia coli
  misc_feature (266)..(275): n is a, c, g, or t
atgtcatatcttgaatatatcaatgaagtaaaagtgtccgggatagttatcagtgctgtggagaaaaaaatgactgaccagagtataggtttgttaataaagctcaaaaataggatgaagacagaagttgatggtgaaatcactgagagagaattttcagttcaaatcaaggtgtcgcctgaaatgtattcaacctgtttcactggtataaatcagggtgatgagttgatggtctccggttatattgttgtcgatactattatgannnnnnnnnncggttatattgttgtcgatgctattatgattgaagggagagaacatcctcttgactacatgagagtggtagcaacaagtaagttggctcacatacctaaacctctaaaaggttttggacaaagtagctttaatcagatctga

SEQ ID NO: 32305 - DNA, 435 bp, Escherichia coli
atgattggaagggttgaaagtcggtatatcaaagacatttgcgaataccagatgcagctatccggggagaagacgaaatatgcctgttttatttatattgaaagaacaatatacaatcacgataatccatctggtgaaacacctgtaaaatcggctgttggtaatgcagtcatcctgctggcaaaggatgtgatatataacgagtacttttttgatctgcggaagtcatttttcgtgagcattaaagatctgatgacctctggcacaaaagatattccggagacacagaaatatccgggcgtttattgctggatcccgcttttttccataaattccggcgtggtcattaccccggtctataaaattgatcccctgaaacccgtaacggtaaaaaaaccggataagatcactgttgtttgtaattacagagaataa

SEQ ID NO: 32306 - DNA, 150 bp, Escherichia coli
atgatgtccctctgggatgcgctccggatgaatatgatgatctcatatcaggaacttgttcgcaccttccctagacttaacgatgttaaaattttggttgtattaaaatcctcctgcgaaagtgaaatcatccatgtattatctttatga

SEQ ID NO: 32307 - DNA, 1404 bp, Escherichia coli
atgagcgcagaaagctcaggagtgtttactttgaaagagatcaaccggatcaagattatacaggacgtcattgaacgtcgcatcacaacgcgccgtgcggccgagcacctcggtatcagcgacaggcaatgccgcagacttcttgcccgttaccgtgaaggcggaccgcttggtatggccagcagacgatgtggcatgcgtggtaaccgccagttgccacccgggctcgcagatcaggctctggaactgatcaagacgcgttatgctgatttcggtccgactctggcgcgtgaaaagctcgaagaactccacggactgtttcttggcaaagaaactgtccggcgcatcatggtgcgggctggcttatgggttccccgtaaacaacgtgccgcaaggatccctcaaccacggtaccggcgtccgtgtactggtgagctgatacaaatagatggctgtgatcacgactggtttgaaggccgtggcccggcctgcaccgcgctggtctatgttgatgatgcaaccagcaaactgatggaactgttgtttgttaaatcggagtccacgttttcttacttcgaagccacgcggcgctatatcgataagcatggtaaaccgctggcactgtacagcgataaagccggtgtttttcgtgttaacaataaacacgccacaggcggagacgggcatactcagtttgggcgagccatgcatgaactgaacatccagactatctgtgcagaaaccagtcccgccaaagggcgtgtagaacgagctcacctcactttacaggatcgtctggtcaaagagctgcggttacagggcatttgttcaatggaggctgcaaatgacttcgctgaggcctatatggctgactataaccgccgttttggcaaagtaccgcgacatgattttgacgtacaccgtgctgtagaacatgatgaggacctggggcttattttcactgttcgtgaaaaacgtaaagtctcaaaatcgttgacgatacaatatgataaaatgttgtacctgattgaagacagcgaactgagtcgccgtgcaataggtaaatatatcgatgtgtatcactatcctgatggcagaaaagagctgcgcctgaacggtacgctacttccctactctacctacgaccgactgtcagaaatcgaccagggcgcgattgtcgataacaagcgtcttggccgaaccctggagtttatcagtctggtgcagagcaagcgggataacacgcgctctcagtcaattcccgctggagatggcccttcccgacgacggccaaagcaggaagggaagaaatcccagcgctcactggataatgatgacatgctcgaagcactcaaacagcttcagtcacgttcagaggacatttttggtaaaagagcccgctga

SEQ ID NO: 32308 - DNA, 633 bp, Escherichia coli
atgcttcgatacgagttaacgccgaacaatgcaggttttatactgtggggagattcagaagccctgaatgaattacatgaactcattcattacatcgtggatgaaagcccactgattaaagttaaagacggatttatgttatcccttgcctatgatattcgtaaagcacgggaaggtaatcgtcgtgttgagcaacatcagtatgatcaacatgatacatataagctttatggtgttgagcttttatggcctctggtcctggtacagtcctcaatactcagaaactcaatgggttatattcagacagacaaaaaccagctgtctgtcatgtatgcctttgaatacctgatagaatcagcattaacagagtctgagagaacaacgtcgaatgatattatgctaacagtaaaatatgcatcagactctgattttaatttcattgaggataatattgacagcaggtgctgctattttatcagcctatctccggagcaaagaaaaaagcagttaatcagtattgttcgttcttttcattcattatggggtaagtatgcccgtgaaaagcaggacataaagatgctgaacgaaatgaataatacatcatgggtctggccggacaatatcaactggtga

SEQ ID NO: 32309 - DNA, 594 bp, Escherichia coli; identical to SEQ ID NO: 30091

SEQ ID NO: 32310 - DNA, 585 bp, Escherichia coli
atgcagaaaatgaatgacacatttccctatatgccattaatggcttttgcgatgaccggatttatttgcatcatgacggaaactattccagcaggattattgccagaaatcagtaagggaatgaatatttcgctggctagcgcaggccagtgggtcaccgtctacgccctcgggtcattatttgccgctattccgttaactatcgttacccggtcgtggaatcggaaatatgtcttattaatgaccgtagcgggattcttcatttttaataccattaccgcactttcatcaaatgtttacctgaccctgttagcgcgtttgggggccggggcggctgcgggactggcgtggagcctgctggcggggttttcacgccgaattgttgagccgcttcatcagggtcgggctatggcgatagccatggctgggacaccgctggcgctctcactaggcgttccgctgggaacctggcttgggcattatcttggctggcgcctgacgttcggtattatgtcagtactttcgctgttactaatgatatggatccgtatcagcgttccggactctgcggggcggctttgttga

SEQ ID NO: 32311 - DNA, 1158 bp, Escherichia coli
atgcaagattttatctatcataatccggtaaaaattctttttggtcgcgatcaaatttctgcgttagcacaagaagtcccgcagggtaaaaaggtcatgattgtctatggcgggggcagcgttataaaacacggtatattgaaacgcgtaaaagagtccctgacaaacaccctggtttatgagtttggcggtgtagaagcaaaccctcattatgaaaccctgatgaaagccgttgagattgtcagaacagaaaaaattgattttcttctggccgtgggcggcggttcagtgatcgacgggactaaatttattgccgccgcagccctctacgaaaatgatccatgggagatcgtcaagagttatggcggcgtggtgaaacaagctctcccttttggatgcgtgctgaccctggcggccacgggttcagagatgaataacacggcggtgattaatcgggtgaccacccaggataaactctttttcacctccccttacgttatgccgaaattttcagtgctcgaaccggaaatgacctacacgctgcctgaacaacaaaccgcaaacggggttgttgatgcctttgtccacgttcttgagcaatacattacttacccggttaacgctaaggtgcaggatcgcctggcggaaggactgctgagcacgctgaaagaagaaggcccagtagcccttaaaaatccacagaactacgacgccagagctaacatcatgtgggctgcgacgatggccctgaatggaatgttgagcgcaggtgtcccaactgactgggcttctcacatgattggccaggaaattactgcattatacggaatcgaccacgcccgtaccctcgctatcgttatgcctgcactatggcgcttgtgcaaaaaggaaaaagcagaaaagctggctcagtacggtgcgcgtgtctggaatattcctgagtctgatagcgaaaaaatggccgatgaggctatcaatgccaccgtggaattttttgaactgatgggcgttaaaacccgactttctgattatggtctgggcgcggaagatatttcagctgttatcggcaagttaaaagaacatgggcacatcgcattaggtgaacatggaaaaattactgctgaagtggcggaaacaatactgaacatggcactttaa

SEQ ID NO: 32312 - DNA, 894 bp, Escherichia coli
gtggatgaattaaaggtttttttaacagtggccaggctgaaaagctttaccaaagccgcagctgaaataggtgtgacaccctcagccatcagccacacggtgaaatctcttgaggaaaggcttgggatccgcctgctggccagaaccacccgcagtatctccactacggaagcaggtgaaaggctcattaacgaagttggcccgttaatggaacaggttgatgatgctattagtcggttgagtgagcttagggaaaaacccactggcgtcatacgcctcacggcggcagatgatgttatccagtatttgatccgtcctgtattaccggactttctgagtcgctacccagatattcagattgaaatcggcattgactatggatttacagatattgttgatcagcgttttgatgccgggattcgtccgggcgatgttctgaataatgatatgattgccgcaaaaataagccagaactggcgccagcttgttgttgctgcaccagattattttaagcgttatgctaagcccaggaagccgcaggatcttttgaaccacaactgcattaacgtccgctattctgatacgagtggattgtacgcctgggaattcgagaaagatgctcagaaattcagtctgaaagtcaaagggcaatatattgcgaacagcacgattcatcagctcgatgcagcattagacgggctggggattgcctatattcccgagtatgttgcagatggatatatcaaaagcggcaagctgattgctgttctgaccgagtggtgtccatattttgacggctaccatatttattatcctcaccgccgacaggattctcctgcgtttatggcttttctgcaacttttgcgcgacaggtacaataatggaataagataa

SEQ ID NO: 32313 - DNA, 741 bp, Escherichia coli
atgggcatgcttgaacagactgccgcccagtaccgtagcctgcgcatgacctccatcgccgcagagctcgcccagttactggccgaggccgaagccagtgaaatgtcgttcctgagctttgcacagcgactggctgaatacgaactccagcagcgtcaggccaaccgggtacagcgcaattacaagacggcaggctttcctgcgcacaagcatctggagggctttgactatcgccaccagaccaccatcagcaagcgccagatcaacagcctgctggacttccggttcatcgacgagcgcaacaacgtgatcttcatcggcccgccaggcgtgggcaagacccacctggccatcgggattggccacaaggccgtcgaggccggataccgggtattgtttcgcaccgcgctggagttggtggaagaactggagctggcagaaatgaagggcgagctgaaaaagaaaatcagccagctgagcaaggtcgacctcttgatcatcgatgagctgggctacctgcccatgacccggcaggcccgctacaacctgttccagctgatcaacagtctgtacgaataccggtctatcatcctgaccaccaacaaggacttcacctgctggggcgagttcttccacgacgacaacgtggcagtaccgatcatcgaccgaatcatccatcactcacacatctttatgctgggaggagagagctatcggctgaaacagaaaacaacgggttaa

SEQ ID NO: 32314 - DNA, 1524 bp, Escherichia coli
atgatgaggtggaacgtgatacacaaaataaaatcattacatgacgatggcaaaggactttccattcgggccatcagccgggagctgggcatctcgcgcaacagcgtgcgcaagtatctgcgtcaggatgaaacaaccactgcccgcaagctggataaccctgtccgcagcaaacagctcgacacctaccggggatacctgatcagcttgctggccagctttcccgggctcagtgcagtcaagattgcccgcaagctcaaggagaaactgggtgagctgccgacctccgagcgcagtattcgtcgttacgtcagcgcgctgaaggaagaggttgcaaccggtcagcaccgatattacgagccggtggttgatgaggtgccgggtgtgcagtgccaggttgacccgggcgagctgcgtaacgtgctgattggtggcgtggaaacagtggtgcactttgttgtgtttgtgctggcgtactcgcggctgatgtatgtgggcctgtcgtttaagccgctggatacccggcagttcatccagctgcatgacgaagcgctgcgctactttggcggcatgcctgaagagctggtgtacgaccagaccaagctggtggtgattgaggagaaataccgggagctgaccctcaacgagcgttttcatcagtacgccaccacagccggctttcgtatccatgcttgcgaaggctatgaccccgagagcaagggcaaggttgaagcgggcgtcaaatacgtcaagcaggactgcttttacggcgagaccttccgtgatgagcagcacctgcgcgagcatgtgcatcactggctggacaaggtcgccaatgtgcgggcacacggcaccacaggtgaggcacctcagctgcgttttgaacgtgacgaacaggctctgctcaagccctacctgtcaccctcttgcgtcacatctgaagcccgtgagacccgcaaggcggataagaccggactgatctcctggaaggccaacaagtactctgtgcccatggcctggcagcaaagccgtgtcggtgtgctggaagacgacagccagctgcatgtgattgatctacaaactggcgaagtgattgcccagcatgcgttggcgggcggcaaaggtcagattatcaaaaacacccaccactaccgtgaccatgcccagcgccggcagcagctggagcaggacattcaagtactggtgggcgacgaggcactcagcctggccttgtgtgatcagttgcggagatccttgcccaaggtctataaggatcaactgttcgcagtacgcaacctgctgagtaagcacgcacctgttgaacgggacatgctgttgaacctgagccagaagccgggcctgaccgcccgacagatcgaagcgtatctggtggccacccagctggccagccggcgtgagcgtctgcctgagcccgtgccagaggctccgtcagagctggacttgagtgcataccgacagcttggccgctcgactggccaggaggtgacccatgggcatgcttga

SEQ ID NO: 32315 - DNA, 876 bp, Escherichia coli
atgattaaaaacaacgagttaatccatccttttgacgtaaccagtaatgaatcaggtaagacttatcaactgacgcctaactcgtccaagtcggttcagcccgtggccctgctgagattgagtgtatttacccctgtcggcacaaaagaaaaccgcgaccgaaactttgaagttgatgcctctgatgagctttcgtgtatggaaattgcaagatcggagggttatgacgacatcaagataactggtgtcaaactatctatgtctaccgactttaagtgctggctcgggatcatcatggctttcagtaaatatggttttacttccgagaagattagcctgacttttaacgagtttgcgaagatgtgtggtatcagttcaacaaacatcaacaaacgaactcgtgcgcgctttaaagagtcattaatgaaccttgcatcggtagtgcttgccttctcagactctcgtagtggtcggttcacagtaacgcatctggtgcagaaggctatgattgatccaaaaagcgatactgttgagctggttggggatccttctatgtgggaactgtatcgttacgaccataagacattgttaagccttcaggttctatacattttggctaaaaaagaagctgcgcaatctctctatatttattttgaagcaatgccagctggtacgttgttcgttaatatgaaacggttgagggaaaggttgcttcttacaacccctattcgtacgcaaaaccagataattcgtaaagcaatgcgggaacttgaatctatcggatatctcgattatcaagaagttaagaaaggtcgcgacatacaatttcagatcttcaaaagaagccctaagctggcccttgccaaacaaggttga

SEQ ID NO: 32316 - DNA, 477 bp, Escherichia coli
atgaaacaacttactttcaacgacctacgcaagcaaagcgcacaagccgcaaattccccccgcttacgtgcccatcataatttccaccctgaattgagcgacccggtgcagcgtctggctattgctatggaaccgggaacttatgttcgccctcatcgccacccgcatacttttgaactgctgacatcccttaccggtcgctttttggtattgaactttgatgacctgggtaacctgacccagcgcgtcgtgttaggtgaggactgtaaagtgctggagatggatgcaggcacctggcataccgtattgtcactggatgaaggcggcgttatttttgaggtaaaacacggtaggtaccagcctgttgctgatcaagatgccgccccatgggcccccgccgaaaacgagccgggaactgcagagctgatgaaatggtacacacaggcgcaagtaggtgatggcggatatccgcggtaa

SEQ ID NO: 32317 - DNA, 249 bp, Escherichia coli
gtgcagtcgtctattgaacgaacagtatcaggagtccgctgcacgaatgatgacctcaagccggttctggtcgcgctggcgaccgatcagcccctggatgtgcgataccgcgaccacgatctttccggcgattgggcgggctaccgcgaatgctacatcaagcccgacctgctgctgatctaccgcaagtccgacgccgacaccctgcgactggcgcggcttggctcccatagcgagctgttcggctga

SEQ ID NO: 32318 - DNA, 576 bp, Escherichia coli
atggcactcatcggctatgcgcgggtatcgacggcggaacaggacaccgccttgcagacggatgcgctgcgcaatgcaggctgcgaacgggttttcgaggacacggcatccggggccaaggcagaccggcccggcttggccgatgcgctggcttatctgcgcgatggcgatgtgctggtcgtctggcggctggatcggcttggccgctccctgccgcacctgattgagacggtcggcaagctggaagcacggggcgtcggcttccgctcgttgactgaaaacatcgacaccaccacgccgggcggacggctcatcttccatgtgttcggtgcgctgggccagttcgagcgcgacctgatccgcgagcgcaccaaggccgggttgaccgctgccgccgcacgcgggcgcaaaggcggacgcaagccggttgtcactgccgacaagttgcaacgagcgcgggagcttgtcgccaacggcttgaatgtccgcgaggccgccgcacgcctcaaggtaggaaaaaccgctctctacgctgccttgcaggcggccagttctggcagtgcagccgactcctga

SEQ ID NO: 32319 - DNA, 309 bp, Escherichia coli
atgcttgataattctactttcgattacaaaccacatttaaaatctgcttatattgatccgattagaactgtgacagtcatcgatgatgaatacccaactattgatgatttaatttcaccgaccaaagacagtttttctcaagacaacatttctcgattaaaagatattattgatataagtcgaagtgaagaatataattggcttttagatgtctataatggaaaagagaagaaaattcaagagggaaccgtatctaaccgtctttatcacagctgtctcttatacacatctccgagcccacgagactaa

SEQ ID NO: 32320 - DNA, 492 bp, Escherichia coli; identical to SEQ ID NO: 15993

SEQ ID NO: 32321 - DNA, 321 bp, Escherichia coli
atgagcgatatgcactcgctgctgatagcggcaatattgggtgtggtcgaaggattgacagaatttctgccggtatccagcacgggccatatgattattgtcggtcacttgttggggtttgagggcgacacggcgaaaacctttgaagtcgtgatccagttaggatcaattctggcggcgtctgtttggcctgattggcatccactttggtcgcccgttgcagcacgaaggagaaagcaaaggtcgtttaacgctgatccacatcttgctggggatgattccggcggtggtactggggctgttgttccacgacacgattaa

SEQ ID NO: 32322 - DNA, 156 bp, Escherichia coli
atgactgataaaaccattgcgttttcgttactcgatctggccccattcccgaaggttcttcagcgcgagatgcgttctcccactctctcgatctcgcccgtctggctgaaaagcgcggctatcatcgctactggctggcggaacaccacaatatga

SEQ ID NO: 32323 - DNA, 1125 bp, Escherichia coli
atgaccaaaggttttctcgcccttgccgtgccggtattaagcgtgctgccatgggtagcaacgcaaaaacgctggaaagatctctttatttacggctggctggcggttatcagttgcgtactgacggttctcccctggggactggcgatagcgcagcgggagcctgacttctggcactattttttctgggttgagcatattcaacgctttgcactggatgatgcccaacatagagcgccgttctggtactacttgccagtcatcattgccggtagcctgccgtggctgggattactccccggtgcactgtacgctggctggaaaaaccgcaagcattccgcaaccgtctatttgttgagctggacgataatgccgctgctgtttttctccgtcgctaaaggcaaattgcccacctatattctttcctgctttgcacctctggcaatgctgatggcgcattacgcgttgctggcagcaaaaaataatcctctggcgttgcggattaatggctggattaacatcgcttttggcgtcactggcattattgccacatttgtggtctccccttggggaccaatgaacacaccggtgtggcaaaccttcgagagctataaagtcttttgtgcctggtctattttttcgctatgggcttttttcggctggtacaccttaacaaacgtcgaaaagacctggccttttgccgcgctttgcccgctggggctggcgttgctggtaggattttcaattcctgacagagtcatggaaggaaaacatccgcaattttttgtcgagatgacacaagaatcacttcagccaagccgctatattcttactgatagcgtcggtgttgccgcaggtctggcatggagcctgcaacgcgatgacatcatcatgtatcgccagacaggtgagttgaaatatggccttaattatccggatgcaaaagggagatttgtcagcggtgatgagttcgcaaactggcttaatcaacatcgtcaggaggggattattacactcgtgctttcggttgaccgcgatgaagatatcaacagtctcgccattccgcccgcagatgtcatcgatcgtcaggagcgtctggtgctaattcagtatcggcccaaatga

SEQ ID NO: 32324 - DNA, 528 bp, Escherichia coli
atgaaatcggtacgttaccttatcggcctcttcgcatttattgcctgctattacctgttaccgatcagcacgcgtctgctctggcaaccagatgaaacgcgttatgcggaaatcagtcgggaaatgctggcatccggcgactggattgttccccatctgttagggctacgttatttcgaaaaacccattgccggatactggattaacagcattgggcaatggctatttggcgcgaataactttggtgtgcgggcaggcgttatctttgcgaccctgttaactgccgcgctggtgacctggtttactctgcgcttatggcgcaataaacgtctggctttactcgccacagtaatttatctctcattgtttattgtctatgccatcggcacttatgccgtgctcgatccgtttattgccttctggctggtggcgggaatgtgcagcttctggctggcaatgcaggcacagacgtggaaaggcaaaagcgcaggatttttactgctgggaatcacctgcggcatggggtga

SEQ ID NO: 32325 - DNA, 2487 bp, Escherichia coli
atgaaactcagtcgtcgtggctttatgaaagctaacgccgttgcggccgctgcggcggctgccggtctcagcgtgccgggcgttgcccgcgccgttgttggtcagcaggaagccattaaatgggataaagcgccgtgccgtttctgcggtacgggttgcggcgttctggtcggaacgcagcaggggcgtgtggtggcctgtcagggcgacccggacgcaccggttaaccgtggcctgaactgcattaagggctatttcctgcccaaaatcatgtacggtaaagaccgtttgacgcagccgctgctgcgtatgaaaaacgataaatatgacaaagaaggcgaatttaccccaatcacctgggatcaggccttcgatgtgatggaagataaattcaaaaccgccctgaaagaaaaagggccggaatcgatcggtatgttcggttctggtcagtggactatctgggaaggttatgccgcgtccaagttgttcaaagcgggcttccgttcgaacaacatcgacccgaacgcgcgtcactgtatggcgtcggcagtagttggctttatgcgtacctttggtatggatgagccgatgggctgctatgacgacatcgagcaggctgacgcgtttgtgctgtggggctccaacatggcggagatgcacccgatcctctggtcgcgcatcactaaccgtcgtctttctaaccagaacgtcaccgtggcggtgctttctacctaccagcatcgtagcttcgagctggcggataacggcatcatctttacgccgcaatctgacctggtgatcctgaactatatcgccaactatatcattcaaaacaatgcgataaatcaggacttcttcagcaaacacgttaacctgcgcaaaggggcgacggacatcggctacggtttacgtccgacccatccgctggaaaaagcagcgaagaatccgggttctgacgcctccgaaccgatgagctttgaagattacaaagccttcgttgctgaatatacgctggaaaaaaccgccgaaatgaccggcgtgccgaaagaccagttagaacaactggcgcagctgtatgccgatccgaacaagaaagtcatctcctactggacgatgggcttcaaccagcatacccgtggtgtgtgggccaacaacctggtctacaacctgcacctgctgaccggcaaaatttcccagccgggttgcggtccgttctccctgaccgggcagccttccgcgtgtggtactgcgcgtgaagtgggcacctttgctcaccgtctgcctgcggacatggtggtgactaacgagaaacaccgtgatatctgcgagaagaagtggaatatcccgagcggcaccattccggcgaaaatcggtctgcacgcggtggcacaagaccgtgcgctgaaagacggcaaactgaatgtttactggaccatgtgtaccaataacatgcaggccggaccgaacattaatgaagagcgtatgccgggctggcgcgatccgcgcaactttatcatcgtttccgatccgtatccgacagtcagtgcgctggccgccgacttgatcctgccgaccgcaatgtgggtagagaaagagggcgcttacggtaacgccgaacgccgtactcagttctggcgtcagcaggtacaggcaccgggcgaagcgaaatcggatctctggcagttagtccagttctcccgccgctttaaaactgaagaagtatggccggaagagctgctggcgaagaaaccggaactgcgtggcaaaacgctgtacgaagttctgtatgccaccccggaagtgagcaaattcccggtatccgaactggcggaagatcagctgaacgatgaatcccgcgagctgggcttctatctgcaaaaagggctgttcgaagagtacgcatggtttggtcgcggtcacggtcacgatctggcaccgttcgatgactaccacaaagcgcgcggtctgcgctggccggtggtgaacggtaaagaaacgcagtggcgttacagcgaaggtaacgacccgtacgtgaaagcgggcgaaggctataagttctacggtaaaccggatggtaaagcggtgatcttcgcgctgccgttcgaaccggcggcggaagcaccggatgaagagtacgacctgtggctctctaccggacgcgtcctggagcactggcacaccggcagtatgactcgccgtgtgccggaactgcaccgcgccttcccggaagcggtcctgtttattcacccgttggatgcgaaagcgcgcgatctgcgccgtggcgacaaagtgaaagtggtttctcgccgtggcgaagtgatctcgattgtcgaaacgcgcggccgtaaccgtccaccgcagggcctggtgtacatgccgttcttcgacgccgcacagctggttaacaaactgacgctggatgcgaccgatccgctctcgaaagagacggacttcaagaagtgcgcggtcaaactggagaaggtgtaa

SEQ ID NO: 32326 - DNA, 540 bp, Escherichia coli
atgcttgaagccagagagttactttgcgagcgggatgaacgaaccttatttagtggtttatcatttacgctgaacgcaggagagtgggtacaaatcaccggtagcaacggcgcggggaagacaacgcttctccgtttgctgacggggttgtctcgccctgacgcaggcgaggttctctggcaagggcagcccttgcatcaggtacgcgacagctaccatcaaaacctgttatggataggccatcagccggggatcaaaacccggctgacggcgttagaaaatctgcacttttatcatcgcgatggcgataccgcacaatgtctggaagccctggcgcaggccgggcttgccggattcgaagatattccggtaaatcaactttctgccgggcaacaacgccgcgtcgctttagcgcgtctgtggttgacccgtgccacgttatggatactcgacgagccttttaccgcgattgacgttaacggcgtcgatcgtctgacccagcgtatggcgcagcatatggagcagggggggggattgtga

SEQ ID NO: 32327 - DNA, 561 bp, Escherichia coli
atgcctggttacaacgaaatgaaccagtatctgaaccaacaagggacgggtctgacccctgctgagatgcatggtttaatcagtgggatgatatgtggcggtaacgatgacagctcatggctgccgctacttcacgacctgacgaacgaaggcatggctttcggtcatgagctggcacaggcactgcgcaaaatgcactctgccaccagcgatgccctgcaggatgacggcttcctttttcagctttatctgcctgatggcgatgatgtcagcgttttcgatcgggctgatgcgctggctggttgggtcaatcacttcctgcttggtcttggcgttacgcaaccgaagctggacaaagtgaccggcgaaaccggtgaagccatcgacgatctgcgtaacatcgcgcagttgggttacgacgaagacgaagatcaggaagagcttgaaatgtcgcttgaagagatcatcgagtacgtccgtgttgccgcgctgttatgccacgacacctttactcatccgcaaccgaccgcgccagaagtacaaaaaccgactctacactaa

SEQ ID NO: 32328 - DNA, 987 bp, Escherichia coli
atgaatattttaggttttttccagcgactcggtagggcgttacagctccctatcgcggtgctgccggtggcggcgctgttgctgcgattcggtcagccagatttacttaacgttgcgtttattgcccaggcgggcggtgcgatttttgataacctcgcattaatcttcgccatcggcgtggcatccagctggtcgaaagacagcgcaggtgcggcggcactggcgggtgcggtaggttactttgtgttaaccaaagcgatggtgaccatcaacccagaaattaacatgggtgtactggcgggtatcattaccggtctggttggtggcgcagcctataaccgttggtccgatattaaactgccggacttcctgagcttcttcggcggcaaacgctttgtgccgatcgccaccggcttcttctgtctggtgctggcggccatttttggttacgtctggccaccggtacagcacgctatccatgcaggcggcgagtggatcgtttctgcgggcgcgctgggttccggtatctttggtttcatcaaccgtctgctgatcccaaccggtctgcatcaggtgctgaacaccatcgcctggttccagattggtgaattcaccaacgcggcgggaacggttttccacggtgatatcaaccgcttctatgccggtgacggcaccgcggggatgttcatgtccggcttcttcccgattatgatgttcggtctgccgggtgcggcgctggcgatgtacttcgcagcaccgaaagagcgtcgtccgatggttggcgggatgctgctttctgttgctgttactgcgttcctgaccggtgtgactgagccgctggaattcctgttcatgttccttgcaccgctgctgtacctcctgcacgcactgctgaccggtatcagcctgtttgtggcaacgctgctgggtatccatgccggcttctctttctctgcggggggctatcgactacgcgttgatgtataa

SEQ ID NO: 32329 - DNA, 1014 bp, Escherichia coli
atgccggcttctctttctctgcggggggctatcgactacgcgttgatgtataacctgccggccgccagccagaacgtctggatgctgctggtgatgggggttgtcttcttcgctatctacttcgtggtgttcagtttggttatccgcatgttcaacctgaaaacgccgggtcgtgaagataaagaagacgagatcgttactgaagaggctaacagcaatactgaagaaggtctcaatcaactggcaaccaactatattgctgcggttggcggtactgacaacctgaaagccattgacgcctgtattactcgtctgcgccttaccgtggttgactcagctcgcgtcaacgatgcgatgtgtaaacgtctgggtgcttctggggtagtgaaactgaacaaacagactattcaggtgattgttggcgcgaaagcagaatccatcggcgatgcgatgaagaaagtcgttgcccgtggtccggtagccgctgcgtcagctgaagcaactccggcaactgccgctcctgtagcaaaaccgcaggctgtaccaaacgcggtatctatcgcggagctggtatcgccgattaccggggatgttgtggcactggatcaggttcctgacgaagcattcgccagcaaagcggtgggtgacggtgtggcggtgaaaccgacagataaaatcgtcgtatcaccagccgcaggaacaatcgtgaaaatcttcaacaccaaccacgcattctgtctggaaaccgaaaaaggcgcggagatcgtcgtccatatgggtatcgacaccgtagcgctggaaggtaaaggctttaaacgtctggtggaagagggcgcgcaggtaagcgcagggcaaccgattctggaaatggatctggattacctgaacgctaacgctcgctcgatgattagcccggtggtttgcagcaatatcgacgatttcagcggccttatcattaaagctcagggccatgttgtggcgggtcaaacaccgctgtatgaaatcaaaaagtaa

SEQ ID NO: 32330 - DNA, 756 bp, Escherichia coli
atgaaagcactggctcggtttggcaaggcctttggcggctacaagatgattgatgtcccacaacccatttgtggcccggaagatgtcgtgattgaaattaaagccgcggcaatctgcggcgcagacatgaagcactacaatgtcgatagcggttctgatgagtttaactctatccgcggccatgagttcgcaggttgtattgcgcaggttggtgaaaaagtcaaagactggaaagtggggcaacgcgtcgtgtcggataacagcggtcacgtttgcggtgtttgcccggcctgtgaacaaggtgattttctgtgttgtacagaaaaagtaaaccttggtctggataacaatacctggggcggtggtttttccaaatattgtcttgttcctggtgaaattctcaaaattcatcgtcatgcgttgtgggaaatccctgatggtgttgattatgaggacgcagccgtacttgaccctatttgtaatgcctacaaatccatcgcgcagcaagcgaaattcctccctggtcaggatgtggtcgtcatcggcactggcccactcgggctgttctccgtacaaatggcgcggattatggggggcggtaaatatcgtcgtcgttggtctacaagaagatgtggcggtccgcttcccggttgcaaaagaactgggtgcgacggcagtagtaaatggttctaccgaagatgtggtggcgcgctgccagcaaatttgtggcaaagacaatctgggactggtgattga

SEQ ID NO: 32331 - DNA, 216 bp, Escherichia coli
atgccgagctgtaccgggggggcggaatacagcgtcaactttctgccaaaagtaaaaattgatgtggcgattgctgatgaccaactcgatgaagtgatcgatatcgtcagcaaggcggcttacaccggaaaaattggcgacggcaaaatcttcgtcgctgaattgcaacgcgtcattcgtattcgtaccggcgaagccgacgaagcggcgctgtaa

SEQ ID NO: 32332 - DNA, 186 bp, Escherichia coli
atgaagctggtgaccgtgataatcaaaccattcaagctggaagacgttcgtgaagcgttatcttccattggtattcagggcctgaccgtcaccgaagtgaaaggtttcgggcgtcagaaaggacatgccgagctgtaccgggggggcggaatacagcgtcaactttctgccaaaagtaaaaattga

SEQ ID NO: 32333 - DNA, 501 bp, Escherichia coli
atggcgctggcggggctggcggcattaaccagcctgggggcgctcctttttctggcgtggagcctgcgtgacattcgcgcgacgcctgacgctattccggcctggccgctgggcggcgtgatcggctgcgtggtcttaacttttgttctgcgcttacaggcgttcaacacctctcattacgcggcttttcatctggagaacattctgcgcagcaggttagcccgtaaagcattgcagcttccgcctggcgtgttacagcaaatgggcagcgggtcagtggcgaaagtgatgctggatgacgtgaagtcgttacatatttttgtggccgacagcacgccgctctatgcccgcgcgatcatcatgccgctggcgacaatcgttatcttgttctggctggactggcggctggcaatcgcgacgctggggggtactggcgtttggatcggttgttctcgtgctcgcccgccagcgttcggaaaatatggctcagcgttatcataa

SEQ ID NO: 32334 - DNA, 864 bp, Escherichia coli
atgatgtcgggcaatccgttgtcgtggccacaggaacagtgccacatcattgatcaactgtatccttacagtgccgtaaacatcattggtggtgtggtcaccattgagggaattgtcgatctgccccgactacacgcggccatccagtccgccattcggcaatttgatgcgttgcgtatgtggtttgtgatgggagaggagagtgaagtggtcagccaagtgcagccttatcactggcgcgatatccgccatttgactttttccccagattatgacaaggagaacctacgcccagcggcgatcgaaacatttgttgatgagtggttccggcagccctttaccctgctggcgcacgatttgttcgagtttgtcacctttacgtgcggtgaacaatacagcggttatttatttaaagcccatcacggcattgctgatggttggtcaatggcgttgttgtcaaaccatgtcaagcgagcatacgaacagcaggacgtaccagatgatgcgtcaccagcctatagcgcatttctggcgcagcagcaatcttatcaggcgtcaacgcgctttgccgttgatcgtggctggtggcgtgactatatcgacgaataccgcgactgctttccagacagttcccccatcgttactactgagggcatcagttgttccacttggcttgagccagccatgattaaccgtctctacaggttgtgtaatcgttatggctgtacgcttaatacgctgtttattgcactcttcgctctctatcgcgccagagtatgggggggaggaaaaaggcgtaataggcgtgccgttagccaatcggcatactcgcgaggcgcggcgttgctttggcatgtttactaa

SEQ ID NO: 32335 - DNA, 582 bp, Escherichia coli
atgacggtgaataagcttgagccagacaacggcacgccgaacgatgagctgttcacggtggcgggtatgtttgacggctcgctgtataaattactcctgcgcatggcgttgccgatgtttgtcggtatgttaacgcaggtgacctatgccatcgccgatattttttggctgagccacattgatgtcaccaacagcggcatcattgccggtgtggggctggttttccccgttggaatggggttatttgccatcgccaacggcattcaaatcggtatgggatctttgctgtcccgcgccatcggcatgcagcggttggatcgtgcacagcggattttgtcggtcggtatcatcatcgcgctattctttgcgatcgtgatcaccgtacttggctatgtttatgcccagccgctattgcgctcactgggggccacgaagagcatcatcggctacgcaacggagttctattattattcgctgctgaccgtgttcagcatcatgttgattggcgtcatgatggggctgtttcaaggcgcgggtaagatcatggtcatcatgaaggcctcattgttggggcgttggtaa

SEQ ID NO: 32336 - DNA, 6225 bp, Escherichia coli
atgacttacagtgaaagcgatattgccattgttggcatgaactgccggtaccccggcgtgcacagcgttgcggcattcgaaacggtgcttcgcaccggatgcaacattttggaccccaaagtgaccccgagcaacggccacaatcacattacgctgaacaacgtctatgagcacatggcggagttcgatgccaacttttttggctacagccgtgcagaagcagaaatcatggatccacagcagcgcgtatttctgacctgtgcttgggagatgtttgaacaaagcggttacaacccgaagcagcacgatgcgcgcgtcggcctatatgcgggcgtgagtaccagcttctatttgcttactcacctgatgaacaacccagacaagcttgcacaactcggtggtctccaaatcatggtcggcaatgacaaagatcatttgacgtcccaactggcttaccgcctgaatattaccggcccttgcgtgacggttcaggccagttgtgccacctcgctggtggcagtgcatctggcctgcgaagggctgctgagcggtcagtgcgatatggcgctagcgggtggcgtcacgtttcgcatggaggagcagcgcagctatgaatcgcacggtgatgggctgcaagcagaggatggcctgattcatacttttgatgcgcaggcgagcggtacggtctacagcagtggtttgggcatggtgctgctcaaacgggctacagacgcgcaggtgcaaggggataacatccttgccgtcatcaagggaagcgccatcaacaatgatggcggtgcgcgcagtggttataccgtgccgggtgttgatggtcaggaagctgtgatgattgaggcgcatagcttggcggaggtgacgccgcagcaaattcagtatctagaactgcatggcagcggcacgccgttgggtgacgctatcgaattcgcggccatcaaacgtgtgtttgggacgccagcgccgaatgcgacaccgtggcgtctgggggctgtgaaacctaacgtgggtcacgtagaaatggcatctggcatcaccagtctcataaaaacggtgctgagtcttactaaccgggtgttttaccctacgctgaattttcaacgggctaatccgcaactggggttggaggacagcccgtttgaagtggtgtcccgtttaacgccttggccggagggcaccacgccacgcaccgctggtgtgagtgcgttcggattgggcggcaccaacgcacatctggtggtacaagcgccgttatcgacgccgcaggcgagggcgcagcagatggggccttgtgtcgttgtactctcggcaaaaaaccacaatgccctggaacagatgcaaaacgccctgctggcgaaactggccgcacatccagagatacgcttacaggacgtggcttacaccctgcgtcacgggcgtttctccgccccggtacgtaagtgtgtcatcgcagagaattgcacccagctagcccgacaactccgcgacgcaccgatggtggaggcaaccacgggttgcacgatctactggagattggggcaccgtttcgttgttgcactcgagacgcttagtgactggctggcgtgctctgaggtgttgtcacaggcggtgggacaactgctcgagcattttccgctcgaaccagcctgtctgcaagatctctcccctgcgcaacggacgtttatcagccagtatgcgctgatcgcgttgattgacgaacgggaaacgttgaatgtggtgctatgcggcgacggtgatggtggctatgctgccgccgtactacgaggagactgcacactagagcaagcatggcacaggttgaatgcgggccaaccgtttgatgatgtgccgacgaatcccctcttgcagcccgatgtctgctctttgatgctggacgacgcggcgagtgatgccaatcgcaccgcgctagaggcgttagggcagttatggttggctggcgtcagcctagattggcgctgggtggatgcggcggagcgtatgttgggcagtcaacgcatcgccctgccggggaccgtttttacaccgcagcgctattgggtcgaggccgtacggcctgccacgttctcccacgaatcgtcgaataatctcttatcccgcgcaacaaaatccgatattattgcagtggtgacggagatatgggaacgcacgcttggtgtcagcattgatgatcaccacgccagcttcttcgaactgggtgggcattcgctgttagcgtcaaccattttatatgatattcagcaacgttacggcatcacctgtacgctaagcgcattctttgccgatcccaccatcgagggattaagttgctatctgctcgaacaaggcggcagtgagacagcggtttcagcattgcctgatacggtctttgcccctgaccagcagcacctaccttttccgctgactgacgtgcaacaggcctattgggttgggcggcgaaaatccttgggattgggcaatatttccacccatatctatgtggaatatgaactacaggggctagatgaaacagcgttcaaccgcgcgctcaatgcggtgattgcgcggcacagcatgttgcgtgcaattgtcaacgatgacggtatgcagcagatattgccaaacgtgccggaataccacgttgccttctataccacccagtgcgaggatgcgtttcaacagcgttgccgtgagctgcgtgacaccctctcacatcagatgattgattgtagtcgctggcctctgtttcagatggaggtcgtggttgatccgcagcaaaaagcccggctacatgtatctatcgacctgctgatagccgatgcatggagtctggagttgttcattcgggaactagcttatcactaccgccatccgcaggcggcattgcctacattgacgtacagtttccgcgactatgtgctgaccttaaaatcctacgagaaaacgccgcagtttgaacgggcacgtgactactggcgcgcccgcatcgaaactctgccgccggggccacgattgccgctgcgtaccgaccccacgaagctggaaaaccccacattcgtgcgccgtagctattgtctatctcgtgctatctggcagcgcttgaaaacgcaggcgggtcagatgagtatcacgcctactacactgctgctcacggggtttgctcaggtgttggcgcgctttagttcctcgccgcactttagccttaacctgacgctgtttaatcgtctgccgttgcacgcagatatcaatcacttaattggcgattttactgcactgacgttgctggagattgatatgtcgcagggagaaaccttgcaggcgcgggcaaacgtgatccactctcaactgtggcgcgatttggataaccgcttgtttggcggtatccaggtctctcgactgctggtacaaactcaccgcgatccggcgaaatcggtgattcctatcgtgttcaccagcttgctcaatcaatatgaggcgagctgggaaacggatgatacgctgttcaaccaaccgcaggatgatctgtacagtatttcacagacaccgcaggtgtggctcgatcatcaggtaatggagcgtaacggggaattgcactttaattgggacgtggtggaacaattgtttgaaccggcgctaatggatcagatgttccagtgttattgccaactcctgcacgccctagcccagcgaccacagctctggcatgagactcaagatgtgctggcgctgcccaccgttagtgcaccggtcacgcaggctcctgcacctacggccttgttgcaccatgggttactgcgtcaggcagcactgacgccacaggaaactgcgctgatcagtcctatccgtgaattgacctatcgccaactgtcgacggcggcggatcatgtggcccgcgccctgttagcgctgggcgtgcagcatggcgaccgcgtggcggtggtgatggaaaaaggctggcagcagattgccgccgtacacggcattttacgactgggtgcggtctatctgccagtggatccggtgctaccgccacagcgtcgccagcttttgctgacggtgggcgaggtgcgggtacaagtaacgcagccgggtctcacgcaattggagccgtcgctgcccgtgctgatcatcgacgacggaatgctggacacgcctgctgcgccgttgcctgaagtggctggggatgtcacggatctggcctatatcattttcacttccggctccaccggtaccccgaaaggagtgatgatcgaccaccgtgcggccatgaacacgctggaagacatcaacgaacgctttggcctcaatgcgcaggatagggtgttcgggctgtcatcattgagctttgacctgtcggtttacgatgcctttgcgccttttatggtgggtgcagcgctggtactgccggaagcaggacgggaaaaagatccgcgtcattggcagacagttatggcacacggtcatgtaagcgtctggaatgcagtgcccgcactgatgcagatgctgtgcgaataccacagcggcgatcggatgagttatccgacgttgcgtctggcactgttgagcggcgactggatcccgctaacgttaccggagcagatgcgcgagcggctcaatgaaacgatggacatcatcagtctgggtggagcgaccgagtgcgccatctggtcggtctactacccgataggtgaggtggaatcgacgtggaccagtattccctacggtcggggcctgcgcaaccagccagtatacgtgctaaatgcgcaactggaggaatgtccggtcggggtggaaggagagatttgcattggcgggatggggctggcacaaggctacctgaacgacgcagagaaaacggcggcgagctttgtctggcgcgaagcgagtggtgagcgaatttaccgcactggggatcgcgggcgctactttgctgacgggcaagtcgcctttttggggcgcaacgatacccaagtgaaggtgaatggttaccgtatcgaactgggggaaatcgagcgctgcattgcgcgacatcccgatgtggagcagtcagtggtggtggcagtgggtaattctcaacatcgtcggctggtcgcttttgccaaactgcacgatcgccaccaggcgcaggcattgcaagctaaggaagcggaggcggcggcactggcgcagggtattattgtgaatccggcacagcgtctagcgttcaaactcaaggagccacatattcgcgcgctggatggtctgggcattgcactgacggcaccggcggatagcacacgttacatcaaacgccgcagctatcgtcatttcagcgcgcaaaaaaccacgctggcacagttggggcaattgctgtcgggcttggggcagatgcgtctacccggtctaccttttgccaagtatgcctatgcgtccgccgggggggggctatacccggtgcaaacctacgtgtacctgcatccagacaagatcgaagagggagtatccggtatttactacttcgacccgcgacagagctgtcttatgccggtagcaccagaagtcgagctgaacagtggttttcatgccggacctaatcagtctattgccgatcgggcggcattcacgctgtttatggtggctgatatggcggtgatctcgccattctatgggcaagaggcagcttggcacttctcggtgatggaagcaggtactctctgccatttactggaagaagatgcgccgcgctacggattggggctgtgccaacttgggatggcagacttttccgctgtggcatcgcattttcaattgtcgccacatcatcgctatgtccattgcaccgtggggggcgcgatagggcaagaggcggcaagtgctgcagcattgctgcgcgatttctccacctatgagaaaccgaaggaaaccgctgcgccgctggacatgcagagctacaaagatgccatgctgcgcggcctgcgtcagcaactgcctgactatatggtgccgagtgatctgatgttagcgaccgattttccgttaaccgctaacggcaagctagatcggcaaaaattacagctgcagggcgaacaaattgcccaccagcgtgacggcgtgggtccaatccaggtggacagtgcgttacaacagcggctggtggcgctctggcaggaggtactcggcgtgagccacgtgtcggccgaagacgatttcttctcgctgggggcagttctatag

SEQ ID NO: 32337 - DNA, 702 bp, Escherichia coli
  misc_feature (629)..(638): n is a, c, g, or t
atgaaatccgagacgctaactgtccaacaactttttcaagaccgccgacaatactgtgttccattctatcaacgtgcctatgtatggactcagcaagaccagtggtcagctctactggaggatatcctagagaaagtacaatcccggctctcgggtacaaaaccaactccccatttccttggtgcggttgtactggaacctcaatcaaaaaaaggattattaggtgtagattccatacatattattgatggtcagcaacgattgaccactcttcaatatgttctggcatccatccgattagcattacgtgctacggatctttccagcttagaggctctcatttcgccttgcctgaaaaactcaaacgaagacacaatgcgaaataaagaagtagaacgcttcaaactgtggccaacttttcgggatcaaactcattttattcaaagttttaatgttgaaaatattgacgatctccgggacgtattctctgatagtttcacgcagcatggtacgttgcgtaagcattttaatcacccgccatcactagaagcattatgtttttttactgaagcctttataaaatggattaaaatagaaaaccactcaccacaagaaaatgctgtagctcnnnnnnnnnngataaatactggtcggaaaaacaacgccgtggacgtattaataaaccacgcatggagtggctag

SEQ ID NO: 32338 - DNA, 141 bp, Escherichia coli
atgggagcgatttatgttaaacgtttgattctgtcggtagcactgataataccgatagcatccaatgcttctgatgctttgaaccagccgagcagtagtctaaatgatggtgttgagacttttttttatttcctgctttga

SEQ ID NO: 32339 - DNA, 204 bp, Escherichia coli
atgacacgcattcggatcgaaaaaggaacgggtggctggggcggcccgcttgagctggaagccacgccgggcaaaaaatcgtctatatcaccgccggtacccggcctgcgattgttgacaaactggcacagcttactggctggcaagctatcgacggatttaaagaaggtgaacccgcggaggcggaaattggtgtcgcggtaa

SEQ ID NO: 32340 - DNA, 303 bp, Escherichia coli
atgtctggcggtgaacagcagatgctggcgattggtcgcgcgctgatgagcaacccgcgtttgttgttgcttgatgagccatcgctcgggctggcaccgattatcatccagcaaattttcgacaccatcgaacaactgcgcgagcaggggatgaccatcttccttgtcgagcagaacgccaaccaggcgctaaagctggcggatcgcggctacgtgctggaaaacggtcatgtagtgctctccgataccggcgacgcgctgctggcgaatgaagcggtgagaagtgcgtatttaggcgggtaa

SEQ ID NO: 32341 - DNA, 144 bp, Escherichia coli
atgctcaatgaggcacgagcggatatggttatcgcgccgcatgtcgctgtttttccggccctggctatttttctgaccgtactggcgttcaatttgttgggcgatggtttacgcgatgcgctggatccgaaaattaaaggatag

SEQ ID NO: 32342 - DNA, 450 bp, Escherichia coli
atgttctgcacgccctgggtatacgtaacaatggacaaatgtggtacatttgcccgcgttgtcgcggtatccccaacagaggatgtagagtcgtcttcggatgcatgggatgaagatgccgtttttcaggggggcaggatgggtaaactaacgctgctgttgctggctattctggtctggctacagtattcgctgtggttcggtaagaacggtatacatgactatactcgcgtcaataatgatgcggcggcacagcaagctacaaacgcgaaacttaaagcgcgaaacgatcagctttttgccgaaattgacgatctcaatggcggccaggaggcgctcgaagagcgtgcgcgtaatgaactcagcatgaccaggccgggcgaaacgttttatcgtctggtgcctgacgcgtcaaagcgcgcacagtctgcggggcaaaataatcgataa

SEQ ID NO: 32343 - DNA, 147 bp, Escherichia coli
atgcagtttaaggtttacacctataaaagagagagccgttatcgtctgtttgtggatgttcagagtgacattattgacacgcccgggcgacggatggtgatcccccctggccagtgcccgcctgctgtcagacaaagtctcccgtga

SEQ ID NO: 32344 - DNA, 450 bp, Escherichia coli
atgaatgaaattgaaattccgccattgcgcaaacgtcgtgaagatctcaagcaaatgattgacgatattattgataagtatcaggagcgcacgcgaaaaaaaatgacaatcacgcctgacgcaaattcagttctgcttgagtaccgttggcctgggaacatctccgagttcaaaaatcgaatggagaaggtatttattaactgcaatcgacttgtactcgggttagagaatattcctctggatatccgacaaaataacagtagtggcgacgatgatatccctcatcttacttcactggcagaattggagatgcaagctattgagcatacatgtcgtgtctgcgaatggaatctaactaaagcagctgaagtattaaaaattggtcgtacaacattatggcgcaaacttaagatctataatctctatccaaatgttgagcatgcagattga

SEQ ID NO: 32345 - DNA, 498 bp, Escherichia coli
atgagaattaacaaaatcctctggtcgctaactgtgctcctggttgggttgaatagccaggtatcagtagccaaatcctccgacgatgataatgacgagactctggtggtggaagccaccgctgagcaggtattaaaacagcagccgggcgtgtcggttattaccagcgaggatattaaaaagacccctccggtaaacgacctttcagatattattcgtaaaatgcctggcgtcaatcttaccggcaatagcgcctcgggcacacgcggtaacaaccgccagatcgatattcgtggtatggggccggaaaacaccttaattttaattgatggtgtaccggtgacgtcacgtaactccgtgcgttatagctggcgtggagagcgtgatacccgcggtgacaccaactgggtgccaccggaacaggttgagcgtattgaagtgatccgcggccctgcggcggcgcgctacggttcggggggcagccggggggggtggtga

SEQ ID NO: 32346 - DNA, 939 bp, Escherichia coli
atgaagaaagtgctcactctctcactactggctctgtgtgtgtctcatagtgcagtagcagcaaactatacgttcaataacgataatattgccctctcgtttgatgatacaaactcgacgattgtgctgaaggaccgtagaactaaccatccgatcacaccacaggaattgttctttctgacactaccggatgagacaaaaatccacaccgcagatttcaaaatcaagcacatcaaaaaacaggacaatgcgattgtcatcgactttacgcgcccagattttaacgtaacagtgcagttgaaccttgtgaagggaaaatatgccagcatcgactacactattgccgccgttgggcaaccacgagacgtcgccaagattaccttcttcccgaccaaaaaacagtttcaggctccttacgtagacggcgcaatcactagctcaccgatcattgcggactcgttctttatcctgccgaataaaccgatcgtgaatacctacgcctatgaagcaacaaccaatctcaacgtagaactgaaaactccaattcagccagagacgccggttagctttaccacctggttcggtactttcccggaaaccagccagttgcgacgcagtgtgaaccagtttattaatgccgtacgtccacgtccgtacaagccttatttgcattacaacagttggatggatatcggctttttcactccgtacaccgaacaggatgttctgggacgcatggacgaatggaacaaggaattcattagcggccgcggagtggcgttagacgcttttctgctggacgatggctgggacgatcttaccggacgctggttatttggcccggcattcagcaacggttttagcaaagtacgagagaaagccgatagcctgcacagctccgttgggctatggctttcaccgtggggggggttacaataa

SEQ ID NO: 32347 - DNA, 375 bp, Escherichia coli; identical to SEQ ID NO: 12913

SEQ ID NO: 32348 - DNA, 873 bp, Escherichia coli
atgccagatcgggaagcgagcgctgtaccgttaacgcaattagatctggcggtacacgtagccactaagcttaaccgctctcatctgctgaccgcacggcatagctatattctgccggttctgggacgtagcgagattgacatgcaaaaaagcggtgcgcaggcggtaaccgttgaagattcaatgtcgatgattcatgcctcgcgtggtgtgttaaaacccgccggtgtaatgctgaaatcagagtgtgcagtggtcgcgggaatcgcgcaagcagcactaccccagagcgtggtagcctgggagtatctggtggaagattatgatcgcattcgcaatgacattgaagctgtgctgccagagtttgccgactataaccagcgcatccgtcatcctggtggttttcacctgataaacgcagcagctgaaaggcgctggatgacgtcgtcaggtaaggctaatttcattaccagtaaagggctgttagaagatccctcttcagcgtttaacagtaagctggtcatggcgacagtacgcagtcacgatcagtacaacacgacgatttatggtatggatgatcgctatcgaggggtattcggtcaacgagatgtggtctttatgagtgctaaacaagctaaaatttgccgtgtaaaaaacggcgaaagagttaatcttattgcactcacgccagacggtaaacgtagctcacgccgcatggatagattaaaagtggtcatttaccctatggctgaccgctcactggtgacctattttccagaatcgaatcacatgctaacacttgataaccacgatccattaagtggcattcctggctataaaagtattccggttgaattagaaccatcaaattaa

SEQ ID NO: 32349 - DNA, 423 bp, Escherichia coli
atggctaaagatacaatcaccgttgtcgcgacaggaaatcagaacacggtatttgaaacgccgtcaatggtcagtgtcgtcacgaatgacacgccatggagtcagaatgcggtcacatcagccggcatgctgaaaggtgttgccggtctcagccagactggtgcaggacggaccaatgggcagacctttaatctacgcggctatgacaaaagcggggtacttgttcttgttgacggcatccgtcaactcagtgacatggcaaaaagcagtggcacttatctggatccggcactcgtcaaacgtatcgaagttgtccgcggaccaaactccagtctgtacggcagtggcgggctgggaggtgttgtggacttcagaactgccgatgcagcagatttccttcccccggagagacaaacggtttaa

SEQ ID NO: 32350 - DNA, 1365 bp, Escherichia coli
atgcgtaaaagaggtaatatctatcaaagtgatggtgagcgcgcacctaacaaggaaaaacctgcagccctgtttgcgaaaggctctgtcggtataacagacagtaacaaagcaggtgccagcttgcgtctctaccggaataacaccactgaaccgggcaatcccactcagacacatggtgacagcggcctgcgtgacagaaaaacagtacaaaatgacgtacagttctggtaccagtacgctcctgtggataacagcctcatcaatgtaaagtcaactttatatctcagtgatatcactatcaagacaaacggtcacaacaaaacggcagaatggagaaacaacagaacctccggtgttaatgttgtcaacaggagtcatactctgatttttccgggagcccatcagttaagttatggcgctgaatattaccgtcagcagcagaagccagaaggctctgccacactatatccggaaggaaacattgactttacatcgttgtatttccaggatgaaatgacaatgaaaagctacccggttagcattatcgtcggttcccgctatgaccggtacaagagcttcaatccccgtgccggagaactgaaagccgaacgcctgtccccaagggcggcgatttcagtctcaccgacagactggctgatgatgtacggctccatatcctctgcattccgtgcccccacaatggcagaaatgtacagggatgatgtacatttttaccgcaagggtaaacccaattactgggtacctaaccttaatctgaaaccagaaaataacattacccgtgagattggcgcaggtattcaactggacggcctgcttacaggcaatgatcggctgcagttgaaaggcggatatttcggaacggatgccagaaactatattgccacacgcgtggatatgaaacggatgcgttcttattcttataatgtatcccgggcccgtatctggggatgggatatgcagggtaattaccagtctgattatgttgactggatgctttcttataaccggacggaaagtatggatgccagcagcagggaatggctgggctccggcaatcctgacacacttatcagtgacatcagcataccttttggtcatagaggcgtttatgccggatggcgtgctgaactttcagcatcagccacgcatgtgaaaaaaggcgatccccatcaggctggttataccatacattccttttcactgtcttataagcctgtaagtgttaaaggctttgaggcgtcagtaactctggataatgccttcaacaagcttgccatgaatggcaaaggtgtgccgctttcaggcagaactgtcagtctttatacccgttatcagtggtaa

SEQ ID NO: 32351 - DNA, 966 bp, Escherichia coli
atgtatgatgttttttcatgttttggtgttctggctaaaaaccagaatacccgtgacatccgaaatattaaaaatttttcctcacatcaacattcactgggcgacatgtttgatgaattaataaacattattgataaagaacaagtattgagtacagaacaacgaaaagttatatttaggagatatgaagatctctatgttaagctaatgcactattctgtttttacagacaaaacacatcaaataataaaacaaaaatattttaatgacattgtaccaatgattctcgcactcgacatcaggaacacatatcgcccggataatgagatggcattttactatcatattcattcttttctcactcagataccggataatgaggatgatatatatcatgctgcaaggacatatctgcgaaattacgttaagttatgtttatctggatacacaccagcgaatgcgcatttcaaagatatctttgatggcgtatatgaattcattcgtaatattcgcaaaaacagtacaccaggaaaaacaaaacttatcgcaactatcaacacatgcaaagaaacctgtaaacatctgctttatttaagtaatgaagacaaggaaaaaataatttctgacttagataaaattcaggttgcatgttattatctcactatattactggctttcgaaagacgaacttcattaacaagcaccctggcaactttatataaaatgctgataagcgaaagagaagtttcagaatatgaatgccagttattatatttaaccaacccaatagatgtaatgaatatactgaacaaatacatatattactttcctaatgagaactcaccattttatacactgaaaattgacagtgcattatcgtgggatgccattgacgcaatacgagactatagtatttctgatatttatctttatcctgaacaaaaaaacaataaattgtgtcgttga

SEQ ID NO: 32352 - DNA, 420 bp, Escherichia coli
gtgaccagcgccctttcgccataccatgaaaatcgtatcgcactggacattaacgatctggaaaacgatgttgaattgaaaagcaccagtactgtcgccgtcccgcgccagggagccgtcgtctttgctgattttgaaacagttcagggacaatcggcaattatgaacatcgtgcgaagcgatggtaaaaatattccatttgcagcggatatttatgatgaacaaaacaatatcatcggcaacgtaggtcagggtggtcaggcctttgttcgcggtatcgggcaggaaggaaatatacgaattacctggattgaagagggcaaaccggtcagttgttttgctcattatcaacaaaacacgacatcagaaaaaatagcacaatctattattctgaacggacttcgttgtcagatacagtaa

SEQ ID NO: 32353 - DNA, 240 bp, Escherichia coli; identical to SEQ ID NO: 28165

SEQ ID NO: 32354 - DNA, 363 bp, Escherichia coli
gtgaaggtcaatggccgctgggcgtatctgtaccgggccgtcgacagccggggccgcactgtcgatttttatctctcctcccgtcgtaacagcaaagctgcatacctgtttctgggtaaaatcctcaacaacgtgaagaagtggcagatcccgcgattcatcaacacggataaagcgcccgcctatggtcgcgcgcttgctctgctcaaacgcgaaggccggtgcccgtctgacgttgaacaccgacagattaagtaccggaacaacgtgattgaatgcgatcatggcaaactgaaacggataatcggcgccacgctgggatttaaatccatgaagacggcggtgatgctgccaacttactga

SEQ ID NO: 32355 - DNA, 261 bp, Escherichia coli
atgaaagcattctggcgtaacgccgcgttgctcgcggtttctctgcttcccttctcttctgccaacgccgtggcgttgcaggcaaaacagtatggcgattttgatcgctatgtcctggccctctcctggcaaaccggattttgccagagtcaacacgatcgaaatcgtaacgaacgagatgaatgtcgcctgcaaaccgaaacgaccaacaaagctgattttctgaccgtacatggtctgtggccaggattgcctaaatag

SEQ ID NO: 32356 - DNA, 453 bp, Escherichia coli
atgtgttcatcgccggaaaccgggttatcactggaaacggccgctaaactaagtgaagtcatgccaggagctggcggacgttcctgcctggaacgctacgaatatgccaaacacggtgcctgctttggttttgatccagacgcatacttcggcacgatggtacgcctgaatcaagaaattaaagagagcgaagccggaaaattccttgcggataactacggtaaaacagtgagccgccgtgactttgatgccgcctttgccaaaagctggggaaaagagaacgtgaaagcagttaagctaacgtgccagggtaaccctgcgtatttgactgaaattcagatctcgatcaaagctgacgccatcaacgctccgctttctgccaactcattcttgccacaaccacacccaggcaactgtggcaaaacctttgtgattgataaagcaggttattaa

SEQ ID NO: 32357 - DNA, 1734 bp, Escherichia coli
atgccgcagcttaaaggtgtgattaaaacgcccacgggagaaccgctgggcggcgcaaccattacactgacctccctgcacaaccgtgcagggattctgaaaggtgttttcagtcacgtcaccacacagaatggggaatataacttccccgttctgccgggcgtgtacagcgttcgcctgacgcagagtgtacagcgcctttcagaaatcggtgtcatccgcgtttatgaagattcagcggatggttcgctgaatgattttctgggcgcaaccgatattgacctgcgcccggaatccctgaagaaatacgaggaactggcacagcaggcgcagcagagcgcggaagccgcagcagaaagcgagcagcaggcagggaaacatgcaggcgcagccgcccaggcaaaagaagagataaaaaaactggcggaaggtgttcagcagaacgccgacgcggttgcggagggtaaacaacaggccgaaaatctggtctcacaggttgagaatgccgccgaggaggtaaaaaaggacgctgaagctgctaaacaggctgcatctgatgcagagcatgtcagggaggatattgacaccgcgttatctgcgacactgaaaacggcgaatcgtttatcagagctggctgatgaaggtgaagaggctcagcaggaatcccgtgataatcttggactgaaaagcgcagccacaatgacgccacagagcgacattcgtgaccggactgaaggtcgtctggcgacacctggtgcatttggttttggtcacaggtttattccgggggaggccgtcaggtttaaatctgaggctgattttctggcatgggcaagatatgtggagccaggagaatattatgtggatggggcaaacggtgtacttcccggcattgtttttcagggggtgataagtatccgctggctggaagcaaaccataacccaccacttccgttacatacagcaaaggccattattttctacggcattaatggcaatatttattacaaccgttactggtccactggtaatggctggctgactggctgggaaaacctgaaagtaaacgaggttgcactcagggaacttattgaaacaagggctcctctggaaagcccggaattcacaggaaagccgactacaccaacaccaccggacgacgcagccggcaatgaaacagctaacgctgaatttgtcagaaaactacttaagaataccgaaggttcttcatcgggtactccaaggatttccgaggatgcaaagaatttactgaaaacgcaatccgatgccttatttgttgacggtacccatcccgttattccaaaagtgacaggatgcacactgaacaccggtctgggcccttcatacggagcggcaaatattttaccgggtggttcccgtgtttataccagggaagtcgatatgcctaaccccatcggaatgacatctgttggatatatagggattttcgtcacagcacaagttacaccaggttacctttatctgaataacgacagaaagtatattcctgtacaatattttgtcacttctgtttcttcaaccgccagtggaataacagtgaagatacagatagtcatgactgacaccccatgttatgcactggacatatcgacgttacaggaagagccaggcgataatgaaggaaacctaccctgtattttgcgggtacacgccattacaggggtcacattacgtcagcttggatggggataa

SEQ ID NO: 32358 - DNA, 531 bp, Escherichia coli
atggaactcagaaacgtcacgcgttattacccggaagagatgccttatggtgaaaacattcagtatttccgcagtgaagacggacaggatttttatgaatcactggataaattcacgaagaaatacaaattgtgtattcacccggaaaccggcgtgatttattcgatggcggaagacgtgtcccgtctttatccggctggcttcactattgtggaagtggacgagctgccggaaggttttggcattgaagccagctggtattacaaagacggcgaagtgctgccggttcctgttgattactcgcgactggcagaaaaaaaacgccagagcctgctgaatgaagcaaaggacatcacctccgactggaaaaccgagctggagctgggcaccatcagcgatgacgacaaggcccgtcttacgcagtggatggagtatatcaaagcggtaaaggcgctggatttaagcaccgttactgacgaagcctcctttaatgccatcaactggccggagcgtcccgatgccgcagcttaa

SEQ ID NO: 32359 - DNA, 585 bp, Escherichia coli
atggctcacagcgtgacggaatggctgaccgcactgcaacaggtcatgccacggggtaaggcatggccgcgtgataacgacgcggatttaaaccgttttttaagggcgcttgcagcgcgtttaacccgcgttgaatacgatgcctcgcgtctgcatgtggagatgcgaccggaaacaacgctccagctgctgccggagtgggagcagtatctggcgctgccggaatgcggaattgccgccaccacaacggaagcccgccgccgggccgtggtggagaaataccgccgcaaaggcgggctggcaacctggcagattgaagccgcagcggcggcgctgggcttcaccattaaggtgacggccgttctgccgcaccactgcctgcgtgactgcatgtacccgctgcatccggcacggtatcgctggctgctgaaagtggaagtcccggacaacgatgccgggcggtttacctgtattgatgacgttatgacgccattaatcagcgaacggacccgagagctggaatgcctgctgaagcattaccggctggcgggtacggaatatgaatattattacaccggagaataa

SEQ ID NO: 32360 - DNA, 1794 bp, Escherichia coli
atggcaacaggtaaccgtctcagcacggaaatcatgatcaaccttgccgggaacctgaccgccaaagcccggcagtacggcgcaaacatgtcgcagttcgcccggaataaccagaaggctatgcgcctggtcaaagccacaacggaggccgccgggcgcagtcttgacgtgctgggtaaccgctacacggcaatgatagccgggcttggcagtagcattaccatcaaacaggttgccgattttgatgcgcagatgcgccggatggggacggatgcccagttaaccactgaacaggtaaagacgcttcacgacaaaatcagggatgtgtcgaaccagaaagatattcgtattgatgcctctgcgcttggtcagggggccagcgaacttctgggaaaaaccggtgattatcagtatgtggtggacaacctccgcaacatggggctgatgatgcaggcgttcggtgttgacggacaggttgctgccgggctgatggcgcagttctgggaaaaaaacatccggggatctgatgcggtcagtaacataatggacaggttgtatgcgcagttcgctgtggggtctgtgagtgttgctgatgttgcccgcgttgccccgaaactgttttccatcattcaggatcagggaccggaagccattgcccagatgggggcatttgctcaggtgttcgccaaaaataaaggcagcattgatgagacggtaaccagtattcaggccatgtatgcctccctgtcggacaaaaagaacatcgagtttctgaaaaaaaacggcattgatgtttttgtcaaagggacaaaaaacatcaaaaagccttatgaactgatgatggaaatccttaaacgggccaaaaacgacccgctgaaacttcaggatgtgtttgatctgaccggaatgcagggaattaaggcgctgcttaagccagaaaaccggcaactgatggaacaaatgatttacggcacgattgaactgggttccacgcaaaaggccgcacaaaccaatgctgaaggctttaatgccgcgatgcagtcactgaataacgaatggcaacgttttgctgaagggcaactggcaaaacccgttcaggaactggccgatgcactcaacagcgttgaccagaacaccgtccagaactggttacaggtcggtaaatatatggcaattgcgctgggcggtattatcgccgtgcgtaagacgtacaggttcggtaaaaccatccacgacatcatgaatcccaaagggaaaggcaaagggatacccggtggcattacggatattttcggttcaggcgtgatgccggtttacgtagtcaatatgggcagtggcgggatgaatggtaataccggcggtctgccggatgcgccggatccatcgcgcaatccccgcaactcccgcaacccacgtgggccaaagacgcctgcgctggtaaccccacaaacagcatcaggatttaatctccttgacatggtgctctcggctttccccaaaaataaagaggaagctgacgcgttaatcgcacgggttcaggaaaacaacaaccgcccgacggtatggacggatatcaagaactggtttaactctctggagaaaaagaacattgccgacccgcgaccgtgggcaggtatgcaacccacacagaattatcctttccttccgcagcaattgcagggggaaatccgtgtggtggtggaaggtgacgcccgcgtgaaaagtgtcagagtggatcaacccggcgtcagactcagtgcgcaggctggcgtcaccagcgtggagcaagggtaa

SEQ ID NO: 32361 - DNA, 906 bp, Escherichia coli
atgggacagactgtcagttctgaaatccttcatgcactgaccacctgcctgagcgccgcctttacccgtggactgagtggtgtcgaaccgcagtggaatcgcattgcttctgaggtgccgagttcgtcagcctccaacacctacggctggatgaaagatttaccggacatcaaagaatgggtcggtgagcgtcagctggcaacgctggacggttatggttacaccatcaccaacaaactctgggaaagttccattcgcgttaagcgcgaacacattgaagatgaccagattggtcagtacagcattactgctgaacgctatggacgtatgacagccgtgttcccggacaagctgtgttacgccctgctgtgtgccggattcaaaactttgtgctttgacggccagaacttctttgatgaagaccacccgctgggtgacggcacgtacagcaacgttgtcggcaccccagcatcagaccagggagagccgtggttcctgattgatgagtcgcaggtactgaaacccattatctggcagacgcgacgcgcctttaagtttgaagccctggacgatctgaacagcgagcacaccttcaagaataacgaattcctgtacggggtggacggtcgctgtaatgcaggcttcggcttctggcagaccgccgtcggttcccgtgcggcactgacggtggagaactacaaaaaagccaatgagttactgcggggcatgaagggcaccaacggtgaaccactgggcatccgcccgaccacccttgtggtggggccgaaaaaccgtgcggacgcgaagctcattattgacgccatgctggttaacggcggcgattccaacatctggtacaaggatgtggagatcgtggacagcccgtacatcaccaccccggcataa

SEQ ID NO: 32362 - DNA, 411 bp, Escherichia coli
atgaacaaaattttaaaactgtgtgactggctgatttgttcccgactgatgagaacgccgtggcctctggccgggctgacgctctgcatgttcatcataagcatgttatgtggctggcgatcgttcgtgctgatgctgctgggcttttcctgcgttgtactgttttcatacagcgccagtctgggaaatgtgccatatcgtctgctgcccgaagtccgttaccgggcttttggccgccacatcatcgtgtggtcatgggtggtctgggcgctgggatatttctgctgtgtctgcggcattctgctgatgggaacattatctcaaccagtattctggctgtgtggtagcggctgcggtggcctgctctgtcttcagcgttatctgtgtggaggttttccgtggatccgttaa

SEQ ID NO: 32363 - DNA, 252 bp, Escherichia coli
atgggcaaaggctggaacgcctcactgaaagccgggcgacgtgaccgcctgcgtcaggaggttctgcaccgcatggccggaggtccgcccccgaaaccgctggattataccggccatgacggcacacacgccagctactacatgcgtggctggaactccgtagatacacgggacattttctggcagtgccagaagtacagggaaaaattcaatgtggaaaaaggtaatgaacaaaattttaaaactgtgtga

SEQ ID NO: 32364 - DNA, 450 bp, Escherichia coli
atgaaacagatgaaagagcaggatttattcgaagaccttcgggacgacagcgttctggaatatcttaacgattaccaggaaaacaccgcttatccggcgttactttctgaactgaacgcactgctgcgtaaagagctggcccggattggcgcagaccctgctcattcccttgagctggttgtggcgatttgtcgccatattggcgggatgcaggtttatgttccgagggggaatattctggagaatcttgtccgggatatgcgtatctggcgtgattttaacggccataatattcctgaactggttcagcgttacggagtgacgtataaaaccgtctacaaggccatcaaacggatgcggcgtctggagcgtaataaataccagccggatttgttctaccactccccgaacctgcctcaccccgttcgtcgtccgccacgacgcccttaa

SEQ ID NO: 32365 - DNA, 183 bp, Escherichia coli
atgattaagttaattggctttgtcctgctggttggcacctgtggaaatgatgcctgtgatgccattccggtaacagaaaaaatctggcccacagagcaggtgtgtatgcaggtgatggagcgcatacaaaaacgttatcccagtgaaatcttttattgcgaagaggtattacgaaatgaataa

SEQ ID NO: 32366 - DNA, 552 bp, Escherichia coli
atgacgaaatacgcctattttaagttgtctgataagacaagccgtatatatatgaaacgctgggagaaagatatttatccggttcgtgtaaagcttgttcgttcattacaacacgaacttggtgctgctggtatcagtcttgtcagtggtctgaaagttgcacgagtggaaagcgtctggttcgggatgcagccgtcggggttctggaaagtaaaaagcagtaacctttttgttgatggttaccagttctgggaggttatgccggatgtaacgacagttcgggggcaaaagagagaaaagctcatcgcgggatatgaagaacaactgacaaattaccctgaattttcagtatggctgtgtaacgaactgaatattgatttcacactgaatatctttgatatccggtctgtgtgggaaatgtcatggtcacgcgacaggttcagcattttatttaaagtccaggttttttctgacggtgaagtgcatgggcatattcctgatgaatgccagcgtattaaacattctgaatttgtggcgctgacggaggaataa

SEQ ID NO: 32367 - DNA, 420 bp, Escherichia coli
atgaacaccaaaatcaaaaacgaaattcaggcattaattcggattaaagaacgtaataacaatggtggggacttacgcgagtttatttgcgcgcgcgaagttgaggggtatggtgaaaaaacttacctgattgcatttgaccattacagcatttgtgcgcgttattgcggggaggcgatattccgcgccattacgtttggcaatgccttcaatgtggatttatgggaatacgtcatggaccgcgaatacatcagcgcgtcagacccggacgcacgggagcagtggcagaacatctggcgcgattaccggcgaatggcgaaaggctggacactggggacgtattcttcccttgccctgaaagcggttcagctatctgtgcggcatatgctgtcggcacgattcgaactctcggtgcactga

SEQ ID NO: 32368 - DNA, 270 bp, Escherichia coli
atggcaaaagtgatctttgaatttaacagcccggaaagtatggaatatcagggaaaagacgcttcatgcataagcatgaccgtgcgagcaattgaactttccccggaggagaaaaccggaccgcatgacgtgctcgcgtgcattgttgagagcatgggaccggaaatcattgaaaaggcatccagagagctactgaaatcagcacgagccaaagggctgaatgcaaaaggcaagttgctaccatttgatccagatgcaatcaaacattaa

SEQ ID NO: 32369 - DNA, 231 bp, Escherichia coli
atgagtatcaggtctggaaaatatattgagtgggttaaacattgtcagcgccacggagtgcctttgacgacatataaatgcccaggatgtggcaaacaacttatgacgcaaagttcccccgaaaatgaagtatgggactccttcacatgttgtccgtggtgtagtggtgttttctttaaacaggtagaaggcgcgaaaataaaggtcagcgcagttattcagaatcaataa

SEQ ID NO: 32370 - DNA, 228 bp, Escherichia coli
atgtgttccaacgaaaaggcccgtgattggcatcgtgcggatgtgattgcgggacttaagaaaagaaagctctctttatcagctctttcccggcagtttggttatgcgccaactacattagctaatgcgctagaacgacactggccaaagggtgagcagattattgctaacgccttagaaactaaaccggaagtaatctggcctagccgatatcaagcaggtgaataa

SEQ ID NO: 32371 - DNA, 591 bp, Escherichia coli
ttgaaaagtaactttatagaaaagggcaatactgaagagtcaatttggtgttcgccgcaagaaattatggctgctgatggtatgcctggatctgttgctggtgttcactatcgagcaaatgttcaaggctggacgaagcggaaaaaggaaggtgtcaagggggggaaagctgttgaatacgatgtgatgtcgatgcccaccaaagaacgagagcaagttattgcgcacttggggttatccacaccggatactggtgctcaagccaatgagaaacaggattcttcggaactgataaacaaattaaccacaaccttaatcaatatgattgaagagctggaaccagatgaagcacgcaaggcactgaaacttttaagtaaaggggggttgttggcgttaatgcctcttgtatttaatgaacagaaactttacagctttataggattttcacagcaaagtattcagacgttgatgatgctagatgcattacctgaagaaaaacgcaaagagattttgtcaaagtatgggattcatgaacaggaaagtgttgtagtaccttcacaggaaccacaggaggtaaaaaaagccgtataa

SEQ ID NO: 32372 - DNA, 747 bp, Escherichia coli
atggatattggaaatatattaaatgagagtttaagtattgattacgaaaaattagatttgtttttggaaaaatatgatttaacaccagaacaaaaagttgcagtttatgaatttcacgcaaaagcttataaaaaaaataaaactttagttatttctgaaacaaaagaaaataaatttaaatctatttccgaaggtgttgaatacgtgcatttattcccaaaaaatttaaaaattttaattaaaaaatatggtttaaatacaaacgaattattggttttaacggaaataatggagtcaatgctttcacacggaaatttattaattaatttttcgcaaaaggcactttgcgaattaacaggaattaataaatctacaatgtgtaaaacatttaaaaccctcaaacaaaagcagtgtttaattgagaaaaacggacatatttatttaaattctgtgatatttatgaaagggttacctcataaattgtttatgcaatttagagatcattttttaaattctatctcatataaattagatgatgaagaagaatttgaaaaagtcttcgacgataattttattaaagcatacgaaaaaaatctcaaagagattaaaaagaaaaaacaacagataaaagaaaagaaaatatcaaaagcattagataattttgaaaaagaaatttctgaagaatggaaagaaaagtttaaagacgaagaggaaaatttcgaatttggttttgaatctgaaatgtaa

SEQ ID NO: 32373 - DNA, 729 bp, Escherichia coli
atgggtaattcaaaaagaaatataaaaaaactaaatgataattttagagaggatattttagattatgcgttcgcgcacaatctaaaatgtgctaacgcacttgctattttatatgcaacgggttgccgtccggacgaactccaaaccggagttacggtaaactatgacagcaaaaaaaatgaaattgaatttagaataattggatcaaaactaaatagaagaatgagaagaggcataggggttagaaaaataaaagtaaaaatcaataatgaaaatgccaggttttttaaaaacattgttgataaatttattgaaaacccaatgtcatatgatcacaaaatcaaaattgaaagtgccaaagcattttccgggtacataacaaaaatatcgaaaaagctatggcccaggaaaacctatcatgcttctgcatattcttttagacatgcaaaagcaacggaattgaaaaattccgattatgataaaatcgaaatagctcagattatgggccatgcctcagttagatctcagcagagttacggaagaaagagcaaaaaaagcaaaggtggatttgatgacatcgcagatgtcgaaaccaatgttaaaccccgtggcggtgatagattattgagatttaagatcgcaaataaaaacaaagcagcggcaaaaattgccgatacttccacccccagcagtcctccaccggctcccgttcgtcgcttcaaaatgtga

SEQ ID NO: 32374 - DNA, 141 bp, Escherichia coli; identical to SEQ ID NO: 5362

SEQ ID NO: 32375 - DNA, 459 bp, Escherichia coli
atgacaatcacggacctggtactgattcttttcatcgccgcactcctggccttcgcgatctacgatcagttcatcatgccccgccgtaacggccccaccctgctggcaattcctttgctccggcgtggtcgcatcgatagcgttatcttcgtcggattgattgtcattcttatctataacaacgtcacgaatcatggcgcgctaataacaacatggttattaagtgcactggctctgatgggtttttatatattctggatccgcgttccgaagatcatctttaaacaaaaaggttttttcttcgccaatgtctggattgaatatagccgaatcaaagcgatgaacttgtcggaagatggcgtgttggtgatgcaattagaacagcgtcggctgttaatccgcgttcgaaatatcgacgatctggaaaaaatttataagcttctcgtttcaactcaataa

SEQ ID NO: 32376 - DNA, 471 bp, Escherichia coli
atggacaaggtgaagacgttaatcatcgccgttgttgtttgcattattgccgggcttaccgccgtaacgtgttattaccagggtgaggcggcaaggttacaggaagaagtcacggtgacgaaaggcgcactaaaaacagcaagtaacactatccagcagatgaaggagcgaaatgccgaactgtcaaaacttgataagaggtatcacgatgagattaaagctatcagatctgacattgccgatcttcgcgctggcattgatagcggtgctatcaggttgcacgtcaacgccgagccagtgtacgtgcacgacgccaccggaaccgccagcagcattaatggagccacctgtagacttactgccagtgctcaatcaaattatctatccctcagagaacaactaaaagagaaagacgcgaagatcaccggattacaggactacatcaaaacgcagtgcatacgcaaagaataa

SEQ ID NO: 32377 - DNA, 642 bp, Escherichia coli
gtgaacgccttatccgacctacaagatcgtgcaaattcaatatattgcaggaagcatgtaggcctgataagcgtagcgcatcaggcagttttgcctttgccatcagtctcaagggccgcgaaagcggcccttcagattattggcaaagtgcgcgttgttcatgtcggatgcggcgtgaacgccttatccgacctacaagatcgtgcaaattcaatatattgcaggaagcatgtaggcctgataagcgtagcgcatcaggcagttttgcctttgccatcagtctcaagggccgcgaaagcggcccttcagattattggcaaagtgcgcgttgttcatgtcggatgcggcgtgaacgccttatccgacctacaagatcgtgaaaattcaatatattgcaggaagtatgtaggcctgataagcgtagcgcatcaggcagttttgcctttgccatcagtttcaagggccgcgaaagcggccctttttttacttagtagagataaacggaactgtactgccggggatcatggtatcgggcagtttaccgtcccaacgctctgcagtggtaagggctacaagtccgggattatcccgcagagcttcaccgcgcaggcggattgcttctgcttcagccgcactttttaa

SEQ ID NO: 32378 - DNA, 981 bp, Escherichia coli
atgctggttattattctgtgtaaatatgtttacatgtactttaactcagatagtaacagacatctattaacttacctcatagaaaagacggtatcattagttataggtgttgcattatattttttggtggttattcctttatttttaactgttgttggggacccggatcacccatcaattaaaactgaaggcattttttcagttatatatgaaaacttaaaattttatcttcattcaatatctagtggtatttttggggaatcaggacgagttgcgtttatagtaatatttttatttttcattgcaatgacgacattcatcgcgctaaagaaatcaatacctaataaaagtattactggtattattaattttttaattacaataacatcaccagtaacagctttgatattgtcttttgctactctattaccacttcagcatcacatcgacgccccaagagtgatgatcggtttttctgctacgatgttgttcttattcatgattgtttatcttttctcgcgagaaacaaaaaattcaataacatatatacttgtaattcctctgatttatgtttttggttttttatgttcatacacaaatgcaatgacagaagaaaaaaacataaccacagttctgtttcatcagattaaaaatgatgctttcgagttaagcggaaaaacaaatcagatacttatttttaatggtaaaaagaaagacaatgatgtttttgtaaacgcacgaaataattacccgttaatatctagatttttcccagagtatttctataattgggattggccattcccttatatgaatagagttggagtttactttaaacaccctgggaatacaaacattgcaagtgtgttaaatgaaaaaaccttttgctcaaccgcaaagattaaaagagcatatgaatataacttatactcatatgatgatattattgtagttgattttgacaaaaacatttgtcagtga

SEQ ID NO: 32379 - DNA, 3714 bp, Escherichia coli
atgcggattatttttctacgcaaggagtatttatctttactcccgtcaatgattgcatctcttttctctgctaacggtgtcgcggcggtcattgattcatgtcagggatatgatatcaaagcgagttgtcacgccagcaggcaaagcctttcaggcattacgcaggactggagcatcgccgatgggcaatggctggttttttcggatatgaccaataacgccagcggtggggccgtatttttgcaacaaggagcggagttttctctatcgccagaaaatgaaactggaatgactctgtttgccaataatactgtctcaggagaatataataacggcggggcaatatttgctaaagaaaactcaacgctgaatcttactaatgttattttttccgataacgttgcaggtggctatggtggcgcaatctattcttctggtactaacgataccggtgtcgtcgatttaagtgtcactaacgccgtgtttcgcaataacatcgctaatgacggcaaaggtggtggaatttataccatcaacaatgacgtctatttaagtaaagttatttttgataacaaccaggcatatacatcaacaagttacagtgatggcgatgggggggcaatcgatgtcaccgataataatagcgatatcacgcatccgtcaggtttcacaataataaataacaccgcatttacaaataacactgccgaaggttatggtggggcaatttataccaatagcgtgtcggctccctatcttattgatatttcgattgatgacagctacagccagaacggcggcgtgttaatcgatgagaacaatagcgcggcaggttatggggatggtccttccactgcggcgggcggctttatgtatctcggcttaagtgaagttacctttgatattgccgacggaaaaacgctggttatcggcaatacagagaatgacggagctgttgactctattgctggtaccggggtaatcaccaaaacaggttccggcgatctggtacttaatgcagataacaatgactttactggtgagatgcagatagaaaacggtgaagttaccctgggccgcagcaactccctgatgaatgtcggcgatacgcattgccaggacgatccgcaagactgctatggtctgacgatagggagtattgatcagtatcagaatcaggctgagctaaacgttggctcgacccaacaaacttttgtgcacgcattgacgggctttcagaatggcactttaaatatcgatgctggtggcaacgttactgttaatcagggcagttttgctggcaccatcgaaggtgctggtcagctcaccattgcgcaaaacggcagctacgtgctggcaggggctcagtcgatggcgctaactggcgatatagtcgttgatgatggcgcggtgcttacgctggaaggcgacgcggcagatcttgccgctctccaggacgatccgcagtcgatcgtgttaaacggcggtgtgcttgatctctctgatttcgccacctggcagagctgcacatcatacaacgatggccttgcagtcagcggcagcggcggtacggttatcggcagtcaggatgtggtggatctcgcagggggcgacaatttgcatatcggcggcgacgggctggttagcctggcaaacaataatagttacctgggcaccacgcaaatcgcttccggtacgctggtggtgagcgacaactcgcagcttggagatacccattacaaccgccaggttatctttaccgataatcaacaagaaagcgtgatggagattactgccaatgtcgatactcgctctacaacgactgagcatgggcgtgatattgaaatgcgcgccgacggtgaagtggcagttgatgcgggggtagacacgcagtggggcggactgatggctgacagcagcgggcagcatcaagatgagggtagcacattgactaaaacgggggcgggtacgctggaactgaccgccagcggtacgacgcagtcggcggtacgtgtcgaagaaggcaccctgaaaggcgatgttgcggatatcttcccttatgcttcgtcgctgtgggtcggtgacggggcaacattcaagactggcgcggatcaggatattcagtcaattgatgctacttccagcggcactatcgacatcagcgatggtacggttttgcgcctgaccgggcaggatacttccgtcgcccttaatgcctcactgtttaacggcgatgggacgctggtgaatgccaccgatggtgtgacgttgacaggtgagcttaataccaaccttgaaactgacagcctgacttatctttccaacgtgacggttaatggcaatctgaccaatacgtccggtgcggttagcctgcaaaatggcgtcgctggcgatacgctgacggtaaacggtgattataccggcggcggtacgctactgctcgatagcgaattaaacggcgatgactcggcaagtgaccaactggtgttgaacggtaatactgctggcaacacgaccgtggtaattaatcccattacgggtattggtgagccgacatctacaggcattaaagtggttgatttcgcagctgatcccacgcagtttcaaaacaatgcgcagttcagtctggcaggtagtggctacgtcaatatgggagcgtatgactacacgctggtggaagataacaacgactggtatctgcgatcgcaagaagtaacgccgccatcgccacctgatcccgacccgactcccgatcctgatcccacaccggatcccgatccaacacccgacccagaccctacgcctgcttaccagccggtgctgaatgccaaagttggtggatattttaataacctgcgggcggcaaatcaggcgtttgtgatggagcgacacgatcacgctggtggcaatggtcagacgctgaatttacgtgttatcggcggagattatcattacacagcagcggggcaactggctcagcatgaagacacttctacggtgcagcttagcggcgacttgtttagcgggcgctggggcacggatggcgagtggatgcttggggcggttggtggctacagtgataaccagggcgacagccgctcgaatatgaccggaacttgcgccgataaccagaaccacggttatgccgttggtctgacctcaagctggtttcagcacggtaatcagaagcagggggcctggctggatagctggctgcaatacgcgtggtttaacaatgatgtttccgaacatgaagatggcgcggatcattaccactcatcggggattatcgcctcgctggaagccgggtatcagtggttaccggggcgtggtgtggtgattgaaccgcaggcgcaggtgatttatcagggcgtgcagcaggatgattttaccgccgctaaccatgcgcgcgtgtcacaatcgcagggggatgatattcagacgcggctgggtttacacagcgaatggcgtaccgcggttggtgtcacaccaacattagatctgaattattatcacgatccccatgcgacggaaattgaagaagatggcagcactatcagtgacgatgcggtgaagcaacggggtgaaataaaagtgggagtcacgggcaatatcagtcagcgagtgtccctgcgtggtaacgtggcgtggcagaaagggagtgatgattttgcccagacggcagggtttttgtcgatgacggtgaaatggtag

SEQ ID NO: 32380 - DNA, 132 bp, Escherichia coli
atgactccaggtagaaaccggtatgaagcgcccgactcactgtcaaaaccgattgttgagagtaatgacactccggcgaacagtacacagtttactctggagccattctcaatcttcaagtgggatacctaa

SEQ ID NO: 32381 - DNA, 261 bp, Escherichia coli
atgcgaaagaatcgtaggtttacggtcgaagacctaaaggaatattccatatcgaaggggtatatccttgagttccaccgatacaagaaggtttttacgctgcgaaaagcagaaaaccctgcgaactggagctggatatactttcctcacaccgatgataagttggtagaacttgttgatgatttaacctatgaaggttggttgatcgcaatcgacaagacaatcaaagaattatccgaacaggataaaataaccctttaa

SEQ ID NO: 32382 - DNA, 393 bp, Escherichia coli
atgtacgggactaccaaattaagcactcaacaggccaccaatatggagtggtctatcgctaactgtaagatcgtgtcatgcaatgccacgcgtactgatgtgggccataaaagcactataacaggctatctagtaatgaccaccagggggatgagggttagatttcgctggaaagcagagcaagtaacgccattcagagagccatcaatgccgctgcaggttgagcaggattatctatgtttaccagaaatagatggaggaatgctggtggagtctgatggtagtaaggctgattttgaagccaatttgaagctggcacaggccgtaatcaatagttatcgcggacagtggatcgcaaaagtgaaacatgttgttcgtttgtctcgctggtag

SEQ ID NO: 32383 - DNA, 1623 bp, Escherichia coli
atgacgcaattagttcgtgcaattgcgacgaaagaaggcggaaatccggcagttaataatgagttcattaagaacgcacttggagcatttaacacaaacactggtctatgggagggacaattctctgacgaaacattggcgcggattaataaaattcagaaagaaaatggtggtcagctaattgcccgcgattcgcaatatagtgttggtcgcaaggtaaaatatgctaatggaaaatctccagctcaaccagttttgaatgccgttccgacagcaacacaacagccaattgaggttgcacaacatgcccaggcagtcaaaaagccacaaaaaacaggtaaccaaccacaaccgattaatccagagaacactgatgttaataccggctctccatcgagtttgcttgagcggttaatcgcaataaatgaaagcggaatcagtggtgcaagtaatttatttggcggcgcggctaccagccttgctggaacaagtctggacctggtaaaggattttgcgttggctacttcgtttggttctatatcttcgctttccgaaaaagcgaaaggaatggatcaggctcttactgaaaagatatccggcttaaccggtaaatcttttggatttaaaaaagcttctcaagcggctgatatcgcaacagccatacaacaaaaacgcactgttaatcacgatacagaaatcattgatctacttccgggagatcaagtatccccttctactccgaaaactccacagcaggagcaggctctagcaatcagccaggctatggcgggcttttcatctgcagcgccagcaccgaaaaccccacagcaggagcaggctctagcaatcagccaggctatggcgggcttttcgtctgcagcgcctgcaccgaaaaccccacagcaggagcaggctctagcaatcagccaggctatggcgggagctgcgccagtagttacctctggaaaacgaactatcacggcaccaagtgatgtgcagatttatgacaacggctacaaggtggttacaggtgaggataagagcttctttggttcgctatttgattccacggtgtcagggcttaaacagacaggaaccgcagtaattcctgccgttggcgataacctttcacgacttgttggggggattgatagtacagggatattgaacgatcttgtaatgcagtctactgggcagaatagtgcgattgcgcgagctattagcccattaacaagaaatgttggagactggctgaatggggggattcaacaaaccgctaatagcattaggggaatagcaactggtgccaataacgccatatttggctctgcttcagctgtgcaagaaccttttcttgctatgccgccacaactccctactgtaaccgatctcgcacgaagcggaataagacaaccattaactactgacactataaataacgatcctgctatgttgaaggcgctggataacatctgctctatcctgaacgatctgctgaatgtgaacaagaacaatacaaaaggcgatccggataatgttgtcaaaacatcgcagccgcagccgcgaccacgtgcgagcacaactattaatgaccagtcgctggatgctctgcttgaggattaa

SEQ ID NO: 32384 - DNA, 504 bp, Escherichia coli
atgaataacattgcgccgcaatcacctgtaatgcgtcgcctgacgcagcaggataatcccgccatcgcccgcgtcattcgtcaggtatccgccgaatacggtcttaccgctgataaaggctacaccgtcgccgatccgaacctggacgagttgtatcaagtgtatagtcagccgggtcatgcatattgggtggttgagtacgatggtgaagtggtcggcggcggtgggattgcgccattaaccgggagtgagtcggacatttgcgaactgcagaagatgtattttcttccggctattcgcggtaaagggctggcgaaaaaactggccttaatggcgatggagcaggcacgagagatgggcttcaaacgctgctatctggaaacgaccgcttttttgaaagaagcgattggtttgtatgaacatttaggttttcaacatatcgactatgcacttggctgcacgggccatgtagattgtgaagtgcggatgctacgcgaactctaa

SEQ ID NO: 32385 - DNA, 1626 bp, Escherichia coli
atgcgctatgccgattttccaacgctggttgatgctttggactacgccgctctgagtagcgccggaatgaatttttatgacagacgttgccaacttgaagatcaactggaatatcagacgttaaaaacgcgtgccgaagctggtgcgaagcggttgttatcgctgaacctgaaaaaaggcgaacgcgtggcgctgattgccgaaacgagtagcgggtttgtagaggctttttttgcctgtcagtatgctggcttagtcgccgtcccgttggcgattccaatgggcgtcggtcagcgggattcctggagcgccaaactccagggtttactggcaagttgccagcccgcagccattatcactggtgatgagtggttgccactggtcaatgccgcgacgcataacaaccccgaattacatgttttaagccacgcctggtttaaggcattaccggaagccgatgttgcgctccagcgtccagttccgaacgatatcgcctacctccagtacacctccggcagcacccgttttccccgtggcgtcattatcacccatcgcgaagtgatggctaatctacgtgctataagccacgatggcattaaattacgccctggcgaccgctgcgtctcctggctgcctttctaccatgatatgggactggtcggctttctcctgacccccgtcgccacgcaactttcagtagattatttgcgcactcaggattttgccatgcgtcctctgcaatggcttaaattgatcagtaaaaatcgcggcaccgtttccgttgcgccgccgtttggctatgaattgtgccagcgccgcgtgaatgaaaaagatctcgctgaactggatctttcctgctggcgcgtcgctggtattggtgctgagccgatctccgcagaacaactccatcaattcgctgaatgtttccgtcaggttaactttgacgataaaacgttcatgccgtgctacggactggcagaaaatgcgctggctgtcagcttctctgatgaaggctctggggttgtggttaacgaagtggatcgcgacatcctagaatatcagggcaaagccgtcgcgccgggtgctgaaacacgcgccgtatcgactttcgtcaactgcggcaaagcgttgccggaacatggcattgaaatccgcaatgaagcaggtatgccggtcgcggaacgtgtggtaggccatatttgcatctccggccccagcctgatgagcggttactttggcgaccaggtttcgcaagacgagattgccgcgacgggctggttagacaccggcgacctcggttatctgctggacggttatctgtatgtcaccggacgtattaaagatctgattattattcgtggccgtaatatctggccgcaggatattgaatatattgcggaacaagaaccggaaattcattctggcgatgcgattgcttttgttaccgtccaggaaaaaatcattttgcagatccagtgtcggatcagcgacgaagaacgtcgcgggcagcttatccacgcgctggcggcacggatccaaagcgaatttggcgtaaccgcggctatcgatctgttgccgccccacagtattccccgaacgtcctccggcaagcctgcccgtgcgtaa

SEQ ID NO: 32386 - DNA, 390 bp, Escherichia coli
atgaagctatatgtaataggtaatggctttgatgttcatcatggccttgacactaggtatacatcttttgggctttatctcaaaaataactactgggaaacttatgagctattgctcgactattacgggtttgctgacttagacccagattttccaacaacaatgtcagaccctttatggtctgaatttgaaacgagtatgtcactgcttgataaagattcagttttggaagcaaacatggatgcaatgccaaactattcttcagatgactttcgagacagagaccgatacacgcttgaaattgagatggagcgaatacttggccttctaaccactgaactgtataaagcattcaaagttcattttggctgtacagtttcctcagtttga

SEQ ID NO: 32387 - DNA, 735 bp, Escherichia coli; identical to SEQ ID NO: 6008

SEQ ID NO: 32388 - DNA, 570 bp, Escherichia coli
atggaggttttcccattcatccttagaaatattatctttacttgcttcgaagtcttttgcagtgagatgtatatcttctggatggatttggtcacgttcttttgttactggatctataataaagggaatcaagacctgaccttgccaatagccagggataccactttctatatctttactgatcttcgctcgtatatcggcagagggataatccagatcatttttaccactacccccgattcccataaagttaaatgtataatcagggatgatatcgataccaaattttttggcatctttaaccaatgcgataaaatcctgcaaatctcccattggattatggatagtacaaagatcttcgggttgataagcgtgaaaccagtaacctttttcttcttcgggagtttctggtccgtcggcgcggaaagtggttacgggagggatttgtatatacccataatgacaacgtgcaaactcagatatatttttcctgatttgttgataggtggcattaaaagcatgaagaatcgcttcgccaggttttttgggggtgatgatttcacattgtga

SEQ ID NO: 32389 - DNA, 303 bp, Escherichia coli
atggagttgtatggtatatctaataaaatgctaaaaaaactgaatcaactgcttaccaaacatcagaataattacaggcgttggcataagtacatctcaacaaacgatattgtattgacgagggataaagattctaacggtgaaaatgtttctttgatttatcatttaacaccgattggaataatccagactcattattatcatttcagccagttgatggctgattttgaatgcattaataaattcttctgtgaggaagttagtgttgtatttaacatcgatattgctaagtgggatgagtaa

SEQ ID NO: 32390 - DNA, 438 bp, Escherichia coli
atgtttgtaaaggatccatcggcaactaataaaaccagtttatcatttatgattgagtatgggaatttttgtggattattccttggtgatgcacacgaagaagacatctactcatatatggctaatcattgtgccaatagaaaaatatcatttaacgttgttaagttagcacatcatggtagtgaaaaaaacacgagttcacggttattgaagttaattggtacaacagaatatatcatatgtgcgaataaaaccaagcataatcatccaaataatttaactcttgcaagaattttaatacatgaacaagaacctaaaattcatatgagtagcagcaatcaggagataataaatttactcaatcaaataaatttattaggcttcggcattactgcaacccattctgaaaatggagttaatactttaatctatgagtag

SEQ ID NO: 32391 - DNA, 336 bp, Escherichia coli
atggaggcaatacaatgcattgaatctgaagttacttttaaacttgaaacatgtattgctcatttttatcagctatgtcaatcaattcacggcgatgaaaatgcaggcattaatctttcaccttatttagaatatggaacattagatactaacatcatagaacttcaagagtttggtttctctcgtttagccgcaattgaaattatagcaaagcacaaagagtgtgttacattcaaaacaaatgagacatcattgcaaataaacactcagaaattaagagctaagattgaaaagcacagtgtaattgatagagaactatcatggttgaatttataa

SEQ ID NO: 32392 - DNA, 270 bp, Escherichia coli
atggtggcaattgaagctatgggggctggtaagcctgttttagtgagtacgcgtggggggatgacggaatttgtcaaagaaaatactacgggattccatttaaaagaacctatgactgcagactccataagcagcgatattttaaaaacgttagcgaatcctgaattaacagcagttgcaaagcaaggtcaggattttgtgtttgatcactacagttgggatggcgtaactcaaagattcgaagaggtcattcataattggtttgaataa

SEQ ID NO: 32393 - DNA, 741 bp, Escherichia coli
atgaaaaacatttcgacaggagggattcttgaacgggtgcgccgtctggcaccaccgcacgtggcagcaccgttccggacgaccgacgaatggcgggaatggcaactggctgagggccgtaagcgcagcgaggaaattaaccgcctgaatcatcaggcgcgggttgaaaaaatcctgaaccgttcgggcatccagccgcttcacaggaagtgctcattcgggaactaccgggtgcagaacgacggtcagcgccatgctctgagtcaggcaaaatccatcgcggcagagctgcataccggctgcacgaatttcgtgttcagcggtaaacctggcaccgggaaaaatcaccttgcagcagcgattggcaactggctaatggcgaaggggagaagcgtgattatcgtcaccgtgtccgatgtcatgagtgtgttgcatgacggctacgacaacggcaagtccggggaaaaatttttacaggagctttgtggagttgaccttctggtccttgacgaaattggcatccagcgtgagacgaaaaacgagcaggtggtactgcaccagattgttgaccgccggacggcatcactgcgcagtgtcgggatgctgacaaacctgaatcatgccgcaatgagcacgcttcttggtgagaggattatggaccggatgaccatgaacggtggtcgttgggtgaattttaactgggagagctggcggtcaaacgttggacgtcagggtatgtga

SEQ ID NO: 32394 - DNA, 225 bp, Escherichia coli
atgaatttagtgattcagcgagccttgaatattgttggcagtcaaaaacgacttgcagctgattgcggcgtatcacagcccgctgttcataaatggttgcgaggcggaaaagtttctcctgaaaaagttttcgctatcgttaatgccaccaatggtcaggttaaggcttacgaaattcgcccggacttaccgcacctgtttcctcatccgaaccaggctgaataa

SEQ ID NO: 32395 - DNA, 570 bp, Escherichia coli
atggtcgaattagccaacgcgttaagagttcgccctgaatggctaagctctggtatagggtcaatgagaccacagagcgcagaagagccatctaatgctcgggaatcatctttaaaagctatcgcctgggatgatcatcaaaatgataatgacgaatttgttgcgctcccccttctaaatatttcactttcagctggcggaggaagttgtgcattggaggagtccgcagaattctctctagtttttaggcgctattacctgaaaaaaatgggagttccagaaaaagcggcaaagttggtcagggttgttgggcaaagcatggagccaacactccatgatggtgatgtggtgggggtaaacacgcaagatacgagcatcagggatggtaaaacatatgcaatttgccaagctgatttgttaagggtaaaaacgctcatagccacgccaacatcggtaattatcagatcgataaaccgcgaagagtatcctgatgaagtaatgaacagagaagaattctacaaaaacgtaagaatcatagggcgagtgttctggtcatcacatagctggtaa

SEQ ID NO: 32396 - DNA, 222 bp, Escherichia coli
atgggtgattgcatgttaatcgaaggggaatttggtgtgttgcaccagcgggtagtcgaaattctaggggtgtcgttgcttgaggttattgctactggggaagctatttcagcagatgctattgcgggaatgatccgagtgcttcaccatgatgaattggatgatctcgctgtgaagttagctatagatgtgttacttcaggatatgcgactgtgtaattaa

SEQ ID NO: 32397 - DNA, 360 bp, Escherichia coli
atgaatgaaacagaactgaagcacattatcgccctgcttctggaagatgccagacaggtttatcgacttagcccaaattccgcaacgcaggaacgcatccggatagcggaaacagcactgaaacaggacaatggaaacggcatatccaaatttagcgccgccagtgaaaatgaagtaatagaaataaacagcaatatcagcgacagttgcgtcgcttacagccaccaaataattcgtgtaagtgcaagaataatggaagtgatggcaagtgagcttgaaaagaacaacatcaagcccactgattgttgtttaagaaccgtaatgaacgttatttattactcgatgttccgaagtcgctaa

SEQ ID NO: 32398 - DNA, 786 bp, Escherichia coli
atgagtacagcactcgcaacgctggcagggaagctggctgaacgtgtcggcatggattctgtcgacccacaggaactaatcaccactcttcgccagacggcatttaaaggtgatgccagcgatgcgcaatttatcgcattgttgatcgtcgccaaccagtacggccttaatccctggacgaaagaaatttacgccttccctgacaagcagaacggcatcgttccggtggttggcgttgatggctggtcccgcattatcaatgaaaaccagcagtttgatggcatggactttgagcaggacaatgagtcctgtacatgccggatttaccgcaaagatcgcaatcacccgatctgcgttaccgagtggatggatgaatgtcgccgcgcaccattcaaaacccgcgaaggcagagaaatcaccggaccgtggcagtcgcatcccaaacggatgttacggcacaaagccatgattcagtgtgctcgcctggccttcggatttgctggcatctatgacaaggatgaagccgagcgtattgtcgaaaatactgcatatactacagaacgtcagccggaacgcgacatcaccccggttaacgaagaaaccatgtcggaaattaacgcccttcttacttccatggaaaaaacgtgggatgacgacctgttgccgctctgttcccagatttttcgccgcaacatttacacatcttcagaactaacacaggctgaagctgtgaaggttcttggattcctgaaacagaaagtcacagagcagaaggtagcagcatga

SEQ ID NO: 32399 - DNA, 1164 bp, Escherichia coli
atgtcactcttccgcagaggtgaaatatggtacgcctcgtactcgctcccgggcgggaagcgaattaaggagtctcttggcacaaaggacaagcggcaagctcaggagttgcacgacaagcgaaaagcagaactctggcgagtagacagactgggggatatgccagatgtcactttcgaagaagcctgcctgagatggcttgaggaaaaagccgacaagaaatccatcgattccgataaatccagaatcgcattctggattgagcatttcgagggaataaggattaaggatatatcggaggcaatgatctactcagttatcagcaaagcgtataaccgaaaaacaaaggagagatggaagttgcaggtggaggctgcattaagaaaagggaaagaaccaccagcctatatacctaaatcggtgagcacgcaaacaaaagcaacacacctggcaatgatcaaggctattctgcgcgccgcagagcgagactggaaatggcttgaaaaagcacctgtaatcaaaatacctgccgtaaaaaacaaacgcgtgagatggctggaaaaagaagaagccaggagactcattgatgcatgttctgatcccctgaaatctgtagttaaatttgcactggcaactggcctgaggagatcaaacattattaatctggagtggcaacaaatcgatatgcagcgacgtgttgcctgggtaaaccctgaagacagtaagtcaaaccgcgctattggggtcgcactgaatgacactgcctgcaaggtgttgcgtgatcaaataggcaaacatcaccgctgggtgtttgtttataccactgctgccagaaggcctgacgggacaatgacaccaagcatcagaaagatgcgcctggactataacacatcgtggttaacagcatgtcgtcgggcaggaattgaaaatttccgttttcatgacctccgccatacctgggccagttggttaattcagtcaggtgtaccactgtcagtacttcaggaaatgggcggctgggagtctatcgaaatggtgcgtaggtacgcacaccttgcacctaatcatttgacagagcacgcgaggaaaattgacgacatattgggtgacgatgtcccaaatttgtcccaccctgaggtttttgaggatgcaaagaaagcataa

SEQ ID NO: 32400 - DNA, 204 bp, Escherichia coli
atgacatcgaaatacacttatcttccggttgcggatgaacgagtttcctggcgtagtcagtccattatggcgctggaaataacagcggatatcaactgtaagcgtgcaactgaacgtgaccggcaaaatttcctttctgccaggaagcgtttgcaggaacgtgttaacagcgtgctggcttccggggaggtatgtcatggataa

SEQ ID NO: 32401 - DNA, 888 bp, Escherichia coli
atgagtggtgaaaaaaaggcgaaaggctggcggttttatggccttgttggttttggggcaatagcgctgctatccgctggcgtatgggcgttgcaatatgctggcagtgggccaaaaaaaacgttgtcgccactggtggtgcacaacaatctgcaaatcgatctcaatgagccggacctctttctcgacagcgactctctgagccagcttcccaaagatctccttaccattccgtttctccacgatgttctgagcgaagatttcgttttctattatcagaatcatgccgatcgtctgggcattgaaggcagcattcgccgcattgtctatgaacacgatctcacgctgaaagataagctcttttcgtcactcttagatcagcctgcgcaggcggcgctatggcacgataaacaaggccatctttcacattatatggtgcttatccagcgcagtggtttaagcaaactgctggagccattgttgtttgccgctaccagcgacagccagttaagtaaaacggaaatcagtagcatcaagataaatagtgaaactattcctgtttatcagttgcgctataacggcaataacgtcctgatgtttgcgacttatcaggacaaaatattggcgttttccagttcggatatgctgtttaaagatgaccaacaggataccgaggccacggcgatcgcaagtgatttgttgagtggtaaaaaacgctggcaagccagctttggcctggaagagcgtactgccgaaaaaacgccagtacgccagcgtattgttgtcagcgcctggttgctggggtttggctaccagcgattaatgccttcttttgctggcgtgcgcttcgaatgggtaacgacggctggcacagttttctggcgttaa

SEQ ID NO: 32402 - DNA, 429 bp, Escherichia coli
atggagatttgggatttaaaatatttgaaactgttcatgattttcgagcaagatgagtctgaacttacgctttctaatcttagtttctttgacgatgctgtattgacaccagagcagtatgacactctattgacgacatggtgcgtgtatgatggtagcttgctaacaacaccaattgaagatattgatcttaatggctacaaagcacacttgtgcgatggtcggctatatctaattgcgcctaatttcacaagtgaggctttgaaagctttacttcaaaagctggatgcagacaaagactttgcccctaacaaagttgtattttatggcagcaacttcgaaagtgcgaaacagatggaactcaatgaagcactacaaagttatgctaataaaaaatctattgatttagatttggtggtaaggaactaa

SEQ ID NO: 32403 - DNA, 4008 bp, Escherichia coli
atgaacagaatatattctctcagaatgaatgacagaaaagaactggttgcggtagcggaaacggcgggcggcaggaaaaagtcgtccggcattcccggtgcggggatgctttcccgtcttcttctggcctctggtgccgttgccggtgttctgttttcttatccgtcgctggcatccgttgtcgggaataccctgccctggcagacctacagggattttgctgagaacaagggcgcgtttcatgccggtgccacaaatattccgctttatggcaggaacggggctgtcggtgggcggctggacaaggcgccgatgatggatttcagtgttgtggaccagatactgggggtggcaacactgatttctccgcagtatgtggcgggggttaagcataacggcagctacaacacggtgcgttttggttatgcggatgatacgacatatcgccttgttgaccgtaatgagcactggcgtgattttcatactccccggctgaacaaactggtgacagaagttgccccggtgagcgtcacggatgccggaaccggcaagggggtataccagaaccgcagtcgttatccggtgttttatcgtatggggagtggaacgcagtacaccggagctgcttccggtgcgctgaccagaatagcgggtgcttacgcctggaagacgggcgggacggtgggaagtccgctcatttctgactggagtctggtgtcaaacccggggtatctgtaccagagtgtcaatggtccgctggcatcttacgggacaccgggagacagtggctcaccgctttttgcctgggatgcggtgaagaagcagtgggtccttgttgctgtacttaatggttatgccggtgagaaagggaagacgaactggtttacggtgattcccgcaggggatgtgaataacacgataaagcaggacagttcaggcactgtcgtgccggcagttgccggtggtgacattgtgtggaattacagtaagggaagcggagagggaaccctttctcaggacgggaaggtatggaagatgaacggcttcaggggagggagtctgaatgacgggaaagatatcacctttgggggtaagggcacggttgtcctgaagaatgatgttgtccagggggcgggttcgctcacgtttaatggtgattatacggtcagaccggaagggaatcagacctgggtgggcgggggaatcatcgtgaacgacgggcaccgtgttgactggatggtgaacggacttgcgggagacgcacttcataaaactggtaagggaacactggtggtggccggcagtggtgaaaatcctggcaccctgaatacgggggacggaacggttattctggcacagaaggctgatgctgcaggcagggtccgggcattcagtgaagtccgtattgtcagcggacggccggttgtggtgctgcaggacagtcatcagattgagggggaccgcatccgctggggataccggggaggcacgcttgatatcaacggcaatgatatgaccttccaccggctggctgcggctgatgagggggcagtactcacaagccgggcgggttctgccacagttcgtctggatttcagcccgtcagggcagaaggccgtgatgtggcatggtcattttaccggcaacctcagtgtcctgaacaacacgtcatcagcggtggatttcatcatggatggcggagcggatatgtccggcagttttacacagcagggcgggggactgtatatccaggggcatccggttgttcatgccgtgagcagtgaggcggttgcggctgcattgcgaaagcagggtgataattctgttctgacgcagccggtatcatttacccagaaggactgggagagcaggacgttcagcatcgggcaactgaaactgaaggaggcgtcattcagcctttcccgcaatgcgacactgacgggggatattgatgctgataatgccaccatggtgctgggaagtgactcgctgtatctggatatgaaggacggcacggggagcagcagtgcgccggttaaggggacgtctgctgcgggcggtgcatccggtaccagtacattccgcgggaatgtgaatatgcgtcattcttccctgacggtccgcgaccattttaccggcagtataacggcatcggacagccggatagccgtgagctcagagaatgtgcgtctggaaggggattcccgcctgacgtcttctgcacttactgtcagtgacggcgggcgtttacatgtgaaggggggactggagacagatggtggtgtgacactggatggaggaacccttctggttgacgggggaagtgtgaggaatgatgtgtatgaacgtctgctggcctggtcagaggtgcgtggcgggctgaacggaagcggtgagtatgattttatgacgggggcagctggtctcctgcggggttatgtcagagggagtgcaggtaatgtgaatctgcagaatgcggcctggatgatgacgggaaactcatccgtgaagcatcttgagtcatcgggaagtgctctgtatttcagcaggccgggcggggagttccataccctgacggcaggcagtatggatatcagcgacagtgttctggtgatgcggacggaccttcaccactcagaccagcttcgggtgacagaatcgctgcggggtaagaataatctgttgttggttgattttactgagcgttctgacgggcagaaggcgctgaatatccctctggtgacagcgccggccggtaccggcgcggatgtgttcagtgtgaaaacgcgtgataccggcttcagtcatatcacacctgttgtcagggctgaacaggggacgggcggcacggcctggcagctgaatgttgtgcagccggaaactgccgcagagcctgtggtggatgaggtgagcaggccgtcgttgccggtggtgatgcggcaggatgcaaagacaccgaatcctgtggaagccgtatcaccggtcccttcaccggctccggcggcgtcagtgacggatgtaccgaccggagagaatacgggggaatcaggtgagtaccgtgatgagacccggtggctgctgacaggataccggagtacggttaatgtctctgcggtcagggatgccgggatgctgatgtcaatggggcaccgtaacttcattaatgaggtcaacaacctgaacaaacgtatgggtgacctgcgggacatcaacggcgaggccggtgcatgggcccgtatcatgagcggaaccggctctgccggtggtggcttcagtgacaactacacacacgttcaggtgggtgcggataaaaaacacgaactggacggtctggacctcttcaccggggtgaccatgacatataccgacagcaacgccggcagcgacaccttcagtggtaaaacgaagtcagtgggtgcgggtctgtatgcttcagccctgtttgattccggggcctatatcgacctgattggtaagtatgttcaccatgataatgagtatacggcgacctttgccggactcggcacaaaagactacagctctcattcctggtatgccggtgctgaagtgggttaccgctatcatgtcacagaggatgcctggattgagccacaggcggaactggtctatggtgcggtatccggtaaacagttcagctggaaggaccaggggatgagcctgtccatgaaggacaaggactacaatccgctgattggccgtaccggtgtggatgtgggtaaatcgttctccggtaaggactggaaagtgacggcacgagccggtctgggctaccagtttgacctgctggcgaacggagaaacggtactgcgtgatgcatccggagagaagcgtatcaagggcgagaaagacggccgtatgctgatgtctgtgggtctgaacgcagaggtccgtgacaacatccgttttggtctggagtttgagaaatcagcctttggtaagtacaacgttgataatgctgtcaacgccgggttccgttattcattctga

SEQ ID NO: 32404 - DNA, 1263 bp, Escherichia coli
atgagcggatttgcacagggtttacttgccggattcagcacggttgaccaggcaatgacccgtcgtaaggaacttggtttgcgagaagcacagcttgctcaacaacagaaaaataacgagcgcgattttgaatttgcacagtcgcagtttgaacataataaagacgttgatcagcggaactttgattacagagccaaagtcgacgaccgtaattatgcactgcaggaaagggagtttaacgccaaccagaattaccggaatgcgtcgctggggatggaacagcaacgactccagttgcagaaatacaaccagcgacggcttgagtataacgatatgctggcgcgcgatcagcctgtgatggcggcgctgggaaaagcgattgatgcgggtgaccatgatgcggcttctcatctgttcggtaaattatcggacgccaatccgcttaagatgatgtcaacggtaggctatgctgcgaaagcgggtcaggccgtgaacaacctgcagaaaatctttgatgataagccggacagggcgattgcttcgctgaataccccggaaaatctcgatgtgctttccggcgtgtttgccccggaactacaacagcgtattggcatgcctgattcaaccggggaaaaaacgataaaagaggccaggattggcagtatcgtaccggcgcagcaggaagggtacgtacttattggccttgatctcacatacagcgatggctccaccgcgcataaacctgtaacagaatacggcagtgcgcaccctgatgatcaaaccgtgctggcgatacccgttgataaggctatcgctcaggtcagggatcgcagcaaatttgcagagatatcgaaaaattatggttattttatgccgaagcagcagggactttctctgaaagagcttcagaagggggccagcaacgtagcggcggacgcgatcaagaatggcggtaatgcacaggctgcggtggatgaatattatgctgcgactggttcacaaccgcatcaacagaaaattcagcaacagaaaacccaacagcttttacagaagtggcagacgtgggcggcgggcgatccggttaaacaggagtttgtaaaagcgactgccgccaatatgcctgctttgctggaacctggtcgtgaaaaggaggtggaaatttattaccagaatcacctcagggataaaaaggcagagcatgaaaaggcgctggattatagcgcttccgcatctgccgagaagatcaaaggctggatgaagtaa

SEQ ID NO: 32405 - DNA, 1533 bp, Escherichia coli
atggtcgatcagccatttctcgacaaatattgtgttggttacgatgaaaaaacgctgccagctaacgctccacgtaacgcgcattataaagcctatattctgggcgaagggcctgacggcatagctaaaacgccggaatgggcagcaaaaatcaccagcatcccggcagaaaaaattatccagttggcacgagagatcggttcagcaaaaccggcttatatttgtcaggggtgggggccacaacgacattccaacggcgagcaaacgtcccgcgctattgccatgctttccgttctcaccggtaacgtcggcataaacggcggcaactcaggtgtacgcgaaggtagctgggatctgggggtagaatggttcccgatgctcgagaatcctgttaaaacgcagatttccgtctttacatggacagatgctatcgaccatggtacggaaatgaccgcgccccgtgatggtgttcgtggaaaagaaaaactggatgtccccatcaagtttttatggtgctacgccagtaacacattgatcaatcaacatggcgacatcaatcacacccatgaggtgcttcaggatgacagcaagtgcgagatgattgttggcattgaccacttcatgactgcctcggctaagtattgcgatatcctgttacccgacctgatgccaacagagcaagaagacctcatctctcatgagtctgccgggaatatgggctatgtgatcctcgcccaacccgcaacctcagcaaaatttgaacgcaaacccatctactggatgctgagtgaagtcgccaaacgcttaggaccagacgtttatcaaacctttactgaaggtcgcagtcagcatgaatggatcaaatatctccatgcgaaaacgaaggaacgtaaccctgagatgcccgactacgaggagatgaaaacgaccgggatctttaagaaaaaatgcccggaagaacactacgtcgctttccgcgcattccgtgtagatccacaggcaaacccattgaaaacaccttcgggaaaaatcgaaatttattctgaacgactggcgaagattgcggatacctgggaattgaaaaaagatgaaattattcatcctcttccagcttatacgccaggttttgatggctgggacgatcccctgcggaaaacttatccactgcagttaacgggcttccactacaaagcgcgtacccactccagttacggcaatattgatgtattacagcaggcctgcccacaagaggtgtggatcaaccccattgatgctcaggcacgcggtatccgtcatggcgataccgtgcgggtatttaacactaatggagaaatgctgattgccgcaaaagtgactccgcgtattctgcctggcgttaccgccatcgggcaaggtgcttggcttaaagcggatatgtttggtgaccgggtcgatcacggcggcagtatcaatattctgacctctcaccgcccttcaccgctggcaaagggaaacccgtcgcacagcaatcttgtccagatcgaaaaggtttaa

SEQ ID NO: 32406 - DNA, 849 bp, Escherichia coli
atgaataatgatgagctggccaccagacgtgcgcaggcgattgccgaagacaggtgtttctcgaaaggacgtttgcgcgatgaattcagaatgaaaccagcccccggtgctgagccggttaagtggtataaaaacacttatggtggcaggttcgctgtataccgaattgcagattgtgttccgatgcgtgagaaacgccctctgacgagtaaacaacagctggctggccagcggctttccgttttatcccgactaaacagcaccagtggccggatggcacggcaggtatatgactggctgagtctggcaccactctttctggatactgaaacgacaggactggataataccgcggaagccctggaaatcggcctgaccgatgcggccggtcaggtggtatttgaaaccaggctgaagcccacggtcgccatcggggcgcaggctgccgccgtgcatggtatcagtgagcaggctctctgcggcgcaccatcatggacagatgtggcgcgtcaactgcggcatgcaatcggggaccgaccagtaattatctttaatgcccggttcgacatccgcattctgaaacagactgctaccgcacatagcgatccggctggctggctggaagaactgacggtatattgtgcgatggaactggctgcaggatattatggggccaccaaccgctatggcacgatttcactggcctgtgctgccagccaggccggactgacctgggaagggcaggcacattcagcgatcgctgacgcacggatgacggcaggggtggtaaacgctattgctgcatatcatctggaactgctgcaggaacaggcacggctggaaatctga

SEQ ID NO: 32407 - DNA, 453 bp, Escherichia coli
atgcacgctaaaacaaaagcccttctggtttcagcgctgctgttaccggcaacggcaatggccacaaccggaaacgcagaggaacagagtccccggcaactgcagattgagcggatacaggacgaaacagccctgtatgaagccatgctggcgagagagaaaatccgtcatgagctgcgcatgctggagcagggtattcccgcagagcccggtcgtccgcaggaaagcacgtccgccatcccgactgccccgtcgacggcggcatccccccgtctgacagaaatatttggtgtacagcctcagctgagcgcccggatagaactttcgggtggacacatcaccgatgtgaagacgggccagaacatccccggaaccccttatctcgtggagaaaatcacaccggacagtgtggtactggagcagtccggcatcagaaaaaccctgcgaccatga

SEQ ID NO: 32408 - DNA, 555 bp, Escherichia coli
atgaacatcagtgaactgatatcctggctcagcctgatcatccgtgacctggaaacagccgctgcagaatacggggtgaaccacacagatattgtccacgaggcaacacaattacaggaacaactttgtcggggaaaacaggtcaccccggcacaactccgtgccctgagtgcccggttgtggggtgccagaatgcgcctcgcggcgcagtatggccaggacgcccccctcatgaacgatctggcgttcctgagcaactgtctgaaatatgatgccgacagattaaacgaccgctggcgttaccgggaatggatatccgcagccgaatcctttgtcctgccgctcgtcttcattatcccactgctgatcgtgctctgttatatgatgaagagcggcaattccggaggcgctgaattatgcgcggcacttgccggcgcatggtgcaccggactgacattcttatgcctgtgggcaaaagatcccgtcgggcttttctggtcactctacagcttcattccgctgtatttcctctggtgtgatatatcacctgcgtaa

SEQ ID NO: 32409 - DNA, 597 bp, Escherichia coli
atgctggagaataaaaccaccgatgattttatttttgttaagcaacatatctaccgcatatttcagtggatgcacgaaacacctctcattaacaacggtaatacaccggtaactgaccggttaatcgccgatgtccggtggatgctcgaacatcattactatccctcccccggccaggtggaccgtattatatctgtactgagggagacaaaattccagctgctccgtgaaaaaaccgacagacaggaacttgtggaagagatccagcagaaactgaacacgctgaaagatatccgtcatttcctgaagctgaacacgaactataaacaggatggcgatatcatttcacttacaccatctggtgaatggaagaatacttccattattttatcggtagttgccgtcattcttatgatattcgccagtatatgtaatctgtccggcatcacaccttattttatttataccgcaggtattattttttacgctctcgccacaccggtattaacgctgagatcaacacagccggagaaaaacattcccctgttattcgcctttggaggcgtaatcatttttacactgttaagcctgtgctga

SEQ ID NO: 32410 - DNA, 225 bp, Escherichia coli
atgacggatattactgacagacatacacttcgccgtatgtcctgggcagagctgagcactacggcccgggatgcagaatcaaaacatgattacgaaagcgccagaatactgtggtcatacgcatacagtattgcaacaaccagcataaataaaaatctggccagtgcacatattcgttactgtgacaaaaacatacacctgatgagtataatcaaactttattaa

SEQ ID NO: 32411 - DNA, 1428 bp, Escherichia coli
atggtgttgtggattggatatacagagaagaatgcatttggtaatattattcttttgtttctgctgtttatgacaggacggcagaatatactgtcagcagtatgtgtctgctgttttcttttgtttagtgcattttatgctccggtgggtattatctacgggaagattaacggcagctttattgcatcgttaatgcagactaatgtaacagaagcagaagagtttatcgcaggtatacccattatttattttattatctcattgatgatagttatgttcactgtctggttctggcgtacacgagaaagaaacaaaaaaggcgttctctttctgttattttttattgcattgtcggtcaatgcatggcccagacgtatggctgtggaggtggtgacaggcgttgctgaaaccagagccgaaatgattcgttatgaaacacttaataacaatcaaaaaagctcatgggaaatagtgagtgttgaaaagaaatataaaacaataattattgttattggtgaaagtgtccggcgggattatctttcagtctatgggtatccgttgccgacaacaccatggatgaattcagcaccgggtatatttattaatggctatttttcatctgcggccaataccattgattcactcagcagaacacttattcttgactatgctgaatcaggcaatcctggtaataatatggttacgcttgccagcaatgcaggatatgaaacatggtggatatcaaatcagggggctttaggggtacatgatacgttgatttctgttgttgccagcaatgcagataagaaatattttcttaaagagggaagttttgcatcacgccggacagatgatgaagacatgcttcagttcgtcagggaggcggttaattcatcctctccaaaagtaatttttgttcatatgatggggtcacatcctaatccctgtgacagactttttaatgatgctgagccattccgtgaaatatttgggcgaaaagtatcctgttatttatcgacactggtgaaactggataaatttctgcagaatatttatgagatggtgacagctcgtggagaggattttgctatggtctacttttctgatcatggcctgtctgtcagttcagacagcactcctgttcatcacgcgccgggtttacgctcagggtatgatgtcccctttgttattatggccagtgatatcgtaacgcatcagaaccatgatattcatatcagtgcccgtcgctttccggaaattttccagtggctcaccggaatacaaacacggaatttgccgttgatttcaccattattacagggtaattacactgaatatgtatcggtatttaatggtgaacatgatgtcccgattatgactttaccggaagagcctctacttacaggaaaggcagattcagcgttttaa

SEQ ID NO: 32412 - DNA, 438 bp, Escherichia coli
atgctacaaaaagaaaaaagaccaaagtttggtatagttctttttattattcttttgtctgttgtttatatatttatcacaaggctgagtctggctggaactttttattcattgtacatgtcgctgcacgaagactcacaggtaaaagagtattttattatatctataggggtgtttattattctttctgtgttatgtatgtattttatactctccttctttagaagaaaaagacatgttaacagattgcttctgtatatttatcttgtttatatcgtttattatgctgtaagttatgtctattgtttttatattgttgggattgattatactcctgatggaagtattgaaaacatatttattgatggcgttattgctgttctttttattttgtatatttatctctctaaaagagcaaaaggtatatttatacactaa

SEQ ID NO: 32413 - DNA, 294 bp, Escherichia coli; identical to SEQ ID NO: 4783

SEQ ID NO: 32414 - DNA, 1980 bp, Escherichia coli
atgacatttaaacactacgatgtggtcagggcggcgtcgccgtcagaccttgcggagcgactgacacaaaaactgaaggaggggtggcagccatttggcagccctgtcgccatcacgccttataccctgatgcaggccattgcggcggaaggtgatgtcaccacacctgtggtggtgaagccgtcggatggagaaggcacagttatcagcaccaccagcgaaccggagtattactttgttgttgttctggcggggcagtcaaactcgatgtcttttggcgaggggctgccgctgccggagacatatgaccgtccggacccgcgtattaaacagctggcgcgtcgcagtacggtgacgccgggtggtgtcgcctgtaaatataacgacataattccggcagaccactgtctgcatgatgtgcaggatatgagtaacctgaatcatcctgaagcggacttgtcaaagggacagtacggttgtgtggggcatgctctgcatgttgccaaaaagctgctgccgtttatgcctgcgaatgcgggtatccttcttgttccatgtggccgtggcgattcgggatttactgcgggggccgagggggcgtttaacgaagcgtcgggagcgaccgcaggctcgtccctgtggggggcggataaaccgctgtatcatgacctggtcagcagaacccgtgcggccctgaagaaaaatccgaagaacgtgctgttatcagtgatctggatgcagggagaaaaagatgtcagttcggggagacatgcagaacacaatgcgcttttccttgccatggtaaatcagttccgtacggaactggcagatgtggcagagcagtgtactggcgggacaacggccagcgtcccgtggatttgcggtgataccacgtactactggaaggaaaggtatgcagcgccgtatgaggcggtttacggtgggtataaaggcaaagctgcgcagaatattcactttgtgccgttgatgacggatgagcatggtgtgaatgtgccgacaaacgagccgtcagaagatccggacattatcccggcgggatactatggcgctgcgtcacgcactgccagtaactggacgtcagccgatcgtaaaacgcacttcagttcatgggcgcgaagaggccttgtttcagaccgcctggcaggtgccattttgcagtacgccgggcggacattatcgttccttaccgggcagagcgcaccgcagtcgggtggtacaactcctgtcagtccgggggtaccgggtgttgagaaaccgcaggatggcggtgttgctggtactggtcatgatgaggccgtgagcagtaccaggacggtggctgaatatgatgcgaacagtggaaatggtgtatggacagagcagcagtggggggctgccggtggcaaaggcactgtgactgatgacggtggacggaaagcgctacgactggaaaaacagcccggtaaactgacgtcctggaaaatgttccgtactgttgcagtggaggaggcaaaaaatcttctcagcaaggggggtgaaattgccgtacggttcaaaattccggatggaagcgaactggtgaacggacagtttgtctttggtctctactggccggtgtcgcagtgggcgtcaggcgcggcagcaaacagtatgctggcatcattcttccttcagacggatgcatcaaatctgaatcttatgcaccacaagggcacgtcgaatgcacaactgggtacatttggtgcgtttgaccataactggcatacggttgttttccgctttgcgggaaataacagcgaaagagtcgttccggtgattgatggtacagagcagacggcgtttgacctggtgatgtggacaaatgatggctttacagcagatacgctgacgctgacagatatcacgggggcaaaagcgacgtatccggtactgcttgatacggtcacagtcaaagttaacgaaagccgggcatcatcataa

SEQ ID NO: 32415 - DNA, 204 bp, Escherichia coli
atgaaaatacgcaaccgcaccacaaagaaacaagaaattatctggcagcatacatacacttatgacatttactacaaagaagataaacgagctcagcagataaactcctttattatttggtcctgtaaagaaataaccaacaacccccacgataaacaggctggcacctgtaaaaaaacacaaatcccctgtatgcatatataa

SEQ ID NO: 32416 - DNA, 549 bp, Escherichia coli
atgaatgttaataaaaagaagcttgctgaaatctttaatgtcgatatacgcactattgatcgctggcaaactcaggggctccctcagatatctggtggaggaaaaggtgttgaggtcatctttgattctgcgaaggcgatcgaatggtatgctcagcgcgaagctgatattgaaaatgaaaaactccgtaaagaggtcgaggatttgagggctgccagcgaatcagaccttcagcccggcaccattgattacgaacgttaccgactgacgaaggcacaggcagatgcacaggaactgaaaaatgcccgcgacagtgggcaggtcattgatacagggttttgcctttttgctctgggaagactggcacaggagatctctgccattcttgactccattccattgtccatgcagagacagtttccggcactgacgcccgctatgcttgatttcctgaaaaccgatatagcaaaggcggcaaaccgatgcgcatcaacggcagagaagttaccggagatgctggatgaatacctcagagaagcagctaaataa

SEQ ID NO: 32417 - DNA, 258 bp, Escherichia coli; identical to SEQ ID NO: 29581

SEQ ID NO: 32418 - DNA, 294 bp, Escherichia coli
atgcgggaatactgcgacgatacggcgcatcagcaaaacttatttcaggcactgagtgcggatatattcctgtgccccttccagctgcttctgcatcatcatcaaccgctctctgagggtgaaataatcccgttcagcggtgtctgccagtcgggggccggttgcattatccatgccggaggtgccggtggcttcacgcacggtaccggagcaggtggcgttgatccgcaggcgcttacgaccagcagcaacatcagcacgcagagtttcattttcagctctcgcatcggctaa

SEQ ID NO: 32419 - DNA, 234 bp, Escherichia coli; identical to SEQ ID NO: 5931

SEQ ID NO: 32420 - DNA, 594 bp, Escherichia coli
atggacattgaagattttctggaggcggaagacaatgatctgtctctgtggagtgatgatattttaagcattgactggttcgttatcctcaaagagcttttgaaataccagaacaggttaaagttaaactattcagaattacttctgctggctaattttgtttcatttcaccaggacgtagattcgcaaacattaccatcaatatctctttttgccaccagaatgcgtacatcccgggacgccatacaaggagtcctggtgtgtctggaggagaaagatatgttacagaagataagttacgcgcaaatcgatcatgacgatgatttgcgaaacatctatgatatcaagccattaatccgccggttaatttggttattgaaaagtggttgtgataaaaagcatacttgccccctctgcgggaaagtcgctatatctaatgaggaaattgagaaaaaattcggattcagaatttgtgggaataagaaaaggccgcaaagctggtgtcgttcatgcagaagccccaaacaacgccgactgaatacattgttatgtggtaaaaaaagagctcgaaaatcctcgcccgaggtggtgtaa

SEQ ID NO: 32421 - DNA, 381 bp, Escherichia coli
atgcgtgatattcagcaggtgcttgaacgctggggtgcatgggtggcaaataatcatgaggatgtgagctggtcgcccattgctgccggatttaaggggctgatccccgaaaaagtaaaatcacgtccacagtgctgtgatgatgacgcgatgattatatgcgggtgtatggcccgccttaacagaaacaacagtgatttgcatgagttgctggttgattgctacgtgcgggggatgacgtttatgtcactggcgcgaaaacatgaatgctctgatgggactatcggaaagcggctgcaaaaagctgaaggtgttattgaaggaatgctgatgatgctggatgttcggctggagatggacagatatgtgcagcgcctgtga

SEQ ID NO: 32422 - DNA, 342 bp, Escherichia coli
atgtttactctcataaactacattatcgaatactacagtgacgaggttgaagctgagatcctttctcttcctgagaccttacaagcccggtacattcggtacacggagaaaatgcgtatttacggagctaatcttggttccccgcatacagaggcatttggcgacggtttgtttgaaatccgccttaagggctcggaaggcatagggcgtgttttttactgcacgctaaaaggaaagcgaatcattatgttgcatagctttgtaaagaaaacgcaaaaaactccacctgccgagcttagaaaagctgaaaccagaatgaaggaggttaagcatgactggtaa

SEQ ID NO: 32423 - DNA, 309 bp, Escherichia coli
atgactggtaaacgtaccccacctaccatgacacacgatgaaatggtagaaaaaatgttgtctaaccccgcagtaaaagcagaatacgacgccatcgccgatgaattcgcactacttgatgaaatgctggcagcacgaaaagaagctggcttaacccaggctgaagttgctgaacgtatgggaacaaaagcgactgcgataaccagaatggaaagcaatcttgcatcaggtacaagcggcccatcatttgccacactgaaaaaattcgcccgtgctacagggaaaaaactccagatccgcttcgtttaa

SEQ ID NO: 32424 - DNA, 2439 bp, Escherichia coli
atgttaagtaacaaatggcgtgacataaagttcattcttgcatctttaatgtcaatttcgatttgtaaggcgtctgaattagatcgatttaaccctgatttcttaagagtatctgatggcgtaaatgctaaagaaattgatttaacgtactttgaaaaaaatgatggacttcctccaggaaattatcaggtgtggatatacattaatggggaaaaagttggtaataaaagtctaaactttagaagaaataaagaccaaaaaggtattcatgcctgttttaacaaaggggatttaagatcgtggggagtaattaattcgatatcagaagaaactgtctgtgaaataggattaacatccgttattgataattcttacgagcttttcaatgaaaaaaaaatggagttacatctttactttcctaattctatgcttgagcgtcgaaaatggaggagtttacctgtaacatggaatcaaggcattcccgcttttctgttaaattataattacacaggaatttctcagagattaaacaagaaaaatgaagataattattttctgagagttgatagttcattaaatatcaatcgctggagattaagaactgaaacttcaatgatgaaaaataataaaaatagtgggaatgagaatgtttatctcgaaagggattatgagcaataccaaggtggacgtattgttattggaaactcatatataaatagtgagctttttgataactttccattcaagggagttaagttctcatctgatgattcaatgcttgattcttcattttcggaattcaccccgagtattagaggtattgcacatagcccatcaatagttactgttaaacaaaacggaaatattgttcttcaaaaggaagttcctgctggagtattcgaaattgatgatatcccttataattttggtggggactatattattgaggttaatggttctgatggggtaaaaaatacatttacacaagctaatgcatctctaccttttctgcaaaaagaagggcgtacaaatcattatttagcattaggtaagttaagacatcaatatggtacagatacctatgaaccgaattttattctatatcatatcgcaaaaggtttaaggtttggaaatacattacatcatggtggaattatttctaatgaatataaatcaattttgtttggtggaggaacctatcatccatacttaggtgctttttcagttgattatactttctctgaaagagaagatagaaaatatgaagggcgagggcgaggtgataagtttgaattttcttattcaaggaatatagatttaacaagtgcaaatttatctatgcatatgaacattttcgataaagattaccttaactttcaggagcatgcgtattctttcaatggaaatgcaaatacatatgaaaaaacgaaacgaaacttcggggtgcgcttaacgcaacctattgattattacgcaaatttttcgctgcagtttgataaatattcatattataaaaacagagatgatagttacagtttcttaacatcaataagtactaacttcaaaaaaataagtagttcattatcacttggatataataagtttttgggagttaaagatgcagataaaacaataaactttatgatttcattacctttatggaatggcataagttcaaataatttcatatcttcctcttccgagggcgcaagaatccagtctggtgtatcaggatttttagaagaacaacagttatcatggggggtgtcgcatgaatctaataaatcagttgcaactacaaattcaagtgttaattggaagacatcgttttcacagataaacggagcatattcggttaataatgacatgaaccgtctatttatggggattagaggtggggtggccatacatgataaggggataacattttctcaacctctgtcttttgaggggggcaatgctttagtagatgcaaatggaattagtgatattgtcattaacaataatagggttcatacggattattttggtaatgctattgtaacagatttatctccataccaaaaaaataacatttcagttaatttgtcagctacttcagatgctatcgatataactaatactgatacatatgtagttccatcccacggggctctaacttatgtcgaactaaatgcggttaaaggaaatagggtgctatttaagttaaataacaagtctcaaaaaataccattgggagcgatggctacaataactggccgtggatttaagaaaacagaatttattggttatgatgagaaactatatatgaacggtgttcctgaaaaaggggtggttgtcgtaaaatggagtgttgggggggaggattatgcttgcacatcaaaatacagcataaggaataaaaaaagcctaaatattctttcattgatgtgcaattaa

SEQ ID NO: 32425 - DNA, 744 bp, Escherichia coli
atgatgtgtaagagcgtgtctttatgttttttattgatatttggcattgtgttgaatgtttatgctaattctgagtttacaaaaaataatagtgtgtcattgtcttcgactagagctgtttttaaatctgggaatactagcgaaggattaggtgttaaaaataactcaaaagagtcagtttatttaattagaagttggattactgattatcacactaataaagtggatgattctaagtttctgataacaccacctcttctaaaaataaaacccgactcaacatatcagttaaaaataaataaaatatcaaacgatatgccgactgacagagagtctatatataaaataaatgtaatggccatccctgttaatggagggcaaaatggaccttcatctagtgaaatttctgggggggtatcactttccgttacgcacactataaaaatgttctatcgacctgagtctatagataataaaacaaatatgaattcaatagatgatttcatatcagctaattacgaggagggtatcttaaatattgaaaacaaatcaccattttttgttacatttgcaaatttaataactgacaaagaaagtttatatgctcatttagctaaagaaggaatggtgtctccatttgggaacatccaaatcagaacaaagacaaaacccaggactcttacttaccaaagaattaacgatttcggtggcgtaacattggagaaaattattgatgttaagtaa

SEQ ID NO: 32426 - DNA, 348 bp, Escherichia coli
atggcccgttcagctaaacctcgcaaacaaaaatcccgcaaacaatccacccgctcagcccccctgttgcgatggcgggtggtcccctgcaccggaggaacagataatgaagccggactgttttttcccgacttcgccagcgctgccgattactgtatggagaaagatattccatacctgtttgaagaagatgcctccgggaattatgaaacaacagtatggatagttggtgagcccgacggtaatgtcaccatgctccccatgtcctggaaaaattttctgtccgtgtgcacaagacatccctttatctgtccgcagtgcggcacctcacatcttccccctgcgtaa

SEQ ID NO: 32427 - DNA, 3243 bp, Escherichia coli
atggcgacgttacgtgaactgattatcaaaatttcggcaaattcgcagtcattccagtcggagatccagcgggcttcccgcatgggcagtgaatattaccggaccctgcagaatggcgggcgtcaggctgccgcagtcgcccgggagcagcgacgcgccctggctgagctgaacagccagttgacggaaatccgcgcttcagctgccggaacggcgggggcatttgcaggtgcctttgccaccggacacctgatttctctggccgatgaatggagttccgtgaatgcccgactgaaacaggcgtcgcagtcatccgatgaattttcgtcatcacagaaagtgctgatggatatcagccagcggacgggcacggcattttcagataatgcggccctgtttgcccgctcggcagcctcaatgcgtgaatatggttacagtgctgatgatgtgctgaaggtgacggaggccatttccacggggctgaaaatctccggtgccagtacggcagaggcgggctcggtgatcacccagttcagccaggcgctggcacagggtgtgttacgcggtgaggaatttaattcggtcaatgaaagcggagaccggatcgtacgtgcactggctgcgggtatgggcgtggcccgtaaagaccttaaggcgatggcggacgacggcaaactgacggcggataaagtcgttcctgcgttaatcagccagctgggggtattgcgtgatgaatatgccgccatgccggaaacggtctctgacgggatcacaaaggtggaaaacgcctttatggcctgggtgggtggcgcgaatgaagccagcggagcgacgaaaacgctctccggcgtgctgaacggtgttgccggtaatattgataatgtggcaacagccgcgggggcgctggttgccgtcggggttgcccggtactttggcaatatggcctccggagcggtgtctgccacggcaggacttgtgacggcagcacgtaatgaagtggcactggcggaagcacagctcagggggacgcagattgccacggcgcgggcaagggcagccgtgtaccgtgcacagcaggctgtggcggcagcccgcgggacggagatgcagattgctgcagaagcccgtctggcggccacacaggaacgcctgaacagaaatattgctgccagaaccgcagcccagaatgcgctgaacagtacaacggcggtgggctcacgtctgatgactggtgcgttgggactggttggtggcgtacccggactggtgatgctgggggcagcagcatggtatacgctgtaccagaatcaggagcaggccagggagtcagcgcgccagtatgcactgacgatagatgaaatcgcgcataaaacgccgtcaatgtctttgcctgaagcctcagataatgaaggacgaacacgggcggcgctggcagagcagaaccggctgattgatgaacaggccagccgggtgaaatccctgcaggaaaaaatcgctggatatcagtatgttctggctaaccctggctggacaaccggtgacggattcatgataaaccatctgacatcggtgaagaccgtaacggaagggctttctcaggcaacagagctgcttgccgttgagcagtcccgtctggcacagatgcaggaaaaagcgcagtccattcaggatgtgcttgccgggctggaagaccgtcgtgtggcgttaattcgtcagcaggcggcagagcagaataaggtgtaccagtccatgctggttatgaacggtcagcatacggaattcaaccgtctgctggggctggggaatgaactgcttcagcagcggcagggactggtgaatgtaccgttacggctgccgcaggccaccctggatgataaacagcagagcgccctgacaaaaacagaacgtgagctggccctgtcccgactgaagggggaggaaaaagagcgtgcccggctggggtatgcggcggatgacctcggttttgtgggggattcgtatcaggaggcgagacagcgttatatcagtaatgctctggaagcctggcgtaataacgaggcgaacaaacctaaatcccggggtggaaaatcagagacggaaaaagcggaagacagtttttcccggctactgaagcaacagaaagagcaactggcactggcgggtcagaatacagagctggcgaagctgaagtaccagactgcgcagggcgaactgaaaaccctgacggagatgcagaagcaggaactgctgcgtaacgcggccctgattgaccagcaaaaaatccgggaacagttgcgatcccgggaagagaccctgaagaatgataatgtggctgcgcgtgcatcaaatgaagccgaactgctggggtacgggcagggagaacgagccagggaacgcatgcgggagttgcagcagatccgcgacagcttccgccagaaggatgcggaccttcagtctcagtatcagaccggggatatcagtgaggatttttacagacaggcacgggcacagaacgcgcagtatctgagcgaacgccttaaggaccaggcagccttttatgccgaatcggatgtgcagcgtgcggactggcagaaagggctgcaggaggggttcagtaactgggtggataatgcgtccgattacgcctcacaggcagcacagctggcgacggaggggatttcaggactggtgaataacatcacggagatgctgaacgggaataaagtggaatggcgcaactgggcctcatcagtgctgcaggaaatatcaaaagttcttatgaatgccgcgattgtcaacgggatcaagacggcggcaaacagtatgtccggtgcaggaggatttattggcagcattggtgactggctgggcggtgcggtggccaatgcaaaaggcggcgtgtatacctcggcaaacctgagcgcgtacagcaacagtattgtggatacgcccacgtactttgcctttgcaaaaggggccgggctgatgggggaagccggacctgaagccataatgcccctgacccgggcggcggatggctcgctgggcgtacgtgccgtgggcaggatgaacgggagtgcgggtctggtgtattccccggtctaccacatcgccattcagaatgacggggccaacggtcagatagggccggaggcggcaggcagccttgttcagctgattgaccagcgggtgcaggcggtgatgctgtccatgcgacgagacggaggaatgctgagtggctga

SEQ ID NO: 32428 - DNA, 309 bp, Escherichia coli
gtgctgacgcacttccgccaggaacttaaagcccttaccggacggaaactgcaccttaaacgcatacaccgtgtcattgtcataggcatcacgcagggcgttctgggcctgattcagataaaaattacccgacatggaaatctcggacgacgcccccagaccgttgatgttctcctgctctgtggagcagagcgtggtcacatcaatatcctgtttctgaccggcggtgaactggacttccttgatggtgcagtccaggcgcagatattccgccttatccatagtttcagcagtcgccggggcagatga

SEQ ID NO: 32429 - DNA, 447 bp, Escherichia coli
atgatcgaaaccctgctggatttttcgggacttgaagaaataagccgtgatttgcagcttctgagtggtgcagaaaacaaccgggtactgcgtgaggcaacccgcgcgggggcgaatgaactgaaagaagaagtggtgtcacgggcaccggtgcgcaggggaaaactgcgccgcaatgtggtggtcctttcccggcgctcccgcgatggcgggatggaatccggtgtccatatccgtggtgttaatccggacaccggtaacagcgataacaccatgaaggcggataacccgcgcaatgctttctactggcggtttgtggaaatggggaccgtgaatatgccaccgcacccgtttgtgcgcccggcgtttgatgtgcgcagtgaacaggcagctcaggtggcgattgcgcggatgaaccgggccattgatgaggtactgagacgatga

SEQ ID NO: 32430 - DNA, 426 bp, Escherichia coli
atgaaaatcaagcatgaacacatccgcatggcgatgaatgtctgggcgcatccggacggcgaaaaagtaccggctgcgaaaattaccaaagcgtatttcgagctgggaatgacgttcccggaactgtacgacgacagccatccggaagccctggctcgtaatacccagaaaattttccgttggctggataaagacacccctgatgctgttgaaaaaattcaggctctgttaccggcgatcgaaaaggcaatgccgcctctgctggtggcccgtatgcgcagtcacagctctgaatattaccgtgagatcgtcgaacggagggatcggctggtgaaagatgtggatgattttgtcgcagcggcgatcgcctggggcaccctgactaacagtggtggtcagcctggtaatgctgttgtcgtgcattga

SEQ ID NO: 32431 - DNA, 402 bp, Escherichia coli
atggaatttaaagatttaccagtaccattccaggaaatggcatctaatgtggttcgctctcaactggcgactcttgacctgagtactgtagaaaaggaaaccatcgatactatatccggtaacgtgcgtcgtgcctttataggtctgtatgaagagaagcgcctattcggcggacagaattcgactgaaaacaagaatcaagcaaatgatgagaagctgaaacacattatcgccttacttttggaagacgcaaaacgtctacagcaactggaaccaaatgcaggcacagaggcccgcatttggattgccatgaaatcactcaaatgtgaaagcagtgattatttcaaaacaacaattaaaactactcaactttcgggagagctactgaagaaattgccataa

SEQ ID NO: 32432 - DNA, 165 bp, Escherichia coli; identical to SEQ ID NO: 17502

SEQ ID NO: 32433 - DNA, 669 bp, Escherichia coli
atgaattcttttatttatatagaaaaaaattcttcattaagtgttaagttgaataacactgggggaacagtatcttatgaaatttatcatattgatagtggcatgttaaaaaatgtgtacaaagtaataaagcctctatttgatgaagttaaatcttatcctgcttgcgctcagaaaatattcattcatgaagcgcagcaagttgaaattgatgttttcaagctattggtatcatcaaaagatagcaatatccgtcaaatatataaagttgcttacattctttctaaatttcccaacattgataaacttatgctttctatcgaaaagtctattaaaataagttttacagaaaaagtgaaaaacattattgaaacagacatgtcaaaacaatggcgtctttgtcatctcagtgacaaattatttatgtcggaggtaaatataagaaaaaaactagaaaaagaaaacatcacatttaataatttactacttgatttaaggatgaacttttccgccagacttctcaatactaccgaaatgcatgttagcaacatagccaagaaatcaggttattctaatgtatcttattttataaaggtttttaaagactacttcggggttactccaagacaatataatctcaaaatccgtgggagaacgatgtgcccgtag

SEQ ID NO: 32434 - DNA, 561 bp, Escherichia coli
atgtttaaattgaataagatttattgcgccgttctcctgactggcttattaagtacttcagtttccgctgctgatattagtggtgctactcaagataagtttatcctccaagggacggtaacccaaccaacttgtactgtttcactggataataaagatatcgattttggtaattttaatgcacaggaaattaatgaaaaatctccaggtagtctattaaaacaaaatatggttcatttcacactatctaattgcccggcaggtcaggctaaaattcttctgaatggatggtcaggtacgacgactaccaaccctacttatgtaaacttctcaggaaatatgaatgcacttgcgatacgcgtagctaatggacaaacgaaaagagcaatgaatctcaatggtcaggatggcgcaaaccatgtgattaatatcacaaatactacttcacaagattttccgttgtatttctcacttattaagtctccgggtgccaatgccaaacaggtagtcaacggaaactcgtttaaggcgactcttaactacaatatcgtctatccataa

SEQ ID NO: 32435 - DNA, 285 bp, Escherichia coli
atgactaaaaatactcgtttttcccccgaagtccgtcaacgggcagtccgtatggttctggaaagtcagggcgaatatgactcacaatgggcgacaatttgttccattgctccaaagattggctgtacgccggagactctgcgtgtctgggttcgccagcatgagcgggataccgggggcggtgatggagggctcaccaccgctgaacgtcagcgtctgaaagagctggaacgtgaaaatcgtgaactacgcctttttattattttaataatatcaataaattaa

SEQ ID NO: 32436 - DNA, 915 bp, Escherichia coli
gtgagtaagaagaaaaacaccacaacgcccacgccgcatgatgccgcgttccggtcgttcctggcgaatcccgacgttgccagggattttctggaactgcatcttcctgcggagcaccggcagttgtgcgacctgtccacgctgaagctggaacccgccacctttgttgagccggacctgcatcagtacgccagcgatatcctctggagcgtgaaaaccaccgggggtgaagatggttatgtttatacgctcatcgagcaccagagcacagaaaatctgtacatgccttttcgcatgttacgctacagtgtggcggcgatgcagagacatctggagcagcacaaaacgttgccactggtgattccggtgctgttctatcacggtgagcgcagcccgtacccgtacagcatgaactggctggactgttttgagaatccggcacttgcggctaaaatatacacaaagccgtttccgctggttgatatcactgtcgttgatgacaatgaaatcatgaaccatcgccggatggccgcactgacgctgctgatgaagcatatccgccatcgtgacatgatggagctgctggacaaactcccgcaggtcatggtggaaatttcagatgaacaggtgcgtgttctgattcattacatcgttaacgcaggggactctgtatcaccggaatttatgcgggcgctggctgagcgtctgccgcagcatgaggataaactgatgactatcgcagaacgtcttgagcaaaaaggtcgccaggaaggcaggatggaaggacgcatggaaggagcgcttgaaaaagccttggctattgcgtgccagcttcagaaaatggggatgacgccggagcagattaagcaggctaccggactttccgatgacgaactgaagaaaatcactcactga

SEQ ID NO: 32437 - DNA, 237 bp, Escherichia coli
atgcacaggcaggaactgaatcgcactgaaacggcgcgggaagtccagaggccgagcattgatgctcaccttctgtggcttgaagcagagctgaagcgtcttgagaagcagataaaagacctgacagacgatgatccggatatgaaacaccgcaggaaactgctggaaagcatcccgggtatcggagagaaaacatctgcggtattgcttgcgtattaccgtgaaggagatcggtga

SEQ ID NO: 32438 - DNA, 1749 bp, Escherichia coli
gtggccatccgggaaaacacggacggcacctttgccatcacggcagtgcagcacgtaccggaaaaagaagccatcgtggataacggggcccgctttgagccgcagtcaggcaccctgaacagcgttatcccaccggcagtgcagcacctgacggtggaggtgagcgcagctgacagtcagtatctggcgctggcgaaatgggacacgccgagggtggtgaagggcgtgcgcttcagtctgcgcctgaccagtggaagcggtgagaacagccgcctgctgaccaccgccatcactgccggtacggagcaccgtttcagtggcctgcctctcggggaatacaccctgatggtcagggcgattaacagctatggccggcagggcgaacccgccaccaccacattccggattaatgcgcctgcagcgcctgccggtgttgaactgacgccggggtattttcagataacggcggtcccgcgtcttgcggtgtatgacccgacggtacagtttgaattctggttctcagaaaaacgcatcacgaacacagcacaggtggaaaaatctgcccgttatctggggaccggcagtcagtggagtgtctccggcccgcacattaagcccggaaaggatttctggttttacgtgcgcagcgtcaacctggtgggtaaatctgcttttgtggaagccagagggcagcccagcaatgatgctgcgggctatctggaacttttccgggaaaagataggaaaaacgcatctggcagaggcgctgtgggcagagattgacaacagtcagctgaaggacgagatggcggaaatgcagaccaccatcacagaaacccgcaatgaaatcacgcagacggtcagtaaaaccctggaagaccagagcgccaccatacagcagatacagcgggtgcagacagacacgaataacgacctggctgcgctgtacatgctgaaggtgcagaaaacgaaagacggcattccgtatgttgccggtattggtgcggggattgaggatgcagatggccagccactgagcaatattctgctgcaggctgaccgtatcgcgatgataaatccggagaacggcaacaccacgccactgtttgtggcgcaggggaatcagctgttcatgaacgacgtgttcctgaagcgactgtttgcggtgagcatcacgtcgtccggcaatcccccgacgttctccctgacgccggacggcaggctgacggcccgtaatgctgatatcagcggacatatcagtgcgaactcgggcacgctcaataatgtcgtgatagcggagaactgtacgataaatggcacgctgaaagcggagaacattattggtgatcttgtgaaatgtgcaggggtggcttttccggtggatggtagttaccttgcgaacggtacacgaacgctgacggtgtatgacgatcacagctttgaccggcagattataatcccgccgataatctatgtcgggtcaaaacaggaatcccgcaccagtaatgacatctggacagagtgcttcctgcatgttgatcagaacggacgccggatttattccggcaggtcagtgacagagccgggaattttcagcaggatcatcgatatgccagccggtcatggtcatatcaccctgagttttaccgtaagttcacggcgtcagaacgggagttttggcagttcacgtatcagtaaccttcaggcgatagtggtgaagaaaaacagcgcggggatcagtatccgctga

SEQ ID NO: 32439 - DNA, 1164 bp, Escherichia coli
atgaaaaaaatgacagtggcactttcagctgtggcagcagctgtaatttttgcagcgggggcgcaggctgcagaagtatacaataaagatggcaataaacttgatgtgtatgggcgtgcaactgcactccattatttctccagtgataagggggatgatggagataagacatacgcacgtctgggctttaaaggtgaaactcagattaatgaccagttgactggttttggtcagtgggaatatcagttctctggtaataaagctgaatcagagggtgctgcgggtaataaaacccgtcttgcatttgcaggtctgaagtttggtgagtttggcaccattgattatggtcgtaactatggtattgcgtacgatgttggttcttatactgacgtattaccagagtttggcggtgatggctggacccagaccgataacttcatgacagcccgtacttccggggtattaacctatcgtaatacagatttctttgggcttgtcgatggcctgaattttgcggcacagtaccagggtaaaaatgatcggggtgatctccggaaagctaatggtgatggtcacggtttctcagccagttatgaatatgaaggttttggtatcgttgccgcatatattaatgcggaccgaaccaataatcaggaaaaaggtctgaatggtactctgacgattgaacaaactgatcctttaaccggtaaagtgactgaaaagcagatcgttgttgattccggtagtgttgcaaaaggtaaacacgctgagatgtggggagtcggactaaaatacgatgctgacaacctttacctggctacaacatattccgaaactcagaatctgacgacctttggtgataaaggagttgcagataaagcgcaaaactttgaagcggtactgcagtatcagtttgatttcggtctgcgtccatctctggcattcctgcagtctcgtgctcaggatgtcattgtaggtggtaaaaactatggtgaccaggatttggttaagtatgttgacgtaggtgcgaaatattacttcaataaaaatatgtccacctatgttgattataaaatcaatctggttgatgagaataagtttaccagggatgcgggcattgcaacggatgatatcgttgctgttggtatgacttatcagttctga

SEQ ID NO: 32440 - DNA, 276 bp, Escherichia coli
atgagtgaagaaaatagcaaagagaatacagcactttttgacagaatttttactcttgagttacaggtcggtgttcttctcccaaagataatcaaagcaatggatgcactaagtaaaaataacgctgtgtcagattacctgatcgccgaaatggaacatctaattaaagaaataccaaagacagttgctcgtgatgataaaagattcctcaaggctgctgaagatgctctttcaaccgtgaagcgcagcttagatgcgccgcgcgatcaagaatag

SEQ ID NO: 32441 - DNA, 534 bp, Escherichia coli
atgaacgcaaaaatcagatacggcctgtcgactgccattctggcgctgattactgcaggcgcatctgcgcctgacattctcgaccagtttctggatgaaaaagaaggtaaccacaccacagcataccgtgatggttctggtatatggaccatctgccggggtgccacggtggtggatggcaaacctgtcgttccgggcatgaagttgtcgaaggaaaaatgcgaccaggttaacgccattgagcgtgataaagcgctggcgtgggtggagaaaaacatcagagtgccgctgaccgaaccccagaaagcggggatcgcgtcattctgtccgtacaacattggtcccggtaagtgtttcccgtcgacgttttacagacgaattaatgctggtgatcgcaggggagcatgtgaggcgattcgctggtggattaaggacggtggcagggactgccgtattcgctcaaataactgttacggtcaggtatcccggcgagaccaggagagcgcgctggcgtgctggggaatcgacagataa

SEQ ID NO: 32442 - DNA, 216 bp, Escherichia coli
atgtaccagatggaaaaaatcacaacaggtgtgtcatacaccacgtcagcggtgggaacgggctactggttcctgcagttgctggacagggtttccccgtctcagtgggcggcaataggcgtgctggggagtctgctgtttgggctgctgacatatctgactaacctgtatttcaaaatcagagaggaccggcgtaaggcggcgcggggagaatga

SEQ ID NO: 32443 - DNA, 534 bp, Escherichia coli
gtgagcagaaaactccgctatggtttatcggctgccgttctggcgctgattgccgctggcgcttctgcgcctgacattctcgaccagtttctggatgaaaaagaaggcaaccacaccacagcataccgtgatggtgcgggtatctggaccatctgccgtggagccacccgggtggatggtaagcctgttattcctggcatgaagctgtcgaaggaaaaatgcgaccgggttaatgccattgagcgtgataaggcgctggcatgggtggagaaaaacatccgggtgccactgaccgaaccccagaaagcggggatcgcgtcattctgtccgtacaacattggccccggtaagtgtttcccgtcgacgttttataaacgaattaatgctggtgatcgcaggggagcatgtgaggcgattcgctggtggattaaggacggtggcagggactgccgtattcgctcaaataactgttacggtcaggtatcccggcgagaccaggagagcgcgctggcgtgctggggaatcgacagataa

SEQ ID NO: 32444 - DNA, 270 bp, Escherichia coli
atgagtgttgaactacttaataatttttttattgatattaaaatcgaccctgtatcatttcctaaaaatatagataaattaaagttctcgtactcatcacttgtcgacaatttccacggtacagcaagtcttgttaagaatacaaagcttgttaacaatagcgaagggcaagcttcagggttaagaatccttactattttgattaatggtaataaagatagattactcgaacttttagatacagcatttaaggtagaaataaatgattaa

SEQ ID NO: 32445 - DNA, 633 bp, Escherichia coli
atgattaacttaaccttaagaaacaagtcatttcatggtagagatattttaacaaatcataatctttcgttttctcaggatggtttttacgttattatgggaccttcaggtgttgggaaaagtactcttcttaatatcattggcttgctcgaccttgaatttaatggtgagtatttattttatggcaataatattaatgcaaaaaatcttgaattagctatgtcaatacggaggaaccactttggttttatatttcaggattcattgattaacgaaaagcaaagtataatcaggaatcttttatgttctgtagattattcatatatttctgaggcagaaaaaaacactcactcagtattggattatgttggtttgcatttatatgaaggaaatgcgagtaatctttcaggtggagaaaaacagcggttagctttagctagagcattgataaaaaaacctaatgttctgttggctgatgaaccaacagctagtttagatatgaaaaacaaaaaacacgttatggatattctaaaagaatataataataaaaacaactgcataataatgataactcatgatattgagcttgttaatgataatatggaagttatttatcttaataacagaatttaa

SEQ ID NO: 32446 - DNA, 369 bp, Escherichia coli
atgaaaaaaacagcctttgctctaggactattttgtgttagtttaaatacctttgccggtggtaacaatggctggaatgctgatgctgttccacccaaacaatgcgtcattgtaaccggaagtagttctgtatctccaggaagtttagtatatcgcacagatgactctaattgtatgcaaggaattcaagaaggaaaagttaaaggagtaatgataaattcaggtgaatttatttataatgatggttccagaaccacattcagtggaagcgtttcaccaaaccagtcactaatgcttaacagtgatacaagtaagattaataaagtaggattgaaatcctggacttatcaaacatcttggattaaataa

SEQ ID NO: 32447 - DNA, 684 bp, Escherichia coli
atgaataaccagtatttacagtttgttcgtgagcaactcatgattgccactgcggatctcagtggggcgacaaaaggccagctggaagcctggcaggagaatgccctgttcgatacagggcgttacagacgcaaaaaaattcgttatcgcgatgaggtaaccggaaaaatgatcacgcgggataatccaccgatcccgggtaaacaatcactggcgaaaggctcatcaattgcgctggtcagaccggttgagtttgcaacatcatcgtggcggcgtgccgttctggaactggaagaacatcagaaggcgtggttactgtggtgctacagtggaaatgtttgctgggaagatcaggtcactataacacaatgggtatggggtgagtttaaagctcaggctggtaccagaaaaattgcagggaaaacgctggatcgtctgaagaaactgatttggctggcggcacaggatgtgaagagtgagctggcagggcgtgagacctatgaacatcaggagttagcgctgttcataggagttgctaaatctacatggacaaaaacacacaggcctcactggttggctatgcggggtagtgcagagatgctggacagggatgctcttatttcagtaatgcgggtacgttcacggaaaaagtcgcttaatttagaaccatatcttgcaaaatag

SEQ ID NO: 32448 - DNA, 261 bp, Escherichia coli
atggattatccaaatctaccaaaacaaacttttgctgatttaatcgcactcaggcaagcagtcgtagctctaatcaacgtgttgccggatgaggaaaaggaattagttaaagcaattcttaacagaactgccgccgatttttcatcattcccactgacagatgaccttgcggaccttcctgaattaattgcagcgtccgccattaagcttactgaagagatttactctcctcaaaagccttcacaaaattcctgcgagtaa

SEQ ID NO: 32449 - DNA, 573 bp, Escherichia coli
atggcagaagtgcaggcagcaaaaacgaaggcagaagaggcagcaacccgggcagcagtccccggaccgaagggggacaggggggaacctggcgcacctggtgcagtggggcccgcaggccctcagggaccggctggtgcagccggagccaaaggtgccccggggccaaaaggggacaaaggcgaacccggagcaacaggtcccgcggggccgcaggggaaaaccggcccggcaggccctcgtggtccggcagggccgcagggggcagcaggcaggaatggtaatgtatccacagaaaaatatgcggttggctctttcttatttggttcgatatcgactctcgaaagtgaaagtgcaattaaagagaatatcaatggcgaaaaaattactgaagtggcgattctttaccgcgttggcgtcacgtattcgcccacgttctcgattgttcataatgccggaaacagtatcccggggacatggcgggcttttgtgtctgctttaagtctgggtgctcccggatacgatgagcagaccatgacaacaaacttaacgttatttcaacgcattgtgtaa

SEQ ID NO: 32450 - DNA, 753 bp, Escherichia coli
gtggccatccgggaaaacacggacggcacctttgccatcacggcggtgcagcacgtaccggaaaaagaagccattgtggataacggagcccgctttgagccgcagtcaggcaccctgaacagcgttatcccaccggcagtacagcacctgacggtggaggtgagcgcggctgacagccagtatctggcgctggcgaaatgggacacgccgcgggtggtgaagggcgtgcgcttcagtctgcgcctgaccagtggaagcggtgagaacagccgcctgctgaccaccgccatcactgccgatacggagcaccgtttcagtggcctgcctctcggggaatacaccctgacggtcagggcgattaacagctatggccagcagggcgaacccgccaccaccacgttccggattaatgcgcctgcagcaccggccaccattgagctgacgccggggtattttcagataacggcggtaccgcgtcttgcggtgtatgacccgacggtgcagtttgagttctggttttcggaggcaaaaattgcagacgccgcacaggtggaaacctctgcccgttatctggggaccggcagtcagtggagtgtctccggtccgcacattaagcccggaaaggatttctggttttatgtgcgcagcgtcaacctggtgggtaaatctgcttttgtggaagccagtggacgggcgagcaatgatgctgcgggctatctggtgcgtattaccgtgaaggagatcggtgagtaa

SEQ ID NO: 32451 - DNA, 363 bp, Escherichia coli
atgggactgcccgggttggatggtaaaaccggaccacagggaccacaaggaccacagggaccacaagggccaaccggaaggctggtacccggggaaatttacagcatcggaacatacattattgccgcactagccccgtatacaaccgacatcggcagaacctatcagccaggagaaactgtatcgggttcacgccttaagcgatgcgccataatcaaagatgcaagcgggaactatatgaaagctaacaccgatggcattgacggcaacctatcctcagttccgggctcatggatggtgtgtaatgaaattacgtcgacaaatgacaatgaaggcatcgggctgttccagcgcgcatactga

SEQ ID NO: 32452 - DNA, 363 bp, Escherichia coli
atgggactgcccgggttggatggtaaaaccggaccacagggaccacaaggaccacagggaccacaagggccaaccggaaggctggtacccggggaaatttacagcatcggaacatacattattgccgcactagccccgtatacaaccgacatcggcagaacctatcagccaggagaaactgtatcgggttcacgccttaagcgatgcgccataatcaaagatgcaagcgggaactatatgaaagctaacaccgatggcattgacggcagactatcctcagttccggggtcatggatggtgtgtaatgaaattacgtcgacaaatgataatgaaagcatcgggctgttccagcgcgcatactga

SEQ ID NO: 32453 - DNA, 363 bp, Escherichia coli; identical to SEQ ID NO: 32451

SEQ ID NO: 32454 - DNA, 321 bp, Escherichia coli
atggaagcggcgaactacacgtttgagcacaatgggcgtaaatgggactacgggaagtcaacgcagacgcgtcttgagccgtcggtggcggcagcgaaagcggggaaactgccggagcagtttttctggacggatgcggacaataatgacgtaccgatggacgctgaaacactgattgctctgagtgctgctgcagagcaggcgatgtttaccaaaggtctggaaattcatgtcagacagcgcacgatgaaaaaagagattgaagcgctgggtgatgcggaagctatactggcgtataaggtcggcatggctgacaggtga

SEQ ID NO: 32455 - DNA, 474 bp, Escherichia coli
gtgtctttcccgtatgccggtgagtggctggcagaggacgaaatcagggccgttcttggtgcggtacgcgatgcagtatgcagtgtcagttaccaggtggcagaagatgcgcggcgtatccgtgcggcgctgaccaccaccggtcagacgttgctgacccgccagacgcgccgctttcgcctggtggtgaaggaaagcgatcacccctgctggctcgatgaagacgacgaaaacctgcccgtggtgctcgatgccatcctgaaccggggcgctcgtttttcgtcggtggaaatgtatctggtcagtgagtgtgtggagcatatcctgtccagtgggctggcctgcgatatgctgcgtataccggatgaaccgccccgccgctggtttgaccgtggtgttctgcgggaggtggtccgggaagcccggaacgaaatccgcagcatggcggatgccctggcaaaaatccggaaatga

SEQ ID NO: 32456 - DNA, 321 bp, Escherichia coli; identical to SEQ ID NO: 32454

SEQ ID NO: 32457 - DNA, 339 bp, Escherichia coli
gtggtggctgcaacgttttcactgcgtctgaagggtaaaccggtgtcctatgtggtaccgctggcgtttgtgaaaaatccggagaagacacttaccgtgaataccggtgcgctgctgacaatgtcagtcagtgtcaacgggggaacgccgccttataaacacgcctggaagaaggatggtcagccggtagagggacagactactgacactttcagtaaagccaatacgcagtcaggtgataagggggcttatacctgcgaggtaacggattctgcagaacagccgcagagcattacctctgatgcgtgtacagtaacggttaatggtgcgggcggataa

SEQ ID NO: 32458 - DNA, 222 bp, Escherichia coli; identical to SEQ ID NO: 13742

SEQ ID NO: 32459 - DNA, 282 bp, Escherichia coli
atgccaccgtccgcggtgatgtctcctggtattgaatatatggaggatggtcttcccgatccggtgaaagccatggggcggatcctggtggaaaacctctgcattgatccgaaactggcactggatgcggcctggcgtctggcgcagttcacgcaccataaaaaaggggataccgggaaaaaatcggcaaaaggtgatgccgcgaaaaaagcggctaaccgttttgcggtgccaccgccaccccgactggtggtgaataacgataatgagggcaacggatga

SEQ ID NO: 32460 - DNA, 897 bp, Escherichia coli
atgcagttgtatgccttacgtgtgttaatgagaccgcgcgatccagacctcttttcgaaaggagctgttcagaaagatatctctcattttgaaaatgctatggttgtcgctgcaaaaaatttacacatgacgtcatcaacaccttccgttcataagaaaactagttacaccctgaaattgagcataaaacctactgatggtgttatggctggagtcatatcaaagctgcaaaagattaaaggacatgataaagactttcgagagtacgatgtagacaactatccacctatcgtatggatttgggacaaagtagagcaggtgttactggttgagaggaaaaccgctgttttcaaggatgcgcaacaagttgctaaagcattcgaagatctagccaataacgactatttggctcagttaggacttagaatatttatagagccttgtcttgaaatggaagatttttggtcagaataccataggcttcaatttatcgacaaagtcagctttacgctgattactccgaatatcttcggaagcagtaagcaagcgttaaccaatgatttacggaagcttgaaaaagataccaatgcaaatactgtgaccactatttttgaaaacaaagatggcaatttgaaactcaaaggttctcattgggctgagactcttgttgactgggtcaaagatggtggcgggtcatggttgattaaaggacgtaagacactcaagtcaaaatctactacggtatccagtaatcagacagccaaaatcgtgctgatcgaaggtgagatatcagaaattgaacttgatggctactcagcaaatgatattaaagagatcatagcattacatcaaaacaggtatacgttcaaaaatgcaaaatctaactgtctggattaa

SEQ ID NO: 32461 - DNA, 465 bp, Escherichia coli
atgcaaaatctaactgtctggattaaagctatagctaccttctttttgtgcttagcattagcatcgactgataaaaccatttataccttacttgagcaggcttctgctggagtaataggttcaatacttggaggtattgccgcaggtatctccgttatcttcggaattttggctgtcattaataagggcgagaaaagcacagactttacggactatttagatagtttagaattagatttgaaattactggtcatgtgtctggcagtaacaatcttccttccctatttacgtaattatgacataccactagtaaattatcctcagcacgaatttatcccttctaaaggcaagctatttactgctttagaactttttgctatcgtgctatctcttaacctcattgcagaagtgattagctgcatgattttagtggttaaaaaaagtttcaaaattgaatcaaagtga

SEQ ID NO: 32462 - DNA, 615 bp, Escherichia coli
atggactgcatttcaaaacaaaaattcacaattattttaatagtggtgttaattgccttgggctgtgctgcttattttggagatggtgaaggatattttataggtagctttgtgcctgaatttactggagtgtgccttgagcttcttattattttaaaggtttttgaggtctggcagcaaagagatgagaaaaggaagcttattaaggttgaaagacgattaagggagtttcttattttctttctgaaccatacgtgcatggattttcctccatcctgccgtccaggtcgtttttatggaattgactatgagcaaaatcaaaaagcattagaaaaattaatcaatcatattgaagaaaaaggattagctgaaaatcttgttattcaagttcaaatgtattgtaagagtgaatgtcaaattataaataatttaatcccagtttcttctgagcttgaaaatgatcactttaaatcatgggttcggattgcctattatatgaatgccgttgctaatgggcaagaaaaggctagtgttgcaatgattaaaatacttgaaaatataaaaagatttgataaggaatctcatgataaaaaactttatgttggtgcaaattag

SEQ ID NO: 32463 - DNA, 459 bp, Escherichia coli
atgggggacgaaaagagcttagcgtacacccgctggaactgtaaatatcacatagtttttgcgccgaaataccgaagactggcgttttacggagagaagcgtagggcgataggcagtattttgagaaagctgtgtgagtggaaaagcgtacggattctggaagcagagtgctgcgcagatcatatccatatgcttgtggaaatcccacccaaaatgagcgtatccggcgttatgggatatctgaaagggaaaagcagtctgatgctttacgagcagtttggggatttgaaattcaaatacagaaacagggagttctggtgccgagggtactatgtcgatacggtgggtaagaacacggcgaagatacaggactacataaagcaccagcttgaagaggataaaatgggggagcagttatcgattccatatccgggcagcccgtttacgggccgtaagtaa

SEQ ID NO: 32464 - DNA, 885 bp, Escherichia coli
atgcatccacgttttcaaaccgcttttgcccaacttgcggataacttgcaatctgcactggaacctattctggcagacaagtacttccccgctttgttgaccggggagcaagtctcatcgctgaagagcgcaacggggctggacgaagacgcgctggcattcgcactacttccgctggcggcggcctgtgcgcgtacgccattgtcgaattttaatgttggcgcaattgcgcgcggtgtgagcggaacctggtatttcggtgccaatatggaatttattggtgcgacaatgcagcaaaccgttcatgccgaacaaagcgcgatcagccacgcctggttgagtggtgaaaaagcgcttgcatccatcaccgttaactacacgccttgtggtcactgccgtcagtttatgaatgaactgaacagcggtctggatctgcgcattcatctgccgggccgcgcgccacacgcgctgcgtgactatctgccggatgcctttgggccgaaagatctggagattaaaacgctgctgatggacgaacaggatcacggctatgcgctgacgggtgatgcgctttctcaggcagcgattgcggcggcaaaccgttcgcacatgccttacagtaagtcgccaagcggtgtcgcgctggaatgtaaagacggtcgtattttcagcggcagctacgctgaaaacgccgcattcaacccgactctgccaccgttgcagggggcgttaattctgttgaatctcaagggttatcattacccggatatccagcgcgcggttctggcagaaaaagccgatgcgccgttgattcagtgggatgccacctccgcaacgctgaaagctctcggctgtcacaatatcgaccgcgtgcttctcgcttaa

SEQ ID NO: 32465 - DNA, 579 bp, Escherichia coli
atgattacgatccctgggattgctgcacaccggaccgatgtcgaagagtacacggtagataacactacaaaatgttcggtgttccgcacgtttcagggctggacggcgctctctgatatgttatcgggtcagggattgttacatgtggtgcctatcccggaagcgatggcgtatgttttattgcgcccgctgctggatgacgtaccggacgatgaactgtgcggggttgcacctggcaaagttctgcccatttcagagaaatggcatccactactgcttaaagcgctgacttccattcccgcgataacagcaggggattccgtctggtggcactgcgatgtgattcactccgtcgcgccagtagacaatcaacagggttggggcaacgtgatgtatatccctgctgcgccaatgtgcgagaaaaatcgggcttatgcacacaaagtcaaaatggcgctggaaaaaggcgcatcacctggcgacttcccgcgggaagattatgaagcaaactgggaaggccgctttacgctggaggatctgaacattcacggtaagcgagcgttgggcatggatgtttga

SEQ ID NO: 32466 - DNA, 1467 bp, Escherichia coli
atgaccaattgtggcgctaatattaatgctttgaataatatcaaagttgtatatatgaatattgagaaaaaccatgaggttattatgggaacttatagcgtaaccaccaatccagttaaacagagtgttctgtttcaccaaaaacagcaaaatttaaataagagtattaagcgtgatcttaatgtagatttttctaacattgacgtaatgaaaaaaagtggtctgattgacaattgcagaacagtaccaacagaacccgtgaaggtaagctttagagaatcatttgtaaatatattaactcatctgctggaaatattgcatctttatcgttatgaggttaattctaaattcatcccttattttcatgttacacctgaatctcaggattcgaataataaaatatggattgctgtaacgggtttagatagttatgtcaaaattgaacaactcggtagtgacagttttaaagaaacccaattgtatcgtgaatatcataagaaaaaaaatggtaaaactgaaagtataaagcatgaggaagtcagggtattttcagggcctcacgcacaagagtttttgcagctcttatcacaacatgatcaacaggaaagagaacaactctcagaattaacagttgctgcaaatactcttaagctggaagttgctaaaaataactatgacatgaaatactcttttgataggcaaatcgaatgccgaatgatagagcttttaagggaacaaaaagatttaattccagaaaagtatttacatcaatcatctataaaaaaccttaagcttcgtgaggaagaatttagctcactccttgcagatgtagaaagacaagttctggagggaagttcatttgttttatgttgtggtgaaaaaataaacggcactataagtgaattacttcgcaaaaaaattacagattcatcacattccaccaaatctctcactctctctgaatctccttcttatgatttttatgaggaaatattcaagaaagctcttttcacacctgatgaatgtcatctggtgagagattctttagtgcaggatggtataaagccagaaaaaatagcaaaaattatttcttgtttatccagtcgtaccgggattggaaatttgttttatgcctgttcacaagcatttcatgttgctaatgataacgctgcacttgatgtgcgtcgcgccgctacgtctgttggcgatacaatagatgtttgtccgagttttgttgctttgaatggtagaaattaccatcagcatgtcgatttctcagaatacggattcacacaaaccctttgcgtcttaggagcagtcgtaaataacgcgaatgacacctttgatgttgctaattatatctataccactaaaggcgaaaatattatccataacgacgctgaaaatgatgtccgcaatctaaggagaaatatctcaggcaatattacgattgcaacctacaaataa

SEQ ID NO: 32467 - DNA, 447 bp, Escherichia coli
atggcgatcgccagcaatcttcgcggttcgggtggtggtgtaaacgccgtcagactcttcgctccagttacccgtttcatttttatctgtaccgctcacctcgaccacaccgctacccgccagcagcgaagccatccctttcaccaggtttttctgctcatccataagggtgacggacacttttatctggccacccgcggtgtatgtcacatcgtccgttttgatggtggaggtcagctgcgagatatcgccagtgataaagctcacttccacagactgactactgccattgatctcggccttgataagactgtttaccgcctggtcactggcaaggttaatgctggcaatcccgtctttatctgtcgtcacaataccgccatttggatcggcaaaaaccgccgcaccattcacgaccgtgaaggtaacattttgtccctgcagtaa

SEQ ID NO: 32468 - DNA, 2637 bp, Escherichia coli
atgagcgaccttgcgagagaaattacaccggtcaacattgaggaagagctgaagagctcctatctggattatgcgatgtcggtcattgttggccgtgcgctgccagatgtccgagatggcctgaagccggtacaccgtcgcgtactttacgccatgaacgtactaggcaatgactggaacaaagcctataaaaaatctgcccgtgtcgttggtgacgtaatcggtaaataccatccccatggtgactcggcggtttatgacacgatcgtccgtatggcgcagccattctcgctgcgttacatgctggtagacggtcagggtaacttcggttccatcgacggcgactctgcggcggcaatgcgttatacggaaatccgtctggcgaaaattgcccatgaactgatggccgatctcgaaaaagagacggtcgatttcgttgataactatgacggcacggaaaaaattcccgacgtcatgccaaccaaaattcctaacctgctggtgaacggttcttccggtatcgccgtaggtatggcaaccaacatcccgccgcacaacctgacggaagtcatcaacggttgtctggcgtatatcgatgatgaagacatcagcattgaagggctgatggaacacattcctgggccggacttcccgacggcggcaatcattaatggtcgtcgcggtattgaagaagcttaccgtaccggtcgcggcaaggtatatatccgcgcccgtgctgaagtggaagttgacgccaaaaccggacgtgaaaccattatcgtccacgaaattccgtatcaggtgaacaaagcgcgcctgatcgagaagattgcggaactggtaaaagaaaaacgcgtggaaggcatcagcgcgctgcgtgacgagtctgacaaagacggtatgcgcatcgtgattgaagtgaaacgcgatgcggtcggtgaagttgtgcttaacaacctctactcccagacccagttgcaggtttctttcggtatcaacatggtggcattgcaccatggtcagccgaagatcatgaacctgaaagacatcatcgcggcgtttgttcgtcaccgccgtgaagtggtgacccgtcgtactattttcgaactgcgtaaagctcgcgatcgtgctcatatccttgaagcattagccgtggcgctggcgaacatcgacccgatcatcgaactgatccgtcatgcgccgacgcctgcagaagcgaaaactgcgctggttgctaatccgtggcagttgggcaacgttgccgccatgctcgaacgtgcgggcgatgatgctgcgcgtccggaatggctggagccagagttcggcgtgcgtgacggtctgtactacctgaccgaacagcaagcccaggcgattctggatctgcgtttgcagaaactgaccggccttgagcacgaaaaactgctcgacgaatataaagagctgctggatcagatcgcagaactgctgcgtattcttggcagtgccgatcgtctgatggaagtgatccgcgaagagctggaactggttcgtgaacagttcggtgacaaacgtcgcactgaaatcaccgccaacagcgcagacatcaacctggaagatctgatcactcaggaagatgtggttgtgacgctctctcaccagggctacgtgaagtatcagccgctttctgaatacgaagcgcagcgtcgtggcgggaaaggcaaatctgccgcacgtattaaagaagaagactttattgaccgactgctggtggcgaacacccacgaccatattctgtgcttctccagccgtggtcgcgtctattcgatgaaagtctatcagttgccggaagccactcgtggcgcgcgcggtcgtccgattgtcaacctgctgccgctggagcaggacgaacgtatcaccgcgatcctgccggtgaccgagtttgaagaaggcgtgaaagtcttcatggcgaccgctaacggtactgttaagaaaaccgtcctcaccgaattcaaccgtctgcgtaccgccggtaaagtggcgatcaaactggttgaaggcgatgagctgatcggcgttgacctgaccagcggcgaagatgaagtaatgctgttctccgccgaaggtaaagtggtgcgctttaaagagtcttctgtccgtgcgatgggctgcaacaccaccggtgttcgcggtattcgcttaggtgaaggcgataaagtcgtctctctgatcgtgcctcgtggcgatggcgcaatcctcaccgcaacgcagaacggttatggtaaacgtaccgcagtggcggaatacccgactaagtcgcgtgcgacgaaaggggttatctccatcaaggttaccgaacgtaacggtttagtggttggcgcggtgcaggtagatgactgcgaccagatcatgatgatcaccgatgccggtacgctggtacgtactcgcgtttcggaaatcagcatcgtaggtcgtaacacccagggcgtgatcctcatccgtactgcggaagatgaaaacgtagtgggtctgcaacgtgttgctgaaccggttgacgaggaagatctggataccatcgatggcagtgccgcggaaggggacgatgaaatcgctccggaagtggaaagcgacgatgatgtcgcagacgacgctgacgagtaa

SEQ ID NO: 32469 - DNA, 1338 bp, Escherichia coli
gtgagtgatttttccgctttcgataacgcgctgcgctcgctggagtcgatcccgctggcccgcgtcgccgggcggctggtgcggcttaacggcatcctgctggagtgcgtcggctgctcgctaatgaccggacaactgtgccgcatcgaaagcgccaatcacacgctgatcgacgcgcaggccgtgggctttaaccgcgacatcacctacttaatgccgtttaaacagccggtcggactgatggcgggcgcacgcgtcttcccggaagaaaaagcccacgacatcctgattggcgaaagctggttaggccgcgtggttaacggcctcggcgaaccgctggatggcaaaggtcgcctgaacggcaacgatcttctgccgccgctgccgccgtcggtcaatcccttaacccgccgatcggtggacgaaccgctggacgtgggcgtgaaagcgatcaacggcctgctgaccatcggcaaaggccagcgcgtcggtctgatggcgggcagcggcgtcgggaaaagtgtgctgctggggatgatcacccgccagaccaaagccgatatcgtggtggtcgggctgattggcgaacgcgggcgcgaagtgaaagagtttatcgaccactcactgggcgcggacgggttggcaaagtctatcgtcgtcgtcgcgcctgccgatgaatcgccgctgatgcgcctgaaagccaccgaactgtgccactccatcgctgcctggtttcgcgaccgcgggcatcacgttttactgctggtggattccctgacccgttacgcgatggcccagcgggaaatagctctctcgctcggcgaaccgcccgccaccaaaggctatccgccgtcggcattcggcatgatccccaaactggtcgagagcgcaggcaacagcgaaagctcgggatcgatgaccgccatctacaccgtgctggcggaaggcgacgatcagcaagatccgattgtcgactgcgcccgtgcggtgctggacgggcatatcgtattaacccgcaaactggcggaagcggggctttatccggccattgatatcggccagtcgatcagccgctgcatgaatcaggtgaccagcttggaacatcagcaatccgcccgtgcgttaaagcaaaactacgccgcgtatatggagatcaaaccgctgatcccgctcggcggctacgtggcaggtgccgacgccagcgtcgacaaagcggtgaaaatgttcccggctatcgagcgatttttgcgccaggatatgcgcgaacccgccgccctggaactggtgcaaagccgcctgcaaatcctctttcctggtgtcaaaaaggcagaacagtaa

SEQ ID NO: 32470 - DNA, 2472 bp, Escherichia coli
atgccaacaccaaccattatcaaaacactagctacccaccgcgaaaaacccttcgtcagcgtcgtcacgccaacctggaaccgcagcgcattcctgccgtacctgctttatatgtaccgctatcaggactacccggcagaccgccgcgaactggtcatcctcgacgactcgccgcaaagccatcagcacatcatcgaccgtttgaccaatggcacaccggaagcctttaacatccgctatattcatcacccggaaaaactgccgctgggcaaaaaacgcaatatgctcaacgaactggcgcgcggcgaatacatcctctgcatggacgatgacgactactacccggcagataaaatctcctggaccatcgccaagatgcaaaaacaccgggcgctcatctccggctccgaccagatccccatctggtacagccacatcaatcgcatctttcaaagccgcagctttggcccacataacatcctcaacggcaccttttgctatcaccgtaactacctgaaaaagcacctttacgacgatgattgtaatttaggcgaagagaaaagtttcaccaacaatttcagcgttaacccgctacaactgcccggcgagcgcacgattctgtgtatctcgcacagtcacaacacctttgataaagattttattctcggggccagcacgccagtaaacgcgacacttacggatatcgtccgcgatccgctgctactcaatgcttatctgagtctgcataacgccactcatcatcaggcgatccaccatcaggcgatcgatcaggtcgtactgatcaatctggataaacgcccggatcgcttacagcagatccgtgaagaactggcactgctgcatattccgcctgagaaaatcacccgccttgccgcctgtgaggatgaaaacggtcaacggggccgccgcctgtcgcacttgcaggcgctgcgcctggcgcaacagcacggctggcaaaactatctgctgctggaagatgacgcggttattctcaagcaggagaaacatattcaggtgctaaacacgctgctcgcgagccttacaaaaattccctggcaggtgatgatccttggcggcgaaatttcgcagggaacgatgctaaaaagtttgccggggctggtacacgcgcgagactgccgcaaggtatgcgcttatttggtgaacagccgctactacccgcaactggcacagcagatgagcaacgatgagcactcgctggaagcctgctggcagccgctgctgcgcgccgacaaatggctggcctgttatccgagcctttgttatcagcgaccgggctttagcgatatcgagaaaaaaacgactgataatattgctcactatttcaataagttacccgtagtcaccaagccatccgcgttacccatcgccgacaccatcggcttttttatggaaacctcattccactacacgctgtatcgcccaatcatcaccgctctacaggcgcaggggcagagctgcacactggtgatcaatgaccgcgtgtttaaaccgtttcttgatgaaatgctggcgacgctaaaaagcatcgacgatccgcagcttaaaggaatgcgcttatctgaaatgcaggcacatggtcagcgggtgaaatgcctggtcagcccctaccacacgcccgcgctcaatggcctggcagcggtgaacgtccgcgccatgtacggcttagccaaagaaacgtggaatcacgccgactggaatcgtttttatcagcgcattttgtgttacagccactacagccagcaggcactggatcatttcggcagcgcaaaagtggtcggcaacccgcgctttgacgcctggcataacagcacgttcgatcgttcgttgccggaaaatatccaacccgattcccgtaaacctacggtgctctacgccccaacgtttggcgcattaagctccctgccccactgggcagaaaaattggggcgcttaagtggcgatgtgaacctgatttgcaaactgcaccacggcacctgctcgcgcccggaagaagttgcatcgctggccctggcgcgcaggcatttaaaacagcgcaccgactcagcccgccacacgctggcgctactggcaaaggccgattacgtgctgaccgataacagcggttttattttcgatgctattcacgttgataagcgggtgatcctgctcgactttccgggcatggcaacgttgctcgacggtgagaaaagttactccacgccggagagcgccgatcagcaaatccgcgaaatattgccggtggctcatgatatggcagagttgcgttacttgttgtcagaggcgtttgactggggggcggtgcaggcgcggcttacgaagattcgccatcactattgcgatgcgtttatggatggcaaagcgggagaacgggcggcgatggtgattgtggaggcgctggcggacaaggaatcgtcagggatatgtcgataa

SEQ ID NO: 32471 - DNA, 1206 bp, Escherichia coli
atgtcaggattacaagattggctgcttgataaggtcggtggtaacaactatctctatattaaacgtctttcagcaaacgacactggtgcaacaggagggcatcaagtgggggtatatatcccttctggtatcgtcgctgaacttttcccatctatagatcatacgtcagaaaaaaatccttcggttttattgcgcgcaacttattcctctcatgaatgtgtagacagtgaggttcgcgctatttactacaataataagtatttcgggcaaacaagaaatgaaaaacgcatcactcggtggggggctggcagtcccctacaggatccggaaaatacaggtgctttgtctgtgcttgcgtttgaacatgagccagggagagacagcaaaagtgttgatgtatgggtttgtgttagcccagaagaagaggatgtactggaatcagctattggggagatcattcctggaactttaatgtttgggcctgccagtgaaatacttggtgtactcgcatcaaggccaaaaatctctcaaaaggaatatgttattccggaaagctggaaacatagctttccttctggcttagagattattcaatatgctgcgggttattacccaacaggcgtaaccagtccagatgacaaacttttagaacgccgccgtattgaatatgatctctttctaatggttgaagaaattcacgtactggacatcatccgtcaagggtttggttctgtagatgattttatagctatggctaactctgttagtaatcgaagaaaatctcgagccgggaaatcactggagctacatcttgagcaaatttttattgagcatggactgcatcattttgctactcaatgtattactgaaggaaaaaagaaacccgattttctttttccatcagcggcagcttaccatgatgatcactttccaagagaaaaactccgtatgcttgctgtaaaaacaacatgtaaggatcggtggcgtcaggcactcaatgaagcaaataaaatcaacaaaatatatttgtttaccttacaagagggtgtctcagttgctcaatttaacgaaatgagagctgaaggtgtcaccttggttgtaccttcccctcttcataaaaaatatccggaggaaatcagggatggattattaacgttagagggttttatcacacagttaataacgctgtatgaagattttgtataa

SEQ ID NO: 32472 - DNA, 1425 bp, Escherichia coli
atgtctgaatttgaattgctcgtgaaagatcttcttttaaaatcagaagaagacgagaaaaagcgacaagaaaaagatcgagaattaatttcaaaggttcttgaaatctatgatcaaaaatatgttgcagaactcctacgaaaagtaggaaaaaatgaatggagcagagaaacacttaaccgttggataaatggtaagtgtaaccctaaacaattaacttctgctgaggaaactttacttcgaaagatgcttccagaacctcccgaacatcatcctaactatacatttcgttttattgatttattcgcagggattggtggtattcgtaaaggcttcgaaaatattggtgggcagtgtgtttttactagcgaatggaataaagaagcggtaagaacctacaaagctaattggtttaatgatgaactaaatcataaatttaatcttgatatacgagaagtcactttaagtgatagagatgatgtttccgaaatggaagcctataatcatatagacaaaaatattccagatcatgatgtccttctggccggttttccatgtcagccctttagtctggctggggtaagcaagaaaaattctctggggcgtgcacatggttttgaatgtgaggcacaaggaacactattttttgatgtcgctcgaattattaaatcaaaaaaaccagctatttttgtgcttgagaatgtgaagaaccttaaaagtcatgataaaggtaagacttttaaagtcatcatggaaacactcaatgaattagggtatgaagtcgccgatgctggtgtgactggctcagatgatcctaaaattatagatggaaaacattttttaccccaacatcgtgagcgtatagtgttggtaggatttcgtagggatctaaatattcacaaggatttcacgttacgaaatattaaccgcttttaccctcaaaacaggccaacatttggtgaattattagatcatgatgttgacgacaaatatattttgactccaaggttatgggaatatctttacaattatgcaaaaaaacatgcagcaaaaggaaatggatttggttttggtttagtggatcctaaaaatccagatagtatcgcacgaacgctgtctgctcgttaccataaagatggctctgaaatactgatcgatcgtggctgggataaggctgtcggtgaaatcgattttagtaatccagcgaatcaagagaatcgaccaagaagactgacacctcatgaatgtgccaggttaatgggttttgaaaaaccagggggaagaccttttagaatacctgtatcagatactcaagcttatagacaatttgggaactcagttgttgtgccagtatttgaagctgtagcaagattactagaaccgtacatacaaaaggctgtcagcatgcaagttattaacgattaa

SEQ ID NO: 32473 - DNA, 249 bp, Escherichia coli
atgaaacctgcatataaaccagtgctatgtgtcgtttccagccatccgattaaaggcgcatccggtgtaccaaccggttttttcctggccgagctgactcatccgctgaaagtactggaagatgccggaataaaaacaacaatagccagtattcgcggggggcagccaccggtggatggatttgacctcagcgaccctgttaacgcctggtactggaacgaaaccgaggaccatgtgggatttccgtga

SEQ ID NO: 32474 - DNA, 291 bp, Escherichia coli
atgaatgcggggaataacgtgaaggttgcagcggatgctttccttgaaattcttttctctcttaagaataaatattgtattaaactattaaacgctcaagaacgggcgtttatatacgagtttgcaagaatgatttttgcatatattaatgacaaaaacattgagatcttattacttacttgttttgccgaggtcgatcaaaaagcaatccagaggtatgttcctcagccacaagatgcggaaaaattttggaataatttacagtataagttgactctttccgctcattaa

SEQ ID NO: 32475 - DNA, 507 bp, Escherichia coli
gtgcaatgtttagccattgtgttcaccgcacctggactttggcttacgcatcgggtatctcaatcaacaaaaagagtttttcgtttctgctatttcttctctgtaatttttacactgttttccaattgcttgatgctgacctgcggggtcggcaacttaatacaaccattttggtggtttcaacgaaatggtcagatgcagcttgattactggcttcgcacgcttgagtcgcgcgggccagtaccttttgaaaattgcgccagtcccgataatccagtaacggtgccaattctctcgctgaccaaaattcttgcccttcagtgccataatgccgtatttcttcaaaaggttgatgatgttcgttcattgcccactccatgtgatatcgattgcaaggaaagtaagtttacaactgtgtttatatacagttgtgagtatctcaccttctcactgcgctgggcaaaaaaacatcgcaaaatctggagcaggcacgcaaaacagaattga

SEQ ID NO: 32476 - DNA, 216 bp, Escherichia coli
atgtctggaataatccgggctttgtgtcaccgggcgcatcaaagcagtaccacccgggatgtggcgctggatcgtcatttaccggactgcgaagacatacttaaagaggtgatatgggcgttcagtgattttgtccgcgatcatcgaggtgtgtatgatccggaagcccgttacctcgccggtaatccctggtatcccgtaacaggccagttctga

SEQ ID NO: 32477 - DNA, 234 bp, Escherichia coli
atggcaaggtccgattacgattttatcaatttgtctctgggacatgaattgaatgagtggctggcagagagaggttatgccggacaggcggataacagaagccggctggctgaagtggttacctgcaaattgcaggatagcttttatgtgaacgtctcttgggatgcgctgaacaccgcatatagtgaacaccatgagtggttttcagagcttacctccggggatgaggattaa

SEQ ID NO: 32478 - DNA, 246 bp, Escherichia coli
atgaagtgtcaatctctccttatgcgttttttagtgactgtacttatatggtttattgccatatttatcatgtcggtaatgatgtttttcttcatcagagtgtttgcattttattggattggtggcgattttttattctcatatattgatgttatgaaatctttaaaaatagcagtgtattgctctctgctatgtagcatagggagttggggcttatatcgaagtaataaaaaaaacaatagataa

SEQ ID NO: 32479 - DNA, 198 bp, Escherichia coli
atggatggtaagccagttcctaaagagaatggaggatattgggatcatatgcaggaaatgcaaaatacgctcagaggattaagaaatcatgcggatacgttgaaaaacgtcaacaatcctgaagctcaggctgcgtatggcagagcaacagatgctattaataaaatagaatcagccttgaaaggatatggaatatga

SEQ ID NO: 32480 - DNA, 483 bp, Escherichia coli
atgcagcagaaaacgcatcgcgcccctgaggccggagaacggggtgaagccccgaacgccgcccttccgggggctgaaaccgtgcaggcaccgacgaacagagaaagtccgtcgtcaacagtgtggctgatggaagccatttgtgaaccagtcaatctcaggcaagccctgaaaagagttaaagccaacaaaggtgcagcgggagtcgatggtatgcgcgtaagcgaactgccggactacctgaggcaccactggccagagctgaaagcgcaactactgtctggcagataccgcccatctcctgtgagaagagtgtccataccgaagcccggcggcggcgaacgtctgctggacatcccgacggtggtggatcgcttcatccagcaggcgatgatgcaggtattgcaggggcactgtgggatagctcgttcagcgataacagctacgggttccgtcccggtcgttcggcccaccaggcagtga

SEQ ID NO: 32481 - DNA, 813 bp, Escherichia coli
gtgatacaggcccgggaacatatcggggccgggtatcactgggtggtcgacctcgatctggagaagttcttcgaccgggtaaatcacgatgtgctgatgagccggatagagaaacgagtatcggataaacgggtgttgtcacttatccgcaggttcatgaatgcaggggtgatggacgcaggtctggtaaggccggtgacagaaggaacgccgcagggcggcccactgtcgccgctgctatcgaacctgctgcttgacgacctcgacaaggaactggagaaacgtggtctgaagttcgtgcggtacgcagacgactgtaatgtctacgtgaaaagcgaacgggcagacaaccggatcatggcggggttgacgcactggctgagccataaactgaagctgaaggtcaacgcgaagaagagtgctgtagcacgccctgaaacgcgcaagttccctggatacagcttcataagggggcggaaggtatggtgcgtggtatcgccggagtcgataaaacggttcaaaatgcggataagagcactgaccggacgcaacacagggagaagccttgaacagctaacccggttgctaaaacgatatctgacgggctggaaaagttactacgggctgaaccagaggccatcgctgatgcgagagctgaacggatggataaggcgcagtcgaggcgtaagcaaggaccttgcggcgcaaacagcaggaagctgccataaagagtggcggataagctgtagtccggcactgaatatagcactccccaataatctgttctccagactgggtctgccagaagtatag

SEQ ID NO: 32482 - DNA, 537 bp, Escherichia coli
atgtcatttattaaaactttttccgggaagcatttttattatgacaagataaataaagacgacatcgatattaacgatatcgcggtttccctttcaaatatctgtcgctttgccggtcatctttcgcacttctacagcgtcgcccaacatgcggttctttgcagccagctggtgccgcaggaatttgcttttgaagcgttaatgcatgatgcaacagaagcgtattgccaggacattcccgcaccactgaaacgccttcttcctgactataaacggatggaagaaaaaatagacgccgtaatccgtgaggaatacgggttacccccagttatgagtacacccgtgaaatatgccgatctcatcatgctggcaaccgaacgccgcgatctcgggcttgatgatggctctttctggcctgtactggaaggcatcccggcaacagagatgttcaacgtgattccactggcaccgggtcatgcctacgggatgtttatggaacgttttaacgatttatcggagttacgcaaatgcgcatga

SEQ ID NO: 32483 - DNA, 330 bp, Escherichia coli
atggttaatcccttcatatttcaagccacagatgcaatgacccgaattattttgggatacatactttattactgggtactggtggtcgtggttgttgtggtcccggtattagaaccatcaccgccaccggttgccgcgagcgcgacacccaccgccgagcttacggtgctgacgctggtcgcggaggaactccccgccgaaaccgacgttgctgccgaccctgccgcttcgcccacctgtacaggtgcagcccacgcagaagtcgccgcaagcgcagatatggcaaaaatgccatacagaacttttttcataacaatttcccttcattga

SEQ ID NO: 32484 - DNA, 285 bp, Escherichia coli
atgtcccctgtttcatcaattggtaatgatattagtagtgatttagtccgtcgaaaaatgaatgatcttcctgaaagccccatagttaataacctcgaagcactagcaccaggtatagaaaaactaaaacagacctctattgaaatggtcactttacttaacgcgctacaaccaggtgggaaatgcattatcactggtgattttcaaaaagaattagcgtacttacaaaatgtaattcctgtctcttatacacatctgacgctgccgacgatatgcagtgtgtag

SEQ ID NO: 32485 - DNA, 651 bp, Escherichia coli
atgccaaatacatctattcacttatctcgctgtaatattttacaaaataataaattgcaaccagcagaaatttacaaagaatcacaacaaaccgcgaaacttgagtttttttgcgatgagtttctaaaaatatctcaaagtagatacgggttatcaacttcagcagacagcatagctaatttattggcttttttcacgaaagcctcagatgcaattgatagtatcaagacccaaaaaattgacgttcacagttatggtttcgtaccaataagacattttgtcgaacatgtcataacgtataaaaatgaatttgcagcggattatgaaccctatacccttacctttacccgaggtgaaaacaacgaaggtattttgagtgtcgaaagcaaagaagggtttatttcacaaagaacaataaacttaaatgaatatgaaactgcaattaacatcatcaatgaacatgtgaggaaagtattaaaagtcaactttacagcgatcaaaaaaaatatacagacctgctactacattctgagaaaaatacagaatggtacaaatacgcatcctccgtggaacgctatgataaattcaagaattcttctaaggaaattaaaaatacctacaagcaaattgtacaagcgcagaaaaaattga

SEQ ID NO: 32486 - DNA, 1140 bp, Escherichia coli
atgactgataaacaaactgttaaatttggtgatatttgtcgtgaagtaaagctcactactaaagacccgatagcagaaggctatgagcgttatattggtttagaacacttggattcaggttcgttaaagattaaacgctggggaatgattgctgacgataaccccagttttacacgtgtctttagaaagggacagattttattaggaaagcgtcgtccctatcttaaaaaggctgccattgctgagttcgatggaatttgttctggtgacattattgtaatggaagcaaatgaaagtaacgataaccctgattttttagaagtgattattcaatctcaaggattctgggattgggcaattcaaacatcctcagggtcattgtcacctagaacaaaattcaagtctatttctgaatattcatttgtattgcctgagaagagcaagattttaaggctcataaaattaaaagatcaacttgaaaaaagcagggagcttaaacagaaattagttaattcttacgaaaatgtgttggatctcacagtaaatgaactaatggccaacttagacggaaaattagttccattatcaacaatagctagaatcgagtatggtataagcaatccgattgataagtcactaaaagaaggcgttagaatggtaactttaccttgtgttgaatcaaggtgctatctttctataacagaagaaaaaattgcttatgtccggcaatctgatgtaaagaatgacgattatcttaaatcaggagatattctatttaattggagaaatggtagcctagatcatattgggaagtctgttttaatatccgaaaatatggaatacactcatgtcgggttcttattaagaattcgtttgataaaaagtgatatagaaatgtcaaggtttattttcttttatttgtattggcttaagattaataattacttccgtggttcaaaaggtcaggtaaataaaacctttaataaaggtgagctatcaaatcttatgatgcctattattgaaagggaaaaaatggttggaataactaaatcactaagtgatttgttttctattagagacaatttagaagagtatggcatgcgggcacaaaacttgaaatttactgctttaaggttctaa

SEQ ID NO: 32487 - DNA, 609 bp, Escherichia coli
atgctttacaaaggcgacaccctgtaccttgactggctggaagatggcattgccgaactggtatttgatgccccaggttcagttaataaactcgacactgcgaccgtcgccagcctcggcgaggccatcggcgtgctggaacagcaatcagatctaaaagggctgctgctacgttcgaacaaagcagcctttatcgtcggtgctgatatcaccgaatttttgtccctgttcctcgttcctgaagaacagttaagtcagtggctgcactttgccaatagcgtgtttaatcgcctggaagatctgccggtgccgaccattgccgccgtcaacggctatgcgctgggcggtggctgcgaatgcgtgctggcgaccgattatcgtctggcgacgccggatctgcgcatcggtctgccggaaaccaaactgggcatcatgccgggctttggcggttctgtacgtatgccacgtatgctgggcgctgacagtgcgctggagatcattgccgccggtaaagatgtcggcgcggatcaggcgctgaaaatcggtctggtggatggtgtagtcaaagcagaaaaactggttgaaggggcgatggcgattttacgctag

SEQ ID NO: 32488 - DNA, 684 bp, Escherichia coli
atgctaaaaaatgatgtttgtaattttattttcagctcttctgcaactgtatatggagagccagataatataccgctaaacgaatcttcgcgagtcggtaatacaacaaatccttatggaacatcgaagctaatggttgaaaaaatactacaagatatctcatgctctaaccaaaaatttcgtacgactatattaagatattttaatccagtgggagctcacaaatccggtgagattggggaagatcctaatggtacaccaaataatttgatgccttacatatgtcaagtcgccattggtaagcgaaaggaattatttatttatggtaatgattataaaacaaaagatgggacagggattcgtgatttcatacatgtaatggatcttgcagaggggcatattgctgctttgaaaaaatgtgataatggaagcaactataaaatttttaatttaggtacaggaaaaggatattccgtactcgatcttatttcagcttttgagcgtgttacatctgttaccataccatatgtcataacatcaagacgtccaggtgacattgctgagtgttggtcagaccccaaaaaagccttcttagaattaggttggaaggcgatgtataacttggacgatatggtaagagatgcatggaattggcagaaaaaaaatcctaatggttataaataa

SEQ ID NO: 32489 - DNA, 348 bp, Escherichia coli
atggtggttctggtggtggccccggaggagcaggttcattcagagatacagctaacggaaaagcggtatcagcagttgggcctggaggtggcggtgctggattatgtcctaattcatcaacgggtcagtcgggtgccggagcagatggcgcagtttatatttactggtgaggttcatatgtgggcaagaattgaagaaaataaagtagaagagataacggaaattaatcctgaaggaagattccatccatcattaatatggaaagaatgccctgctgacacacagcagggggatttatatattgatggtgagtttattgcgcagtctccggcagttcaggccagatga

SEQ ID NO: 32490 - DNA, 717 bp, Escherichia coli
atgaaagtgttcataagttggtctgggcaaagaagtcaagctgttgcagaacttattagcgactggctgaagtgtgttatccaagcttcgcagccatggatttcaaccagagatattgatcgtggcgctatatggttctctgaaattaatgataaattaaaagatgtatctgtcggcattgtatgtttgacacaagaaaataaaaataaaccatggattttgtttgaaacaggagcactagcaaaaggactttcaacaaataaagtttgtacattcttgattgacttaaaaccagaagatttaaaagatccacttgctcaattcaatcacacaacgccaaataaagagagtgtttgggaattagtaaggacaataaacaattgtcttgtcgataaatctttagatgaccgtattctaaagcaagtttttaatacatactgggagcaatttgaaaacaattttaaacgagctttagatcaataccctccaactgaagaagtaaaaccacgtactgaacaagatcttttatctgaaatattacaaaacactcgttcattaaatcaaaggattagagttcttgaacgtgatgctactatcaactccataaatagccatatgaatttaactcctgtagaacagaaggatgtttggtatctacaaaaacagatagatgaaattataaagaatggattgcttctgtctcttatacacatctga

SEQ ID NO: 32491 - DNA, 198 bp, Escherichia coli
ttgtttcctccggataaccggatccgcgatctggacaactataacaaggcgctgtttgacgccctgacccacgcgggtgtgtgggaagacgacagccaggtgaaaagaatgctggtggagtggggaccggttatcccggaagggaaggtcgagatcactatcagtaagtacgagaaaccggcgggtgcagccgcctga

SEQ ID NO: 32492 - DNA, 6441 bp, Escherichia coli
atggtagtcgttcaggcacctacgctaagccagaaagattcctcggtatcgttaagtacccagacgttgagcgcggattcccattcaaccgccacactgacttttattgctcatgatgcagctggtaatcctgttatcgggctggtgctctcgacgcgtcacgaaggtgttcaggacatcaccctgtctgactggaaagataatggtgacggaagctatacccaagtcctgaccacaggagcgatgtctggcacgctaacgctgatgccacagctgaacggtgtggatgcggctaaagcccccgccgtggtgaatatcatttctgtttcgtcatcgcgaactcactcgtcaattaagattgataaggaccgttatctctccggcaatcctatcgaggtgacggtagaactgagagatgaaaatgacaaacctgttaaggaacaaaaacagcaacttaataccgcagtcagcatcgacaacgtgaaaccaggagtcactactgactggaaagaaaccgcagatggcgtctataaggcaacctataccgcctataccaaaggcagtggacttactgcgaagctgttaatgcaaaactggaatgaagatttgcataccgctggatttatcatcgacgccaacccgcagtcagcgaaaattgcgacattatctgccagcaataatggtgtgctcgccaatgagaatgcagcaaataccgtctcggtcaatgtcgctgatgaaggaagcaacccaatcaatgatcataccgtcacgtttgcggtattaaacggatcggcaacttcctttaataatcaaaacaccgcaaaaacggatgttaatggtctggcgacttttgatctgaaaagtagtaagcaggaagacaacacggttgaagtcacccttgaaaatggcgtgaaacaaacattaatcgtcagttttgtcggtgactcgagtaccgcgcaggttgatctgcagaagtcgaaaaatgaagtggtcgctgacggcaatgacagcgccaccatgaccgcgacagtccgggatgcaaaaggcaacctgctcaatgacgtcaaggtcaccttcaatgttaattcagcagcagcgaaactgagccaaaccgaagtgaatagccacgacgggatcgccacagctacgctgaccagtttaaaaaacggtgattatagggttacggcctctgtgagctctggttcccaggccaatcaacaggtgaattttatcggtgatcaaagtactgctgccctgaccctcagtgtgccttcaggtgatatcaccgtcaccaacacagctccgcaacatatgactgcaaccttgcaggataaaaatggcaacccactaaaagataaagaaatcaccttcactgtgccaaacgacgtcgcaagtcggttctcgattagcaacggcggaaaaggcatgacggatagtaacggggttgcaatcgcctccctgaccggcacgttagcgggcacgcatatgatcacggctcgtctggctaacagcaatgtcagcgatacacagccaatgacgtttgtggcggataaagacagcgcagttgtcgttctgcaaacatcgaaagcggaaatcattgggaatggcgtggatgagacgacgctgacagcaacagtaaaagatccttttgataacgtagtaaaagatctaccggtcaccttcagtactaacccggctgatactcaacttagtcagagcacgagcaatactaacgacagtggtgttgctgaagttacccttaagggcacggttttgggtgttcatacagccgaagccatactgcttaacggcaatagagatacgaagacagtcaatattgcgcccgacaccagcaacgcgcaggtcaccctgaacatccctgctcaacaggtggtgacgaataacagcgacagcgtgcagctgacggcaacggtgaaagatccgtcgaatcatcctgtggcgggaataacggtgaacttcaccatgccacaggacgttgcggcaaactttacccttgaaaataacggcattgccattacccaggccaatggggaagcgcatgtcacgctcaaaggtaaaaaagcgggcacgcatacggttaccgcaacgctgggtaacaataatgccagcgatgcgcagccagtcacattcgtggcggataaggacaacgcgattgtcgtcctccaaacatcgaaagcggaaatcattgggaatggcgtggatgagacaacgctgacagcaacagtgaaagatccttttgataacgtagtaaaagatctaccggtcaccttcagtaccgacccggctgatactcaacttagtcagagcacgagcaatactaacgacagtggtgttgctgaagttacccttaagggcacggttttgggtgttcatacagccgaagccacactgcctaacggcaacaacgatacgaagacagtcaatattgcgcccgatgccagcaacgcgcaggtcacgctgaatatccctgctcaacaggtggtgacgaataacagtgacagcgtgcagctgacggcaacggtgaaagatccgtcgaatcatccagtggcgggaataacggtgaacttcaccatgccacaggacgttgcggcaaactttacccttgaaaataacggcattgccattacccaggccaatggggaagcgcatgtcacgctcaaaggtaaaaaagcgggcacgcatacggttaccgcaacgctgggtaataacaataccagtgattcgcagccggtaacgtttgtggcggacaaaacctcggctcaggttgtcctgcagatgtcaaaagatgagatcacaggtaatggcgtcgataacgcaacgctaactgcaacggttaaagatcagttcgacaatgaggtgaacaatcttccggtaacattcagctcagcctcttcaggactcaccctgaccccgggagtgagtaataccaatgagtctggcatcgcgcaggcctctctcgcaggcgttgcctttggtgagcagacggtcactgcatcactggctaataatggtgccagcgacaacaaaactgtgcattttattggcgacacagcggcggcaaaaattatcgagttgacggctgtgccagaccgcataatcgccggtaccccgcagaacagctccggcagcgtcatcaccgccacaatcgttgataataatggctttccggtaaaaggtgtgactgtgagctttaccagcagaacaaaatctgccgaaatgacgaacggcggccaagccgtgacgaacgaacagggtaaagctaccgtcacttataccaatacccgctcctcgagagaaacaggagcgagaccggataccattgaagctagcctggaaaatggtagctccacgcttagcacgtccattcaagtcgacgctgatgcgtctacggcacatctcacctcgctttataccctttatgacacacaattggcaggcgaggataccgctctgtacattacggtgaatgataattacggcaatggtgtacccctgcatcaggtaaccctcagcgtttcgccgagtgaaggcgtgaccctcagtaataacggtataaatactaccaaccacgacggctatttatacgcaagcatgaccgctacaaaagccggggtttatcaagtgacggcaaccctcgacaatggcgattcgatgcaacacacagtgacctatgtgccgaacgtcgcgaatgctgaaatcacgctggcagcctcgaaggatccggtgattgccgacaataacgatctcacgacactaacagcaacagtcgctgatacagagggcaatgcgatagccaacactgaggtaacatttactctgccggaagatgtgagggcgaacttcacgctgagcgatggcggtaaagcgattactgatactgaaggcaaagcgaaagtcacgctgaaaggtacaaaagcaggcgctcatactgttacagcatcgatggctggcggtaagagcggacaactggtggtgaactttactgcggatacgctcactgcgcaggttaatcttaacgttaccgaggacaactttatcgccaataacgttgggatgaccacacttcaggcaacagtgactgatggaaacggcaacccgttagccaatgaggcggtgacattcacgctaccggcagatgtgagcgcaagcttcactctcggacaaggcggttccgccattacagacatcaacggcaaggctgaagttacactgagcggtacaaaatccggcacctaccccgtgacagttagcgtgaacaattatggtgtcagtgatacgaaacaggtgacgttgattgccgatgctggtaccgcaaaactggctggttttaccgcatcatcaagctcattcaccgcgagcacaaccgagggcgcgaccctgacggcaagcgtcactgacgcttacggcaacccgctagaaggcatcatggtcaatttccgcggcagcgccacgctgagtaacaccagcgtcgaaacggatgctcagggtaaggcagaagttcttgtgaccagcaccattgcaggaacgaaagtaattacagctaatctggcaaatgcacctaccgaagccgccatgcgaacgctgactgtcaaagcagatattgattctgcgacgatcaccagtctggagatgcctgaaggtcaggtaataatcagagaacccatagcggttaaagcacacgtcgacgaccagtttggcaatccagttgctgaccaacttgtgacattcagtgcagagccatcaagttttaacatggtcattagtcaggatacggtttctacgaataggcagggtatagctgaggtcaccatgacgcctggaagatacggttcgtatactgtgaaagcatccctggcgaatggatcctcttatgagaaggatctggtggtaatcgatctaagactaacactcacggcatcaagtcaacttatcggcgtcaatgacccatcgggagcaactctgactgtaaggttaactcatgcaaacggggctccattgagccatgaactcgttacctttagcgtaacgcccgaaggtgcaacgttaagtaaccaaacggcgacaaccaacacttcaggtgaggcacaagtcgttctgaccagcaataaagtcggtacatatgtggtgacagcatcgatccatagcggcgtaattattcagacacagacaaccgtgaaggttactggcaacccaagcacagcacatgttgctagttttatcgctgatccgtcgactctcacggccaacaacagtgatatcagcacgttaaaggctactgttgaagatagcagtgggaacctggtcgaaggtgtcaatgtgaacttcgcattaaaaagaggctttgcctttgccacattaacgtcattaacagcggtgaccgatcaaaacggagtcgcgacaacgagcgtaagaggtgcgataacggggagcgtcacggtaagcgcagaaacgagctatggtggggcgcaaacagtagatataacgctggtggcaggcccggcagacgcctcgcagtccgtccttaaaaacaaccggtcatcactgaaaggggactttaccgaaagtgctgaactatatcttgttttacacgatctatcaggtcatccgatcaatgtttctgaagggctggaatttgtgcaatcaggtaccaatgtgccctatgtgcaaatcagcacaattgattacactcaaaatttatacggtgagtataaagccactgttacaggcggcggagagggtatcgcaacgctgatccccgtgttgaatggtgttcaccaggcgggtctgagtaccacgatagaattcattagcgcgggaaccagaccaatgaccggtacagtatcagtgaatggtgcaaacctacctgcagcttcattcccttcgcagggatttaccggggcgtattatcagttgaataatgacaactttgcaccaggaaaaacggcggctgattatgcgttttcaagctctgcctcctgggtaggcgttgatgctactggtaaagtgacattcaaaaatgacggtgatagcaatactgtaataattacagcgaccccaagatccggtggcgctatttaccaaacgcaagtacgggtgaaaggctggtggaaagataacaataatattatcttaccattaagtcgtgctgaaaattattgtaataacgagatcggcaacggttacgctattcctggcgtgaatcttttaagcagtggagaaaaccgacgcgaaatagggtcactgttcggtgagtggggagatatgggacattatatggacgctgatttttattcagaaatatattggtcttctaataccgcaggtggaggccgacaatacattgtttccctggaaaacggggcgcatggttctgttcaaacatctgaatattttcatgtagcatgctataaaaacatctaa

SEQ ID NO: 32493 - DNA, 4290 bp, Escherichia coli
atgccaaaaggagtagggcaaatcattagcgttctggctattttattaatggggggaacttatgttccgattgatgtactacaaccagaagaacgtataaaccgcattgctaaaaatgctcagctttcattactcatcgtatctgatagcgatccatcctattcaatctatgctacattttgtaacaggattgtttggcaaaaagttcaaccctccgagaataaaccactacacaatatagatatatctcctcatcaagcagcttatgttatttatacttcaggttctactggagagcctaaaggtgttgttgtatcccatgccagcgcaatgaatacctgccttgatctcaatcggcgatataacatttcagacaaagatcgggtacttgccatatcagcactacattttgatctgtctgtttatgatattttcggtgttttaaatgccggagggactcttgtattagttaaagaagatgagcgccgtaatcctgatgcatggttacgacttattaaccaacataaaataacactttggaacagcgtacctgcactgtttgatatgttactaacctatgcagaaggaatagggtcatccattccacaatcgctgctattaatctatctctctggagattggattgggcttgatctcccgacacgttactataatttctgccctgatggacaaatagtcgccatgggaggtgccacagaagccgctatttggtctaactattttaatgtcacaacattagacccatcctggagctcgataccttatggatatcctttatccaaccaacgttatcgtattgttaatgctagaggagaagattgccctgattgggtatcaggagaactttggattggtggtgcaggcgttgcgttaggctacctaaacgatcccgaaaaaacagcacaacagtttgtaaaacaaaatggtgaaaattggtataaaacaggtgatatgggaagatatctccctggcggtatacttgaatttttaggaagacgtgaccgccaagttaagattggcggataccgtatagaaccaggggaaattgatgctgcattcaataagcttcagggtgtgcaaaatgcgattacactatgccttggtaatggtaataaagaaaaagcattacactcttttgtgatactaaattcgggtaattaccaggatattatcagttcaaatagcaccttttctcccctctactatctgcgctcaaccccaataaatgtacaacaacaatcccaagaaacggcaatcatagctggatttttatatgattatcttactgaacaaaatattgatttcgacaacctcttgtcagaaaaaaaatcagcagatgaccatagcattatcgctagctatcagtcattaatggctaattggctaaatttaatagcacaatatccacaaactacactcaattcccccccaactaatagtacccagcgaacgctaatagaaaatttgcagcgccacaaaaacaatttaacagacatactcaaaggtaaaaaatcagctctaacactatttgatgatccctattggtcaccagaacaagtcactatgcgtattgatggaatgcactactccttagaaaatttactacaacaaataagagaacttcatcattcactaaaaaggccaataaaaatcattcaattaggtgctagaagcggtatttcagcaaattatattctgcaacgattacccactaatatggttaccctactgctaactgatgagtctctttcaatggtaacgcaagctaaccaaaatttatcagattatcaaaatagttatgctgagcctcttacagaagtatttcttcataaaaatcgatatagtgcagatatcatttggatgaacaattatcttcatcgattagacagcccacaaaaagagatacaaaaattcgtttcactctgtgctccgagtggaatgatttttatacaagaagtgttacatgcccctgcacaatcactgataagcatctctttattacaacaaaatggtagtgatcctgctgatgaattattaacagcaaaaaaatgcaaagatatctttagcgcttctactgcgacttataaaagtgaaggagttaacggcgaaatattgacacagttataccaagcaccagaaaaaatttatttaccagataaaaataagctagagcatgatttgcgccaatttttaccagactatatgatcccaaaacatatttattttctaactgagttccccttaaccgcaaatggcaaaatagataaccaatcattaaaattgtattgtcaggaataccaagaagaatacctaaatcaacaacctatcaatggtaaagaacagatcatcataacaatatggcaaaagctccttggcaccaacaagatacaccgtcacagtcatttctttcgtgaagggggagatagcctagttgctattcgattgatctctgatttaaaccatattggctaccaagttgaactggagcatatctttgcttatccgatcctttctgattttgcacaaaatataaagcagagcgaagttttcgaaaaacagccagcaatttcacataacgaggcgtatagatacaatccatttccactcactgatattcagcaagcttacttagttggacggcaaaataattttacacttgggggtgttggtacacatttttttgtccattttatagcggaaaatttagatgtacctaaattagaacgtacaattaatcagttgatttctcgtcatgatatgttacgtggtgtcattattaatggacaacaacaagtacttaaaaaagttccttattattccgttaaaacgcattatatccctacagaaaaaagtgacgcttttctagtattacgagctcaacttgctaacattgtttatgatccagaaatttggcctttatttactattcaagttatcaagaccaaagaacaaccagatcatatttttattagccttgataacttattccttgatggaatgagtatgcagatatttttcagtgagctaaaaacactgtatatggagccaaatcaccaatttatccctctagatattacttttcgagattatattgattgtgatgcctatccgattaacacacaaaatgattgggaatattggttaacgcgtttaccacaattaccaccagccccacaattgccactaataaaagatccagcacagattgtgcaacctcgcttctcgcgtttacaaacatcattatctacttctgtttggcaagcactacaacaagttgctcagcaaaataatgttacgccagcagcacttttgattgctgcttattgcgccacattatccgcatggagtaaaagccctgagttaacaattaatttgacattatttaatcggcatcctgtacatcctcaaataaatgaagtacttggtgattttacctcattacaattactcgattggtatacctgtgatctttggtcaaacagtatctcaatgatgcaaaaacgtttacataaagatatgcaacatcgtagtgtttcagccattaaagtaatgcgtgaaatggcaattcaacgacagatgtctcatatagagatacctgtcgtttttacctgtgcattgggctataaacatgatgaaggttttctttctcatcattcatggctaaaacctgtttggggaatatcacaaacaccacaaacatggctagatcatcaagtatatgagtcagacggtgaattatatttaaactgggattttgtcgaacaattatttgactacacaaccattttttccatgttccagcaatatgaacatatactcactaaactggctactgaaccacaatcttggcaattgccactaaataaacttataccaagatgcaataatctcgtcatcaccccagttttcaatgccaaaaataatcaaaacacacattataaacaatctactgatacacaaaaaacaggtcagacaatacaaaaactacaacaacttgttaagcaagttattggaataacgttagcacctgaaacaaattttttcgaagcaggtgccagctctttacaattggttcaacttcatgcagcactacaaaaaaatggctatagccatattacaattactgatctgttcgctagtccaaatctaagtacattagcgcaattgctttggcaaaacacttcaccaacatgtgagcaatattccgaccgagacaaacacaaaaacaagagaaagaaacggttacaactacgaactcatagtagataa

SEQ ID NO: 32494 - DNA, 501 bp, Escherichia coli
gtgcgcggcactgaatgcccccgcagtagcgttccacagcagagagtcatcaccgagactgtcaacagcgtcagtcaggttggtgatgttggtggtgttcgtggcgatattggtggtgttggctgccacggcatcgttagtggttttgagctgagagccgtttaccgcgtcagtgctgccagccgtcaggtcaccgtctttgacgttggtgattttgctggtggcatcggtaccgtgagcggcgctgaatgcggtgccattccacagcagggcatcgtctttaaggtcgccaacggaatcagtcaggttggtgatattggtggtgttggtcgctacgttatcgttggtggttttcagctgagagccgttaatggcgtctttactggtagccgaaatatcgccatcttttacattgatgattttgttttctgctacggtactggcaatcgttccatcagcatttttaacaatataactggcgctgaaagcccctttagctga

SEQ ID NO: 32495 - DNA, 642 bp, Escherichia coli
atggcttctttactgtctgttgagatttcacctgccgccatattgacgatgcgacgctgtgctgaccctgagccgaccgacacaacgttgtcttcatctgcagtagagcttgcaccaatcgcgacggaattattccctcctgcagaagatgaacttcccaatgcaagactgtttgatccaaccgcagaacttcctgtaccgatcgcaatagcatttgcggttgatgcgctgctgttctggcctaatgcaatggtgtttgtgtttgatgcttgcgcattttgccccaaggcaagagcacttgcgccagcagccgctgctgtatatcccagggcaacagaaccttcacctgttgaatcactgtttgcacctaatgcaagactgtttttgcctcgagctttcgctttagtacctacagccgtcgcattttcagcggcttcgctttcagcaccaatcgtaatggcgttcgctgcactggcaagtgattgtctacctaatgcgaggctgtctacgccagcagcagcactgttgcggcctactgcaatcgcgttagccgcagatgcggcgctacttgcacccagcgccattgaatattcttttgacgcattggcattatcaccgagggcgatgctcataatttcgtaa

SEQ ID NO: 32496 - DNA, 222 bp, Escherichia coli
atgagtctggctctttccgtatcactagaattgccagtattgttagggatgatgcccatatcatacggagggagccagtgggggcgattgcgcgtggaaagtgctttggatttattcatcggttttatgattctacataaggagcaaaggtacttgtatcgtatgaaaaaaaatagtatagatataatgctccttacgcgttatggcatagttatatgctag

SEQ ID NO: 32497 - DNA, 351 bp, Escherichia coli
atgttgactgaaaatgagtatcgtgaaacagctgacgcatcggagatgcaagcgttaagtggtttatgggcttacagtattccagatcatgttgatagcgcagtattcagttttgatgaaaggaaaaaactctttttctggatatttgagcgccttctgaaagaagggcgcatcaaactcgccaagcacggtaagtttctggaaggcagtgttgacgagcaggttgagcgtttccgacaggcatttccaaaaacagaagaagagatggaagacggtatctggttttttgatgagagctgtccgggaggagctgtctgggtgcttgaagatggctctctcgaatggacctga

SEQ ID NO: 32498 - DNA, 198 bp, Escherichia coli
atggacctgataaacccgttcatagtgcaggatgcggtgcagcaagcgtataacaacgatatgacagcctcaggttttggaacgggaggcaaataccagcaggcgatacaggccgcaacggcagcggtacagggactggccggcggtaatctgagtgcaccctggcaggtggtgcagcgtcgtatattgctgaaataa

SEQ ID NO: 32499 - DNA, 1161 bp, Escherichia coli
atggcgaaaagggtatggcggcgggagcgtgacctgacggggtggatgtcgctgtcgcgtaaaccggaggagacatggtacgggtgggacggcgacaggctgacgacggtgcagactaacaccacgcgtatccagacggtgtaccagccgggaagcttcacaccgctcatccgcatcgaaacagacgtgaccgaactggagaaagcgcagcggcgaagcctggcggagaagttacagcaggaagggagtaaagatggtcacggcgtggtgttcccgcctgaactggtgcggctgctggacaggctggagggggaaatccgggcagaccgtgtgagtgacgaaagccgggcgtggcttgcgcagtgcgggctgacggtggagcggctggcggcacagatcgagccagtttatttgcctgagcgaaaaatacatctttatcactgcgaccaccggggactgccgctggcgcttatcagtactgaaggtgcaacggaatggcgtggggagtatgacgagtgggggaatcagcttaatgaggagaacccgcatcatctgttccagccataccgcctgccggggcagcagtacgatgatgaatcggggctgtgctataatcgttatcgttactacgagccgttacaagggaggtatattacacaggacccgattgggttaaatggggggtggaatttatataaatatccgctgaatccaataaattatgcagatcctcttggcttagccgtagatataaaccacttcccagtcaacgaagacatacgaaattatgcagagaaagtttggaataatcctaatatcattacaattggaacatatggtgatcctcaatcagtatatgatgaaaattataataagatagatgtcaagacattagctaatgaggttcgaaatcatcctaaatttaaacctggaatgtcagtaagactgttatcctgtaatacaggaaaaggaaataactcttatgcacagcaattggcagatgaactaggtgtgagagtctatgctcctgaccaatatgactggtactattcaaatggtaaggtagagccttggggaggattttatgatgcaaacaatcaattgcaaatggacacgaatcagcctggacatgagtttacattcaagcgaaggagaccatag

SEQ ID NO: 32500 - DNA, 366 bp, Escherichia coli
atgcgtgatattcagatcatccttgaacgttggggggcatgggcagctagtgatagctcaggagtggactattcgcctatagctgctgggtttaagggacttcttccctataccagtaaggcacgccaagcttgttcagataatgatgcgctaattattgaaagttgcttggagcaactaaaaaaaagaaaaccttatgagcattctttactggttgcgcattatttgtacgggttttcaaagcggaagattgccaaaatacaaggaaaggatgagaaattaatccgtatagaaatattgttagcagagggattcattgatggttgcctttctactctcgatattcatttagatatggagttataa

SEQ ID NO: 32501 - DNA, 711 bp, Escherichia coli
atgaaaagcgatctcactataaaaaatagatattgtacaattccacaaacgaagttccgtaaatgggatgaaatggacgttttactctggaagttaggaaaaaatgattcgcgtcgccgttcaggagtatattatttaaatgcttataaagatgcatatgtacaatataatagggacaaaataattaaacatgcatatgccgcagggattcgtccagagttactgggcggcgtggcctggattgagtcaggaggtatgcctgaaaattataagtttcagatatatgaaacaaaaagaatgatcggatcgttagatatgcctgaaaataaaacatcatttggctcaatgggtatacaaatacgaaccgcagcgattactctaggccttgacccttcagaattaactaccagaaatcagttagagttagcgacatgcctgatggaagatgattttacctttaaaattgctgctactcatttaagagatcttgccctttttgattatccctcttcggcaacactgtatatgacgaatgagcagtatattatggctggtattagatataatcgtggtgttgaacgagatttgggtttttttatttatttaattaataatttgcctgcgcgtgatacagatgattataaattcatctcttatggtatgaggttgttagagattagagaacatatcaaaaaattgattaatgagtaa

SEQ ID NO: 32502 - DNA, 291 bp, Escherichia coli
atgtggtccagtaccatcagcaccagcgccaccgttttgatgatatcccgctgtccgggtgaccagaccagaaacgactgcaaccaggtatcggtccgtgcagccagtgaatcgttacgtgtcgtgttcgtgttatccgttgtcatcagtgtttgtcttcctgtatcagtctccgcccagggttttctctttctgcaggtcacgaaccatatcccgctccatctgctgcagacgctcctgcagcagattttcccgggcaacctcccggaccgcttcccgctcccgttgtga

SEQ ID NO: 32503 - DNA, 471 bp, Escherichia coli
atgctaaaggcactgcaaatagttattgaaaataaacgtgtgcatctcgccattataggtaatggtcctgatagaaataaactcatagaatatgcttctcgattaggaataacccaaaatgtgcattggttaggagttcgttttgatgtttatgaatggatgtcagcgatggacttgtatgttatgtcttcttcatgggaaggtatgcctttagttatatgtgaggctatgtcttgtggcggaattgttgtagcgacagattgcggaggagttaaagaaatagttggcaattctggctttattgtgccaaaaaatgattccaaagcattatcaaaatcaatatgcgatgcattagctcttacagaggaagagagagtttcaatcacatcttctgcaagagataggattgaacggtactattccttaaatattatttcgggaaaatggttaagtttatatgacgaattctga

SEQ ID NO: 32504 - DNA, 135 bp, Escherichia coli
atgatgagcgaaagtaataagcaacaggcagtgaataagttgacagagattgtcgctaactttaccgccatgatttctacccgaatgcctgatgacgtggtggataaactaaggaaggtgcgaacaagtccctga

SEQ ID NO: 32505 - DNA, 327 bp, Escherichia coli; identical to SEQ ID NO: 13453

SEQ ID NO: 32506 - DNA, 219 bp, Escherichia coli
atgaagcagcgtattacagtgacagttgacagcgacagctatcagctgctcaaggcgtatgacgtgaatatctccggtctggtcagtacgaccatgcagaacgaagcccggcgactgcgtgctgaacgctggcaggctgaaaatcaggaagggatggcagaggtcgccaggtttattgaaatgaatggctcttttgccgatgagaacagggactggtga

SEQ ID NO: 32507 - DNA, 747 bp, Escherichia coli
atgatggctcacagtaattacggtgctgcgctggagaaacagggtgtggaaatcacgctgatttacagcggcagccataaggtggatggcaacccctacagccatcttccggatgacgtccgggagacactgcagtcccggatggacgcaacccgccggatgtttgcacagaaggtgtcggcatataccggcctgtccgtgcaggctgtgctggataccgaggctgcagtgtacagcggtcaggaggccattgatgccggactggctgatgaacttgttaacagtaccgatgcgatcaccgtcatgcgtgatgcactggatgcacgtaaatcccgtctctcaggagggcgaatgaccaaagagactcaatcaacaactgtttcagccactgcttcgcaggctgacgttactgaggtggtgcaagcgacggagggcgagaacgccagcgcggcgcagccggacgtgaacgcgcagatcaccgcagcggttgcggcagaaaacagtcgcattatggggatcctcaactgtgaggaggctcacggacgcgaagaacaggcacgcgtgctggccgaaacccccggtatgaccgtggaaacggcccgccgcattctggcagctgcaccacagagtgcacaggcgcgcagtgacactgcgctggatcgtctgatgcagggggcaccggcaccgctggctgcaggtaacccggcatctgatgccgttaacgatttgctgaacacaccagtgtaa

SEQ ID NO: 32508 - DNA, 489 bp, Escherichia coli
atgtcactcttccgcagaaatgaaatatggtatgcctcgtattcgctcccgggcgggaaacgaattaaggaatctcttggcacaaaggacaagcggcaagctcaggagttgcacgacaagcgaaaagcagaactctggcgagtagaaaagctaggggatttacctgatgtcacttttgaagaggcctgcctaagatggcttgaggaaaaagctgataaaaaatctctcgattcagataaaagccggattgagttctggcttgaacattttgagggtataaggcttaaagatatctcggaggcaaagatttactctgctgtaagcagaatgcataacagaaagacgaaagaaatatggaaacagaaagttcaggccgccatcaggaaaggtaaagaactgcctgtttatgaaccaaagccagtatcaactcagacaaaggcaaagcatcttgccatgataatgaaccgccccgggaatcctggagactaa

SEQ ID NO: 32509 - DNA, 294 bp, Escherichia coli
atgagaaacggcttcaacggcctggcggcaaaggtgcagacgacgctgaaagacgatccgatgtcaggtcacgtttttatcttccgtgggcgtaatggcagtcaggtaaagctcctctggtctaccggcgatggactgtgtctgctgaccaaacggctggagcgcggccgcttcgcctggccgtcagcccgggatggcaaagtgttcctcacaccggcacagctggcgatgctgctggaaggtatcgactggcggcagcctaaaagactgcttacgtccctgactatgttgtaa

SEQ ID NO: 32510 - DNA, 444 bp, Escherichia coli
atggcagcttatttctttgctattcgttcaagtaaaagcaaagtacctgatttgaataagtatgtaaaatatcttttaagtgacacgcttgataaccaatacgtggacgagatattcatgtatcttttgtaccacaatgaaaatgaaattattgatttatattaccaaacacactcttctgaaattaatacaaaatccgttcttctttattttaaacaccttattaaagttaaaaaatatgaacaagcatatgccctttcaaaaaaaataaacattacagaaatagatgatgagtctttattctttatagctgagttttatattatttatgaagattatgacttagctatgttatacataaaacacattcgacttcgtttacttcttaacaaatcttcagatgtttataaaagaattgattatcttatgtcattaatcccttaa

SEQ ID NO: 32511 - DNA, 348 bp, Escherichia coli
ttgatcccattaccatcagggacaaagatctggctggtcgctggcatcaccgatatgagaaacggcttcaacggcctggcggcaaaggtgcagacgacgctgaaagacgatccgatgtcaggtcacgtttttatcttccgtgggcgtaatggcagtcaggtaaagctcctctggtctaccggcgatggactgtgtctgctgaccaaacggctggagcgcggccgcttcgcctggccgtcagcccgggatggcaaagtgttcctcacaccggcacagctggcgatgctgctggaaggtatcgactggcggcagcctaaaagactgcttacgtccctgactatgttgtaa

SEQ ID NO: 32512 - DNA, 294 bp, Escherichia coli; identical to SEQ ID NO: 8158

SEQ ID NO: 32513 - DNA, 129 bp, Escherichia coli; identical to SEQ ID NO: 19916

SEQ ID NO: 32514 - DNA, 216 bp, Escherichia coli; identical to SEQ ID NO: 5123

SEQ ID NO: 32515 - DNA, 129 bp, Escherichia coli
atgatgagtatcttcatcatgaccctttccttatttaaggccccttcctcgggaggggctttcccgtttcagcgtcccgctgaaatcatcggcttacctcctttcgccctgaatgcagtctatcgctga

SEQ ID NO: 32516 - DNA, 228 bp, Escherichia coli
atgaacaaaaataaccctgctaattcattttctatagaagcaaggaaagaagcttttcggagagctgaagccagtctttttttatcaagtaaagatcccaaaggctcctcattttttaatgaaataaaaagtaaggtaatcaatggagagctaacctatgaagaggcaaagagagaagtattaaattatcacattgaacaatctaaaaatcaaaataaaaaaggctaa

SEQ ID NO: 32517 - DNA, 213 bp, Escherichia coli
atggctgattataatagctttgttttggaaggaataaaaattatttttgccgataacaacaaggagtttattaaagagatttgtgaaccattgataaatattctatgtatcgaagagtattattctgctaccggaatttataattatgatgatgctgatgtgcaaactgagttacttaaaaatgcattaagggactataaaatagctcactag

SEQ ID NO: 32518 - DNA, 777 bp, Escherichia coli
ttgaaaaggatcaataaaactccggaggataaattctttagcaactttaaagctcaaaatccaaatggaacttgggatgattttaggaatcatgaacaaggtgttttgtataagaggctcaagcaacatatttgcattgatcaaatgtacctttgtgcgtattgtgagatagatttagattgtgaaaatgaacatgaaataaaagtggagcatttcaaatccaaatctggttcactcccaggtggtattaattggcatttagaatggtctaatctcttagctgtatgtctgggtggtacaaatgaaggtgatgattatcaattaccggtgaatcttagttgcgattcatataaatctcattatgaagacaaaaataaagttattgacaaagactggacagggaaaattctccttcccctcacgcttccagatgcgcataatttatttgtttttgacaaaggtacaggtaaattgctacctaatgaaccatactgtaatagcattagcatagatgggaagcctgctgcagaaacactcgacattgttaataaaacaatagaggttttaaatttaaattgtagcagactaaataacgctagaatgaaattgctatttctcttcaataagtgtgcacgagaaaaagatttaagaaaaatgcataagttactgatacaatggagtcaaggtaaacctaagttttttcagacgacacgagatataattattcgtgaaagccgaatttgccaaggattattggacggaacgataaaatattaa

SEQ ID NO: 32519 - DNA, 468 bp, Escherichia coli
atgggactggcatctaaatatggacacttaaataatggcggatatggagcgagacccaacaaaccgcctacgcccgatccaagtaagttgccagacatagcgaaacaattaagactgccatatcctattgaccaggccagtagtgcgcctaatgttttcaaaacattcttcagagcattaagtccttacgattacacactgtattgcaggaagtgggtaaaacccaatctgacttgtacgccgcaggatgatccccagtatccagggatggagacaaagacagcaagtgattacctgccacagacaacttggccaacaactcaattaccaccaggatatacttgtgcagaaccctatttattcccagacattaataaacccgatgggccagcaacagcagggatagatgatttgggtgaaattttagctaaaatgaaacagggaacatcgagaggaataagaaaatga

SEQ ID NO: 32520 - DNA, 690 bp, Escherichia coli
atggctgactggtttattgcaactgaaggtgtgaaggtggtgaaagatagtgccagcctgtggccgcagatcatcacggcggttttgtctgccggtactgcatttggtggtgtgtggtacgggcagtggcggataacacagcgagaggaggaagctgcaacagcgaagctggtcagcgaacgtctctttattgccacggagctggtttttctgctggagaggtttgcgcagcgttgtgctccagcagcaacagcaactgtggagcacgatcaggatggcagaggagaagctgagttcttattaccggaaatcgattattccccggtatctggtaactggcgctcccttccttctggcctgatgtataggctcagcgaactctctgttctcagctacgaagctgtcgtgtgtgtagataatgtgtttgttgaagatactccttatggtggagcgggtgaatatagtttgcataaaaacgcagctatgttgggagtaaaagcactgcggttatcacgagaactgagaatgttatgtggcctccctctgcacggcctttccgatacactatcgccaacgaggttggtattgttgaaagccagaggtaaaacactccaaaaggagtacgaaatggtaaagaagtctaaaaagaccgagcaagagattgaggatttcataaaggggacatcatga

SEQ ID NO: 32521 - DNA, 240 bp, Escherichia coli
atgaaaattgctcagcaattactggaggccgttctgcaatttatgaatgcatctgcaatgactcaggtgctgacgttgatattcctggctctgataatacaggtactgaaaacattaattacggcgtggatagtaagaaaaccatcttcaggagagatggttttagaccggaaacctgactctgccgggcgtaaggatcactgcaggcagctgtctcaacaaaggaaaaaacatggctga

SEQ ID NO: 32522 - DNA, 522 bp, Escherichia coli
atgttaaaatcaactttggggattgctattgctttttcattgtgtgctgttgcacatgcagccaatcaaggacaaggtgttgttaactttaaagggacggtaattgatgccccatgtggtattgctccggaatctgcagatcagaccattgattttggacagatttcgaaaacacacttggaaaacagcggtatttcagtgaaaaaagatgtggatataaaactggttaactgtgatctatcaggtggagaaaaaaaggttaaagttactttctctggtacgtctttgggtgacgggactgaattaggcactgctggtaatactggcactgctattaagatgtcagccgctgatggatcttttgttaaattcgatggtgcaacctctgtaggttcatataatctgaaaactggtgataatactatgcgttacagtgcatgggttcagaaagcatcgactgcttccagtgttactgagggggcattcactgccgttgctaacttcaatctgacctacgagtaa

SEQ ID NO: 32523 - DNA, 225 bp, Escherichia coli
ttgactgagcgctatgctgctctctgtcagcactacggaatgcagggcgtacacgataatgccggttggggccacgaaaatggctcggttgaaagtgcccacggacatctaaaaaggcgtatctgtcaggcactgatactgcggggcagtaactccttcagcaccatggaagaatatcaggccttcatcactcagcaggttatgcggcacaaccgtaaaagctga

SEQ ID NO: 32524 - DNA, 495 bp, Escherichia coli
gtgacgctcaatacttctcaggtcagttactatattactcagcgtaagaaaggtataacccagcatatctcggccatgaaagcgggtatctcagtccgttctggtcgtcggatcgaaaaaggccagagggcaaaaaatagtgttcggcactggagcacacgcaaagatcctctggaagcagtgtgggacagcatgcttgttcctctgttgaaagagaggcctgttctgacaccaacaactctgctggagatgctacaggataaatatcccggccagtatcccaacagctttcgaagaacaatgcaacggcgggggcgcgaatggaaattacagtctggtgcagagcaggaggtcatgttccgccagtggcatcagcccggtctgcgaggcctgttggactttaccaaactgaaaggtgtggtggtcactatcgccggtaagttgttggtgcatatgttgtataacttccgtctggaatggagccactggagctga

SEQ ID NO: 32525 - DNA, 261 bp, Escherichia coli
atggcaatgccacgtcttcctgatctggtgaataaaatgaattttcaggggcgtctggcaaccagtgcaatccaaattgcaagttttccagaatttcttccggttccgtcacaagaatcgcaccttgttttattaaccagtgaggcccttcgcttcccggattccctattggtcctggcaaggcaaaaacttcacgccctgctcaagcgcacaacgtgctgtcaccagcgaaccactgcgcaaagccgcttccaccactag

SEQ ID NO: 32526 - DNA, 762 bp, Escherichia coli
atggtcgatacagaaatttggctgcgtttaatgagcatcagcagcttgtacggcgatgatatggtccgtatagctcactggctggcaaaacagtcgtatattgatgcggttgtattgcagcaaacagggcttacattgcggcaggcacaacgctttctttcatttccgcgaaagagtatcgaaagctcactttgttggttggagcaacccaaccatcatttaatccctgcggacagcgaattttatcctcctcaacttctggcgacgacagattaccccggcgcactgtttgttgcaggagaactgcacgcgttgcattcatttcagcttgccgtagtggggagtcgggcgcattcatggtatggcgagcgatggggacgattattttgcgaaactctggcgacgcgtggagtgacaattacgagtggactggcgcgtggaatcgatggtgtggcgcataaagcggccttacaggtaaatggcgtcagcattgctgtattggggaatggacttaataccattcatccgcgtcgccatgcccgactggctaccagtttgcttgaacatggtggggctcttgtctcggaatttcccctcgatgttccaccccttgcttacaatttcccacgaagaaatcgcattatcagtggtttaagtaaaggtgtactagtggtggaagcggctttgcgcagtggttcgctggtgacagcacgttgtgcgcttgagcagggcgtgaagtttttgccttgccaggaccaatag

SEQ ID NO: 32527 - DNA, 312 bp, Escherichia coli; identical to SEQ ID NO: 26039

SEQ ID NO: 32528 - DNA, 273 bp, Escherichia coli
atgagtgatgttaagtcagatcaaataattaaatatttgtctgaaaagtggggagggagcaaatgtcccttgtgtaaaaaagggcgttggaatgtttctgacaaaatttttgaactaagagaatttcatgaaggtaatgttgttattggggcaggtccgatagtcccaattattcctgtaacttgtgataattgcgggaatgttgttcttgttaatgccattatctcagggtgcttatctgctgacaataagcaagatggaggctcaaagtga

SEQ ID NO: 32529 - DNA, 576 bp, Escherichia coli
gtgagcagtgaaagccgggcgtggcttgcgcagtgcgggctgacggtggagcaactggaaaaacaggtggagccggaatacacaccggcgcgaaaagttcatctttaccactgcgaccaccggggcctgccgctggcgctcatcagcgaagacggaaatacggcgtggagcggggagtatgatgaatggggcaacctgctgaatgaggaaaccccgcatcacctgcaccagccgtaccgtctgccagggcagcaacacgatgaggagtcggggctgtattataaccgtcaccggtactacgatccgttgcaggggcggtatatcatccaggacccgattgggctgaaggggggatggaatctgtaccaatatccgctgaatccagtgcaacacgttgatccattagggcttagtactatgataataggtaacggccccgttcctgataatccttttgggcatgctgcggcggcaaatcgatatggattaatgagttcgggaactggggatgagatgggagcctctgtctctgattattttaaaaagatgcaaccccgcagagatacctggatttga

SEQ ID NO: 32530 - DNA, 1071 bp, Escherichia coli
atgccaaatacatctattcacttatctcgctgtaatattttacaaaataataaattgcaaccagcagaagtttacaaagaatcacaacaaaccgcgaaacttgagattttttgcgatgagtttctaaaaatatctcaaagtagatacgggttatcaacctcagcagacagcatagctaatttattggcttttttcacgaaagcctcagatgcaattgatagtatcaagacccaaaaaattgacgttcacagttatggtttcgtaccaataagacattttgtcgaacatgtcataacgtataaaaatgaatttgcagcggattatgaaccctatacccttacctttacccgaggtgaaaacaacgaaggtattttgagtgtcgaaagcaaagaagggtttatttcacaaagaacaataaacttaaatgaatatgaaactgcaattaacatcatcaatgaacatgttataaaagaaaatatccacaacacggtccagtcaccgacagaaaaagacatttcaaaaataaacagctctgataaaccttataaaaccagcagtgaggaaagtattaaaagtcaactttacagcgatcaaaaaaaatatacagacctgctactacattctgagaaaaatacagaatggtacaaatacgcatcctccgtggaacgctatgataaattcaagaattcttctaaggaaattaaaaatacctacaagcaaattgtacaagcgcagaaaaaattgaaccaaatgaaatacataaataaattaagtggtgagcttatcgatatcgccgacaaaaagttagcaccattaataaatgatagtttcagctatacacgagatttctttgcttactcaaaacaggaaaataacatcttcacgtttgataattctaagtttgaagatccaaaggaaaaaaaaggtttaatggtacaacacagcaatggacaactggttattactggtgaatattgtcctgaaggtgtgcaaacagcattcactcaagaccaatatgataaattaataagatacattaatattttctttacttttccgaaatgcgaataa

SEQ ID NO: 32531 - DNA, 708 bp, Escherichia coli
atgcgaaaaaaaatagagatgagcttgataaactctcctgcaaatggtgttgtgattaaaagaataatttctgatggattgaaagaaatagtttctctaaaagaacagatccttcttgaaaccaccgcaaaaattcagagtattgaggaaaagagagaagaaaaagttattcaaggttattatgatggctatgcgaaaggcattattgatgtgatggataattttatacccttgataagtttgctgagctcagaattagaaaaaaacagaataaatatgataaacgatctgaagagcatattgttaaaatcttcagaggaagttgaagtttttatcaaaatttttgaaagttgggtaacaaaattaccgtcaatatcaggccctttaaatctctatatacctaccagtttcaaagataagtctattgaagtagagtcatattttgtcgacaagtcaatatggaatgtccatatttcatatcatgatgacaaacgttttgttttttttacagatcaatttattgctgaatttagtccgcaggaatttgtggatagttgtgagcaatatttaattagcaatcactgtttttcccctgacaaggttaatgaaatctgtgaacatgccagacattatttagttgaaagaatgtgtgaaatagattctttggctatgaataattctgatttgacgaccccagaggacttatag

SEQ ID NO: 32532 - DNA, 180 bp, Escherichia coli
atgttttttgttgttgccatcgttggcaacgataacgcaataacgattaatgatattagtaaatttgtcttcactggtaaggagaaagaatttctagcaatcacaattgacatgaaaataaatgttgggactatgtatctaattgagaaaagatttgttggcctgtcacttgaaacatag

SEQ ID NO: 32533 - DNA, 426 bp, Escherichia coli
atgaaatattcgacatttcatgatgttaaccttgatatgtgtgagataaagaattgcaattttgacaattcagagatgaatttcatttcgtgcgtcgggacaaattttagcggttctacatttaacaatgtaaaaacaacaacagcgcaactaattaagacaccaacaaagtggacgaataatactctaaaatattggttctccagttgtaataaacgtaatatcatcttcacttttaatacaatatctgatagaaatatgaaattaaaaggtatcaaggatatattattatcgttggtagaccataaggctaatatttatagtgtaaggcaagagcttctggattttcttaataatgatttatataaaaataatggagagattctctcttataaagaatcaataatgttgttttgtgctgtgtag

SEQ ID NO: 32534 - DNA, 552 bp, Escherichia coli
atggcctgcgcgaggctgacaaagtgtgtcgtcggcatggtcagcataatgtcctgcaccgtctgcggcatactttcgcgcggcgtggatccaccggaaagcatttgcagcggtagcagcaccagaatcaccagcagccccagttgcggcattgaacgcgctatcgtccccataaaaatgccgatcgacgtagtggcaaacagactgagcgccacgcccagcataaacagcgggatcgagccttcaatcggtacgcccagcacgcctttcaccatcagtaccagcgataatcccgacaccaccagcaccaccaaccccatcgaccagaccttcgccatcatgatctcaaacggcgttatcggcatcaccagtaagtgttccaccgtgccgtgttcgcgctcgcggatcagcgccgatccggtcagcacaatcgccagcatggtaatgttgttgatgatcgccatcaccccgccaaaccacgcgggatcgaggttcgggttaaagcgcatccgggtttccagcgataccaacggttcgctattatcacggtag

SEQ ID NO: 32535 - DNA, 417 bp, Escherichia coli
gtgctcgaagaagtgagcgatctgcgctttcagcagctctggcagatcgttaacgtctttaatgtgatcgtattctttgctcagctttgtgtgcggaacagcaatcagtttcgcatcttcaccggcttcgtcggtcattttcagaacgccaaccggacggcaacggatcacagaacccggctgcagcgggtacggagtcgggaccagtacgtcaaccgggtcaccgtccagagacagggtgtggttgatgtaaccgtagttgcacggatagaacatcgcggtggacatgaagcggtcaacgaacagtgcgccgctctctttgtcgatttcgtatttgatcggatctgcgttagccgggatctcaataacaacgtagatgtcttccggcagatctttacccgcagggacgttgagtaa

SEQ ID NO: 32536 - DNA, 1101 bp, Escherichia coli
gtgggtggcttcaaacagggcgcattcgtcaccgatgtttgcgcctggggcgataccgataccgccgacctgtgcagccagagcgtcagaaatgtagtcaccgttcaggttcatacaggcgataacatcatattcagccggacgcagcaggatctgttgcaggaatgcatcagcaatcacatctttaatgacgatctctttgccggtattcgggtttttaactttcagccacgggccgccgtcgatcagttcaccgccaaactcttcacgcgccagctggtagccccagtctttaaacgcgccttcggtgaacttcatgatgttgcctttgtgcaccagggtcacagagtcacgatcgttagcaattgcgtattcgatcgctgcacgaaccagacgtttggtaccttcttcagaacacggcttaataccgatgccgcaatgttccgggaagcgaattttcttcacgcccatctcttcacgcaggaatttaatcactttctcagcgtcggcagagtctgctttccattcgatacccgcataaatgtcttccgagttttcacggaagataaccatatcggtcagttcagggtgtttaaccgggcttggagtgccctgatagtaacgtaccggacgcaggcagatatagagatccagctcctggcgcagggcaacgttcagagagcgaataccgccaccaaccggagtggtcagagggcctttaatggcaacgcgatattcacgaatcagatcaagggtttcagcaggcagccagacatcctgaccgtaaacctgtgtggatttttcaccggtgtaaatttccatccaggagattttacgctcgcctttataggctttctcgactgcagcgtcgaccactttcagcatggctggggttacatctacaccgattccatcaccttcaatgtaagggataatcggattttcaggaacgttgagtttgccgttttgcagggtgatcttcttgccttgtgccggaacaactactttactttccattcacctctccttcgagcgctactggtttgctcgtctgccaccacgttgcatatgcgtttgcgtcctgcgatacggatgcattag

SEQ ID NO: 32537 - DNA, 2685 bp, Escherichia coli
atggctgataacctcaattccttagtacttactcacaacctaataaatcacaaagaaccagtacaacagcttgagaaggttcaccctacctggcgaagcgagtttccaataccgttagatgatgaaacaggaacgcattttttgaatggactgctatgcgcagcctctgtagaggctaagcctcgactacaaaaaaataagagtacgcgttgccaattctattggtcagaaaagcatccagatgagcttagggtgatagtatctcttccggacgaagtttcctttcctgtaacaagcgagccgtcaactacgcgctttgaacttgccatttgtgaagatggtgaggaagtctctggccttgggccagcctatgcttctctggaaaacagacaggcaacagttcgattacgtaaaagcgaagtgagatttggcaggcaaaatccatcggcaggtttgtcgttagtggctcgtgctggagggatgattgttgggagcattaaacttgatgacagtgaaattgccattggtgaggtgccgttaaccttcatcgttgatgcagatcaatggctgttacagggacaggcttcttgcagtgtgcgaagcagcgatgttctgattgtgctccctcgggataatagcaatgttgctggttttgatggccaatcgagggcagtaaacgtattaggactaaaagcactacctgtgaagggatgtcaggacgttacagttacagcaaatgaaacttatcggattcgcaccggaagagaacaaatcagcatcggaaggtttgctctaaatggaaagcgtgcaagctgggtttgtcatccagatgaaacatttattggtgtaccaaaagtcatttctacactaccggatattcaaagcattgatgtaacgcgttacctgagcggaatttcaattgagcaatgtcatatacaagagatgctgggggctcaatatctttctatccgtaatagtaagaatgaaacgctcttgcgtcgcaaaatcggtattttgcctgctgatttcagtattgagataaaaggtggaatacacgcaaatgaaggcactatcgtaatcaccacacagcatccttgtgtagcaaaacttaaagataaaacattggaggctacacgtaagcgtactgaggggcgaacagagatacaactcaaagcggaaggggtacctccggcatttattacattacaagttctgcctaatttggcggctgaccccatcgatattgagttaccttttcccgctaaaggctgtctcgctcttgatgtaaacggacgtcctctggataaaaacattacgctgcatgatctgctgggttccagagcgtttctgttctccagaaatggcgagccgacaagatatacattgcagttgcatttgcgctccgttagtggattacaggcatggcacgaatggtgttatacggcgttgagcgatcgtcctgttgaattgaatctctatagtctgcgcgaacatattgagaacctgatttcacttgaggcaggtattgaccaggttgttgagatgcgtattacgggggcgggtgtggtcatggcctggcaaattcgtcgctataaatacagtctgcgctatgattatgaaaaagaactattactcagccagtcagtgaaccatcgtgctggacagattccttcccccgttatcatgctgttaagtgaacccgagaggaaatccatccccttagcatcaagaatgagcgagggagtgcctgtcggtgaatatgagttgagctcaatcgttaacaaaaatggaccgtggttggttgtccctaaaccgggtgaagagatggcttttcgtccctgcttcattcgtggcgaatcttcgttaccggtagaagaaagcaacatccgctcattgcagaaagcgacccagctttttaatccacaggcagaagttaataccatcacactggttctcggacagatggctaacgatcctgcccattccggctggcaatttatgcgtagcctgtacgatcaatttggttatttaccactggcaacctttgaagtatggcgtgcactggtgcagcatccgcaggcattggcaatgtcgctcttcaaatttgaaatgtcagcagagtacctgagtcgtattgagaatgagttccctattctatgggagtttttccccatctttgagatcaaagcggcatctgagcgtttcaaattgttcctgagccaaaaaggtgcaccggaggaaacccagaaattactggttactaatatgtttcaacggctggggctcgtgttcccgacatatgccgatgaaattgagaaatggttaagtaacggacatctccccccgtctattcctgagtcttttgtccacgtgtggtatcaggagcttttacgtgagcatagtgaagctcaatggccagagtacggcagcaagcggctgcatagctggatggcatcacaaaaaaatccagtgattggtattaatcctgacgcaaatcaccgctattccgtggccttgttacccgtcttcgctgcagctgtggcaagcggaaatgcttcttttgaatctgtatttgaccgtaaacccggtgccgtatttttcctgaggcaagtcagggatttcgattcccgctggtttaaggccatcttccagtgcagcctgttgcgttatgttgctaaaaaataa

SEQ ID NO: 32538 - DNA, 606 bp, Escherichia coli
ttgggtcaatcagaatacatttcatgggtaaaatgtacttcctggctaagtaactttgtgaatcttagagggttgagacaaccggatggccgtcctctttatgaatatcatgcaaccaatgatgaatatacccaattaacgcagctactccgtgcagtcggtcaatcacaatctaatatatgtaatagggactttgctgcctgttttgttcttttttgctctgagtggtaccgcagggattatgaacggcaatgcggatggacgtgggaccctatatataaaaaaatagggatttcattcaccgccacagagcttggtactatcgtaccgaaagggatggaagattactggctgcgcccaattcgattttatgaatctgaacgacgcaattttctcggaacattattcagtgaaggtggtttacctttccggctactcaaagaatcagacagtcgctttctggctgttttctccaggatccttggacaatatgagcaagcaaagcagtcaggtttttctgccctttcgctggcaagagctgtcatagaaaaatcagcgctgccaactgtttttagcgaagatacctctgtagagtcatatggctga

SEQ ID NO: 32539 - DNA, 534 bp, Escherichia coli
atgatagtgaccttccagcacaaacgttgccgccgccatttgcgtggacggcacattaaagctgctgatggcgtatttcatatgcatcagtttatcgtgataacgccccggtgcgacccaacccacgcgcaggcctggtgcaatacttttactgaacgagctgcacaacagcactcgcccgtcgatatcccaggaatgaatggtccgcgggcgcggatactccgtcgccagttcgccatagacatcatcttcaaaaatcacaatatcatgacgctgagcgagagagagaacggcccgtttgcgcgcgtccggcataataaatcccagcggattattacagtttggcaccagaatgatgcctttaatcggccactgttccagcgccagttccagcgcttcaacgctgatgccagtttctggatcggttgggatttcaatcactttcacgcccatgccgcgcagcatctgcatcgaaccgtaataacagggggattcgaccgcgacaatatcgcccggtttacacactgccattaa

SEQ ID NO: 32540 - DNA, 2802 bp, Escherichia coli
atgcagaacagcgctttgaaagcctggttggactcttcttacctctctggcgcaaaccagagctggatagaacagctctatgaagacttcttaaccgatcctgactcggttgacgctaactggcgttcgacgttccagcagttacctggtacgggagtcaaaccggatcaattccactctcaaacgcgtgaatatttccgccgcctggcgaaagacgcttcacgttactcttcaacgatctccgaccctgacaccaatgtgaagcaggttaaagtcctgcagctcattaacgcataccgcttccgtggtcaccagcatgcgaatctcgatccgctgggactgtggcagcaagataaagtggccgatctggatccgtctttccacgatctgaccgaagcagacttccaggagaccttcaacgtcggttcatttgccagcggcaaagaaaccatgaaactcggcgagctgctggaagccctcaagcaaacctactgcggcccgattggtgccgagtatatgcatattaccagcaccgaagaaaaacgctggatccaacagcgtatcgagtctggtcgcgcgactttcaatagcgaagagaaaaaacgcttcttaagcgaactgaccgccgctgaaggccttgaacgttacctcggcgcaaaattccctggcgcaaaacgcttctcgctggaaggcggtgacgcgttaatcccgatgctcaaagagatgatccgccacgctggcaacagcggcacccgcgaagtggttctcgggatggcgcaccgtggtcgtctgaacgtgctggtgaacgtgctgggtaaaaaaccgcaagacttgttcgacgagtttgccggtaaacataaagaacacctcggcacgggcgacgtgaaataccacatgggcttctcgtctgacttccagaccgatggcggcctggtgcacctggcgctggcgtttaacccgtctcaccttgagattgtaagcccggtagttatcggttctgttcgtgcccgtctggacagacttgatgagccgagcagcaacaaagtgctgccaattaccatccacggtgacgccgcagtgaccgggcagggcgtggttcaggaaaccctgaacatgtcgaaagcgcgtggctatgaagttggcggtacggtacgtatcgttatcaacaaccaggttggcttcaccacctctaacccgctggatgcccgttcgacgccgtactgtactgatatcggtaagatggttcaggcaccgattttccacgttaacgcggatgatcctgaagccgttgcctttgtgacccgtctggcgctcgatttccgtaacacctttaaacgtgatgtcttcatcgacctggtgtgctaccgccgtcatggccataacgaagccgacgagccgagcgcaacccagccgctgatgtatcagaaaatcaaaaaacatccgacgccgcgcaaaatctacgctgacaagctggagcaagaaaaagtcgcgacgctggaagatgccaccgagatggttaacctgtaccgcgatgcgctggatgctggcgattgcgtggtagcagagtggcgtccgatgaacatgcactctttcacctggtcaccgtacctcaaccacgaatgggacgaagagtacccgaacaaagttgagatgaagcgcctgcaggaactggctaaacgcatcagcacggtgccggaagcagttgaaatgcagtctcgcgttgccaagatttatggcgatcgccaggcgatggctgccggtgagaaactgttcgactggggcggcgcggaaaacctcgcttacgccacgctggttgacgaaggcattccggttcgcctgtcgggtgaagactccggtcgcggtaccttcttccaccgccacgcggtgatccacaaccagtctaacggttccacttacacgccgctgcaacacatccataacggccagggcgcgttccgtgtctgggactccgtactgtctgaagaagccgtgctggcgtttgaatacggttatgccaccgcagaaccacgcactctgactatctgggaagcacagttcggtgacttcgctaacggtgctcaggtggttatcgaccagttcatctcctctggcgagcagaaatggggccggatgtgtggtctggtgatgttgctgccgcacggttacgaagggcaggggccggagcactcctccgcgcgtctggaacgttatctgcaactttgtgctgagcaaaacatgcaggtttgcgtaccttctaccccggcacaggtttaccacatgctgcgtcgtcaggcgctgcgcgggatgcgtcgtccgctggtcgtgatgtcgccgaaatccctgctgcgtcatccgctggcggtttccagcctcgaagaactggcgaacggcaccttcctgccagccatcggtgaaatcgacgagcttgatccgaagggcgttaagcgtgtagtgatgtgttctggtaaggtttattacgacctgctggaacaacgtcgtaagaacaatcaacacgatgtcgccattgtgcgtatcgagcaactctacccgttcccgcataaagcgatgcaggaagtgttgcagcagtttgctcacgtcaaggattttgtctggtgccaggaagaaccgctcaaccagggcgcatggtactgcagccagcatcatttccgtgaagtgattccgtttggggcttctctgcgttatgcaggccgcccggcctccgcctctccggcggtagggtatatgtccgttcaccagaaacagcaacaagatctggttaatgacgcgctgaacgtcgaataa

SEQ ID NO: 32541 - DNA, 1470 bp, Escherichia coli
atgacctttcgcaattgtgtcgccgtcgatctcggcgcatccagtgggcgcgtgatgctggcgcgttacgagcgtgaatgccgcagcctgacgctgcgtgaaatccatcgttttaacaatgggctgcatagccagaacggttatgtcacctgggatgtggatagcctggaaagtgccattcgccttggattaaacaaggtgtgcgaggaagggattcgtatcgatagcattgggattgatacctggggcgtggactttgtgctgctcgaccaacagggtcagcgtgtgggcctgcccgttgcttatcgcgatagccgcaccaatggcctgatggcgcaggcacaacagcaactcggcaaacgcgatatttatcagcgtagcggcatacaatttctacccttcaatacgatctatcagttgcgtgcgctgacggagcaacaacctgaacttattccacacattgctcacgctctgctgatggcggattactttagttatcgcctgaccggcgagatgaactgggagtacaccaacgccacgaccacgcaactggtcaatatcaatagcgacgactgggacgagtcgctactggcgtggagcggtgccaacaaagcctggtttggtcgcccgacgcatccgggtaatgtcataggtcactggatttgcccgcagggtaatgagattccggtggtcgccgttgccagccatgataccgccagcgcggttatcgcctcgccgttaagcggttcacgcgccgcttatctctcttctggcacctggtcattgatgggcttcgaaagccagacgccatttaccaatgacacggcgctggcagccaatatcaccaacgaaggcggggcggaaggtcgctatcgggtgctgaaaaatattatgggcttatggctgcttcagcgggtgcttcaggagcggcaaatcaacgatcttccggcgcttatcgccgcgacacaggcactgccggcttgccgcttcaccatcaatcccaatgacgatcgctttattaatcctgacgagatgtgcagcgaaattcaggctgcgtgtcgggaaacggcgcaaccgatcccggaaagtgatgctgaactggcgcgctgtattttcgacagtctggcgctgctgtatgccgatgtgttgcatgaactggcgcagctacgcggtgaagatttctcgcaactgcatattgtcggcggtggctgccagaacgcgctgctcaaccagttatgtgctgatgcctgcggtattcgggtgatcgccgggcctgttgaagcctcgacgctcggcaatatcggcatccagttaatgacgctggatgaactcaacaatgtggatgatttccgtcaggtcgtcagcaccaccgcgaatctgaccacctttacccctaatcctgacagtgaaattgcccactatgtggcgcagattcactctacacgacagacaaaggagctttgcgcatga

SEQ ID NO: 32542 - DNA, 183 bp, Escherichia coli
atgacgccaacccaagccgttgttaatttgcgtacgctcgtcagtacgatggagagtatgctgactgaaaaagagattatcaggcgtttcatacctcgggtggagaaaatcgaactgggagttcttcaggctaaaatcttcatccacgcccagcgtgattcttgcggtaccgaagcggcttaa

SEQ ID NO: 32543 - DNA, 2598 bp, Escherichia coli
gtgctagaagaataccgtaagcacgtagctgagcgtgccgctgaggggattgcgcccaaacccctggatgcaaaccaaatggccgcacttgtagagctgctgaaaaacccgcccgcgggcgaagaagaattcctgttagatctgttaaccaaccgtgttccccctggcgtcgatgaagccgcctatgtcaaagcaggcttcctggctgctgtcgcgaaaggcgaagccaaatccccactgctgactccggaaaaagccatcgaactgctgggcactatgcagggtggttacaacattcatccgctgatcgacgcgctggatgatgccaaactggcaccgatcgctgccaaagcactttctcacacgctgctgatgttcgataacttctatgacgtagaagagaaagccaaagcaggcaacgaatatgcgaagcaggtaatgcagtcctgggcggatgccgaatggttcctgaatcgcccggcactggctgaaaaactgaccgttaccgtcttcaaagtcacaggcgaaaccaacaccgatgacctttctccggcaccggatgcgtggtcacgcccggatatcccactgcacgcgctggcgatgctgaaaaacgcccgtgaaggtattgagccagatcagcctggtgttgttggtccgatcaaacagattgaagctctgcaacagaaaggtttcccgctggcgtacgtcggtgacgttgtgggtacgggttcatcgcgtaaatccgccacgaactccgttctgtggtttatgggcgatgatattccacatgtgccgaacaaacgcggcggtggtttgtgcctcggcggtaaaattgcacccatcttctttaacacgatggaagatgcgggtgcactgccaattgaagtggacgtctctaacctgaacatgggtgacgtaattgacgtttacccgtacaaaggtgaagtgcgtaaccacgaaaccggcgaactgctggcgaccttcgaactgaaaaccgacgtgctgattgatgaagtgcgtgccggtggtcgtattccgctgattatcgggcgtggcctgaccaccaaagcgcgtgaagcacttggtctgccgcacagcgatgtgttccgtcaggcgaaagatgtcgctgagagcgaccgcggcttctcgctggcgcagaaaatggtaggtcgtgcctgcggcgtgaaaggcattcgtccgggcgcgtactgcgaaccgaaaatgacttctgtaggttcccaggacaccaccggcccgatgacccgtgatgaactgaaagacctggcgtgcctgggcttctcggctgacctggtgatgcagtctttctgccacaccgcggcgtatccgaagccagttgacgtgaacacgcaccacacgctgccggacttcattatgaaccgtggtggtgtgtcgctgcgtccgggtgacggcgtaatccactcctggctgaaccgtatgctgctgccggataccgtcggtaccggtggtgactcccatacccgtttcccgatcggcatttctttcccggcgggttctggtctggtggcatttgcagccgcaacaggcgtaatgccgctggatatgccggaatccgttctggtgcgcttcaaaggcaaaatgcagccgggcatcaccctgcgcgatctggtacacgctattccgctgtatgcgatcaaacaaggtctgctgaccgttgagaagaaaggcaagaaaaacatcttctctggtcgcattctggaaattgaaggtctgccggatctgaaagttgagcaggcctttgagctgaccgatgcgtccgccgagcgttctgccgctggttgtactatcaagctgaacaaagaaccgatcatcgaatacctgaactccaacatcgtcctgctgaagtggatgatcgcggaaggttacggcgatcgtcgtaccctggaacgtcgtattcagggcatggaaaaatggctggcgaatcctgagctgctggaagccgatgcagatgcggaatacgcggcagtgatcgacatcgatctggcggatattaaagagccaatcctgtgtgctccgaacgatccggatgacgcacgtccgctgtctgcggtacagggtgagaagatcgacgaagtgtttatcggttcctgcatgaccaacatcggtcacttccgtgctgcgggtaaactgctggatgcgcataaaggccagttgccgacccgcctgtgggtggcaccgccaacccgtatggacgccgcgcagttgaccgaagaaggctactacagcgtcttcggtaagagcggtgcgcgtatcgagatccctggctgttccctgtgtatgggtaaccaggcgcgtgtagcagacggtgcgacggtggtttccacctctacccgtaacttcccgaaccgtctgggtactggcgcgaatgtcttcctggcttctgcggaactggctgctgttgcggcgctgattggcaaactaccgacgccggaagagtaccagacctacgtggcacaggtggataaaactgccgttgatacttaccgttacctgaacttcaaccagctttctcagtacaccgaaaaagcggacggggtgattttccagactgcggtgtaa

SEQ ID NO: 32544 - DNA, 207 bp, Escherichia coli
atgccatttctctttaccgctggcggcatcgagcgcaaacaggcgctggtgcgcggtacacaggtaaagggtgtcgcccactttaattggcgtcacttcattggtgatttcacccggatcgttcggctgcttcacatcgccagtacggaacacccaggcttctttcagcttgtgaacgttatcggcgttaatttgtttcagaggtga

SEQ ID NO: 32545 - DNA, 387 bp, Escherichia coli
atgcgtaaaagcctgttagctattcttgcagtctcctcgttggtattcagttctgcgtcgtttgccgctgatcttgaagacaatatggaaaccctcaacgacaatttaaaagtgatcgaaaaagcggataacgcggcgcaagtcaaagacgcgttaacgaagatgcgcgccgcagcgctggatgcgcaaaaagcaacgccgccgaagctcgaagataaatcaccggacagcccggaaatgaaagatttccgccacggtttcgacattctggtcggtcagattgacgacgcgctgaagctggcaaatgaaggtaaagtaaaagaagcgcaggctgctgcagagcaactgaaaacgacccgcaacgcctatcaccagaagtatcgttaa

SEQ ID NO: 32546 - DNA, 1353 bp, Escherichia coli
atggcacttgcaatgaaagtaatctctcaagttgaagcgcagcgcaagattctggaagaagcagtttccactgcgctggagttggcctcaggcaaatcggacggtgcggaagttgccgtcagcaagaccaccggcattagcgtaagcacgcgttatggtgaagtggagaatgttgaattcaatagcgatggcgcgctggggatcactgtttatcaccagaaccgcaaaggtagcgcatcatccaccgatttaagcccgcaggccattgcccgcaccgtacaggcggcgctggatattgcccgttatacctcgccagatccctgtgccggcgtggcagacaaagagctgctggcctttgacgcaccagatctcgacttgttccaccctgcggaagtttccccggatgaagccattgaactggcggcccgcgcagaacaggcggcattgcaggcggacaaacgcattaccaataccgaaggcggcagttttaacagccactacggtgtcaaagtttttggcaacagccacggcatgttgcagggttactgctctacgcgtcattcactctccagctgtgtaattgccgaagaaaatggcgatatggagcgtgattacgcctacaccattggtcgtgcgatgagcgatctgcaaacgccagagtgggttggggccgactgtgctcgccgtactttatcgcgcctgtcaccgcgtaaactctccaccatgaaagcgccagtcatttttgccaatgaagtggcaaccgggctttttggccatctggtgggggcgatagcgggtggctcggtttaccgtaaatctacctttctgctggattcgctgggtaaacaaattctgccggactggctgaccattgaagagcatccgcatctgctgaaagggctggcgtcgacgccattcgacagcgaaggtgtgcgcaccgagcgtcgcgatattattaaagatggcatcctgactcagtggctgctgaccagctactcggcgcggaaactggggctgaaaagcaccggacatgcgggcggtattcacaactggcggattgccggacaagggctaagcttcgaacaaatgctcaaagagatgggcactgggctggtggtgacggagctgatgggccagggcgtgagtgccattaccggtgattattcccgtggtgcagcgggcttctgggtagagaatggcgaaattcagtatcccgttagtgaaatcaccatcgcaggtaatttaaaagatatgtggcgcaatattgtcaccgtcggtaacgatattgaaacacgcagtaatatacagtgtggttctgtgctgttgccggagatgaaaatcgccgggcagtaa

SEQ ID NO: 32547 - DNA, 552 bp, Escherichia coli
atgactaagcagcccgaagactggctcgacgacgttcccggtgatgacatcgaagacgaagacgatgaaattatctgggtcagtaaaagtgaaattaaacgtgatgccgaggagctaaaacgccttggcgcggaaattgttgatctggggaaaaacgcgctggataagatcccgttagatgcggatctgcgcgcggctattgagctcgcccagcgtattaagatggaaggtcgccgccgccagttgcagctcatcggtaagatgctgcgccagcgcgacgtagagcctattcgtcaggcgctggataagctgaaaaaccgtcacaaccagcaggtggtgctgttccataaactggaaaacctgcgcgatcgtctgatcgatcaaggtgatgacgccatcgctgaagtattgaatctgtggcccgatgccgatcgtcagcagctgcgtactctgatccgtaacgcgaagaaagagaaagaagggaataagccgccgaaatccgcacgccagattttccagtatctgcgcgaactggcggagaatgaagggtaa

SEQ ID NO: 32548 - DNA, 1374 bp, Escherichia coli
atgcgcattcatattttaggaatttgtggcacatttatgggcggtctggcgatgctggcgcgccagttaggccatgaagtaacgggttcggacgccaatgtgtatccgccgatgagcaccttacttgagaagcaaggcattgagctgattcagggttacgatgccagccagctcgatccgcagccggatctggtgattattggcaacgccatgacccgtggaaatccgtgtgtggaagcggtactggaaaaaaacatcccttatatgtcaggtccacagtggctgcacgattttgtgctgcgcgaccgctgggtgctggccgttgccggtacacacggcaaaactaccaccgcgggaatggcgacctggattctggaacagtgcggttacaaaccgggatttgtgatcggcggtgtgccggggaactttgaggtttcggcgcgtctgggcgaaagcgacttctttgttatcgaagcggatgagtatgactgcgccttcttcgacaaacgctctaaatttgtccattactgcccgcgtacgctgatcctcaacaaccttgagttcgatcacgccgatatctttgacgacctgaaagcgatccagaaacagttccaccatctggtgcgtatcgttccggggcagggccgtattatctggccggaaaatgacatcaacctgaaacagaccatggcgatgggctgctggagcgagcaggagctggtgggtgagcagggtcactggcaggcgaaaaagctgaccactgacgcttctgaatgggaagtcttgctggatggcgaaaaagtgggcgaagtgaaatggtcgctggtgggcgaacataatatgcacaatggcctgatggcgattgcggcggctcgccatgttggtgtagcgcctgcagatgccgctaacgcgctgggttcgtttattaacgctcgtcgccgtctggagttgcgtggtgaagcgaatggcgtgacggtatatgacgattttgcccatcacccgacggcaattctggcaacgcttgcggcgctgcgtggcaaagttggtggtacggcgcgcattattgctgtgctggagccgcgctcgaataccatgaaaatggggatctgcaaagacgatctggcaccttcattaggtcgtgccgatgaagtcttcctgctgcaaccggcgcatattccgtggcaggtggcagaagtggcagaagcctgcgttcagcctgcacactggagtggcgatgtggatacgctggcagatatggtggtgaaaaccgctcagcctggcgaccatattctggtgatgagcaacggcggttttggtgggatccatcagaaactgctggatggtctggcgaagaaggcggaagctgcgcagtaa

SEQ ID NO: 32549 - DNA, 999 bp, Escherichia coli
atgaaaacgttaggtgaatttattgtcgaaaagcagcacgagttttctcatgctaccggtgagctcactgctttgctgtcggcaataaaactgggcgccaagattatccatcgcgatatcaacaaagcaggactggttgatatcttgggtgccagcggtgctgagaacgtgcagggcgaggttcagcagaaactcgacttgttcgctaatgaaaaactgaaagccgcactgaaagcacgcgatatcgttgcgggcattgcctctgaagaagaagatgagattgtcgtctttgaaggctgtgaacacgcaaaatacgtggtgctgatggaccccctggatggctcgtccaacatcgatgttaacgtctctgtcggtaccattttctccatctaccgccgcgttacgcctgttggcacgccggtaacggaagaagatttcctccagcctggtaacaaacaggttgcggcaggttacgtggtatacggctcctctactatgctggtttacaccaccggatgcggtgttcacgcctttacttacgatccttcgctgggcgttttctgcctgtgccaggaacggatgcgcttcccggagaaaggcaaaacctactccatcaacgaaggaaactacattaagtttccgaacggggtgaagaagtacattaaattctgccaggaagaagataaatccaccaaccgcccgtatacctcacgttatatcggttcactggttgcggatttccaccgtaacctgctgaaaggcggtatttatctctacccaagcaccgccagccacccggacggtaaactgcgtttactgtatgagtgcaacccgatggcattcctggcggaacaagcgggcggtaaagcgagcgatggcaaagagcgtattctggatatcatcccggaaaccctgcaccagcgccgttcattctttgtcggcaacgaccatatggttgaagatgtcgaacgctttatccgtgagttcccggacgcgtaa

SEQ ID NO: 32550 - DNA, 996 bp, Escherichia coli
atgataaaacgtaacttgccgctgatgatcaccatcggcgtctttgtgctgggctatctctactgcctgacccagtttcccggttttgcttccacaagagtgatctgcaatatcctgaccgataacgcctttcttgggataatcgccgttggcatgacctttgtgatcctctctggcggtatcgatctctccgtcggttcggtgatcgcctttactggcgtgtttctggcaaaagtgattggcgatttcggcctctcgccgctgctggcgtttccgctagtgctggtgatgggctgtgcctttggcgcatttatggggcttttgatcgacgccctgaagatcccggcatttatcattaccctggcaggaatgttctttttgcgcggcgtcagctatctcgtttcagaagagtcgatcccgataaaccatcccatttatgacacgctctcaagccttgcgtggaaaatccctggcggcggtcgcttaagtgcgatgggactgctgatgctggcggtggtggttatcggcatattcctcgcgcatcgtacccgttttggtaatcaggtatacgccattggcggcaacgcaacgtcggcaaacctgatggggatttctacccgcagcaccactattcgcatttatatgctctccaccggactggcaacgctggcggggattgtcttctcgatttatacccaggccggatatgcgctggcgggcgtaggtgtggaactggatgctatcgcctcagtggtaattggcggtacgcttttgagcggtggcgttggaacggtattagggacgctttttggcgtggcgattcaggggctaattcagacttatatcaactttgacggtacgctgagttcctggtggacgaaaatcgccatcggcattttgctgttcatttttattgccttacagcgtggattaacggtgctgtgggagaatcgtcagagttcgccagtgacaagagtcaacattgcgcagcgataa

SEQ ID NO: 32551 - DNA, 417 bp, Escherichia coli; identical to SEQ ID NO: 32535

SEQ ID NO: 32552 - DNA, 390 bp, Escherichia coli
  misc_feature (217)..(226): n is a, c, g, or t
atgactaaacagcgtcttattcaactcattcatattgcccgcagcgatctccagatggatgaggacacctaccgccagatgctacagggtctgactggcaaagcctcaaccaaagggatggataccccgcagctaaaccgcgtgctggaatccatgaaaaagaaaggctttcgcattaagcctgccgggaaagctaggtccggcttaccgctggatnnnnnnnnnngcagtcaaagaaaatccgtgcgctatggcttgaaatggctgcggcaggcgtcgtccgtgactgttcagagcaggcgctggcgttgtgggttaaacgggaaacgggcatcagcgcgttacgctggctcagcaatgagcaggcaagtagcgttattgagaaactga

SEQ ID NO: 32553 - DNA, 690 bp, Escherichia coli
atgccgcagaataatgaaaagctgctggagaagttaaaaaagttgctggcgctggctaaatccgacaatccccatgaagcggcactggccctgcaacgcgcccagaaactgatgcacgcgtataacatcacccaggctgacctcgcactcagtgatattgatgaaagcgtcagtaactactgggctgcaggtagcgttaatccgccgcgttacatgctgggtctactggatattatccaggtggcatttggcgttaagtctattattcactccggctttaaacccagcgttggtttttacggtaataaagaccgggttgaactggcctcatatacatgggaagtactggccagacaattaatcgtggcccgtaaaaactacattcgacagcagaataaaaggatcaaaaacacgaccaagaccagccgtggtgacaagtttgccgaaggctgggttctggccgtgcgcagcgaggttcatttgtttgctatgtcccgcgaagaacgggagctggcaagcctctggcttgaacaaaaataccctgactcaggcacaactacgggccgtggggccgggaaatcacgtgacgcagacatgtcccgccacatcggttacagagaaggggaaaacatccgcctgcatcagcccgtcggcgggcaggaacagcggaagctggggagtggcttatga

SEQ ID NO: 32554 - DNA, 534 bp, Escherichia coli
atgactatgcgcaaattatttttaccgttgatatttgttttatctgggtgtggagataataccgatcctgctgatacgtccaccacagcaaaggagcacacggtttttagcgttgaaacagataatccggttataaaacgcgaattaccgtttattcgccaacaactccccggcctggataagtacgcggacagttttgaaaaaatcgaagtatccgaggatagcgaacgcccggtgacaacggtgcagtttcatattaaagacgaaaataatattccaagtgactacatagcctctggtcataactgttatttgttcatatcaaataatgcccacgaagtgaaaatatctaaatcagcatgtcaggctgtttttttcgataaaacggatgttcccggtggagacctgaccgtgaaacttgataaggaaaaagttcctatgacagatgatggtaagtccccgcgagcaggttgtttgaaggcttattcaccagagccagataatggttattggacttgtccaaggcaggattaa

SEQ ID NO: 32555 - DNA, 333 bp, Escherichia coli
  misc_feature (259)..(268): n is a, c, g, or t
atgactgaaccgaaacagcctggttttaaaaaagggttcctctttgggatcagaaccggagagagaaataaaacttacacgctaagcgtggatgcatgttgcccaaccgaagcgattgcagaactgaaaaacgcgctggttgcacttgaagagagaagaagtcatttcgccatcggagaaaacaacgtcatgatgattggcaatgtggcggcgacatcaagatataaagccgcacctaatcctgctactcagttatccnnnnnnnnnngcgaacaacgaatactggaagcggaatcagcagttcccagaacggttcttcctcaccagtcttaa

SEQ ID NO: 32556 - DNA, 153 bp, Escherichia coli
atggttgacggggataccggtaatgcggcgctggttattcttcacctgttgcagtcagaagaagccattacgctgactttcttgagccggtgttttgagttgattggccagagcctgcaatggtttgccatccataatttaaccttcttctga

SEQ ID NO: 32557 - DNA, 1437 bp, Escherichia coli
atggccagcattaaagacatccgcccattcgcccccggcattcccccatcttccgttaacccaggcgtacgcccaccagggcagttcttcctgccggtggaactcaagaatgaaattttgcggaacatgaagtatatcggcccgcaaatatttagctggggtgatgaccaccggcagatcattgacctcagtaccgcgggcgaagtgaaaatacatatggtagacaataccatcatcacgttggagcgcctgaatccgaatccgcaacataacgagttcatgatggtcgccgaatggtgccaatgggctatggagcgggatggtttgcaagaaaacctgcaaaaaaacctgtacgaaatcctggaagaaaaccagcaaaacaaacagtcagaaattccccaagaagacctgaaagaaagtctggaagaaatcaaggaaaatatcctggaagaaaacctgccagcaagccggattgaaaaccgggcagaagcattgcgcagaatgaaggaatgtctcattacaagacggagtatgctcaatcttagcaaccttggattgacttcactccctgaaaatttgcctccacatctgattgaattttactgcagtaaaaacgtgttgaccgcgttaccgaaggtgatgccaaagtggctgctggtgcttgactgtacagataacgtcttgatcttgttaccgaaggtgcagccctcaaaactgatggtactgaattgctatgacaactgtattatctggctgcctgagctgtcgactaacctgagagtgattaactgttctgaaaacttcttgcaatttttaccgccgtcgatgccccagtacctgtataaactatcctgtgccggcaacaatattaactcaatacctgatgagatgctggagaacttgactcgcctgaaagtatttgactgttctagtaacgatttgatctctgcaccacggctgccgcccaaactaatcatatactactgtggagaaaaccagtttaaaacggtaccggtgccgcagccccgaagcctgaaggtgtttagctgtaatggtaacccgtgggacaaagacaatttaccgacgctgctcaaagccgtcgagggcctgaaaaaccaggagggtctggaggagcttttggactttttgcacaaggagtgccagatgaagctggagaagttggagaagctggaggatctggatgaccttatggttctggagctcctggatgacccggtactcctggagcgcgtgaaggtacaggaggacctggagctcctggatcagcagttgggcctgttgagtctggaaagacaacaggactcgcagcctgttaatcaacattctgaacatgaacccgaatctgcatcaagggtgaagcgtgatttatctgaagtcgagttcgagtcaacaatgaaacgtaagcgttttatgtag

SEQ ID NO: 32558 - DNA, 1071 bp, Escherichia coli
atgacccgtccgatacaggccagcctcgatctgcaggcattaaaacagaatctgtccattgtccgccaggccgcgccgcacgcgcgcgtctggtcggtggtaaaagcgaacgcttacgggcacggtattgagcgtatctggagcgcgctcggggccaccgatggctttgcattacttaacctggaagaggcaataacgttacgtgagcgcggctggaaaggaccgatcctgatgctggaaggatttttccatgctcaggatctggagatttatgaccagcaccgcctgaccacctgcgtacacagcaactggcagctcaaagcactgcaaaatgcacggctaaaagccccgttggatatttatcttaaagtgaacagtgggatgaatcggttgggcttccagcccgatcgcgtgcttaccgtctggcagcagttgcgggcgatggcgaatgttggcgaaatgaccctgatgtcgcattttgccgaggcggaacatcctgatggaatttccagcgcgatggcgcgtattgagcaggcggcggaagggctggagtgtcggcgttcgttgtccaattcggcggcgactctgtggcacccggaagcgcattttgactgggttcggcctggcattattttgtatggcgcttcgccgtccggtcagtggcgtgatatcgccaataccggattacgtccggtgatgacgctaagcagcgagattattggtgtccagacgctaaaagcgggcgagcgtgtgggctacggcggtcgctatactgcgcgcgatgaacagcgaatcggcattgtcgccgcaggatacgccgacggttatccgcgccacgcgcctaccggtacccctgttttagtggacggcgtgcgcaccatgacggtggggaccgtctcgatggatatgctggcggtcgatttaacgccttgcccgcaggcgggtattggtacgccggttgagctgtggggcaaggagatcaaaattgatgatgtcgccgccgctgccggaacggtgggctatgagttgatgtgcgcgctggcgttacgtgtcccggttgtgacagtgtaa

SEQ ID NO: 32559 - DNA, 1299 bp, Escherichia coli
atgcgagttgtcatactgggaagtggtgtggtaggcgttgccagcgcctggtacttaaatcaggcaggacatgaggtcaccgtcattgatcgggagccgggggccgccctggaaaccagtgccgcgaatgccgggcaaatctcccccggatatgcagcaccgtgggcggcaccaggtgtgcctttaaaagcgattaaatggatgttccagcgccatgcgccgctggcggttcgtctcgacggtacgcagttccagttgaaatggatgtggcaaatgttacgtaactgcgacaccagccactacatggaaaacaaagggcggatggtgcgtctggcggaatacagccgtgattgcctgaaagcattgcgcgccgaaaccaatattcagtatgaagggcgtcagggtgggacgctgcaactgttccgtaccgaacaacagtatgaaaatgcgacccgcgatatcgccgtgctggaagatgccggcgtaccgtaccagctgctggaatccagccgtctggcggaagtggagcccgcgctggcagaagtggcgcacaaactgacgggggggctccagctgcccaatgatgaaaccggagactgccagctgtttacccagaatctggcgcggatggcggagcaggcgggggttaaattccgctttaatacgcccgttgaccaactgctttgcgacggcgagcaaatctacggcgtgaagtgtggcgatgaagtgattaaggccgatgcgtatgtgatggcgtttggttcttactcgacggcgatgctcaaaggcatagttgatattccggtgtatcctttgaaaggctactcgctgaccattcccattgcgcaggaagatggtgcgccggtatccaccattcttgatgaaacctacaaaatcgccattacccgtttcgataaccgcattcgtgttggcggaatggcggaaattgttggttttaataccgagctgttgcaaccgcgtcgtgaaacgctggagatggtggttcgcgatctctatccacgcggcggtcatgtcgagcaggcgactttctggactggtctgcgcccgatgacgccagacggcacgccggttgtcgggcgtacacgctttaaaaatctgtggctgaataccggtcacggcacgctcggctggacgatggcttgcggttccggtcagttgttaagcgatctgctctctggtcgcacgccagcgatcccgtatgaagatctaagcgtagcgcgctacagccgtggatttacgccatcacgcccgggccatttacatggcgcacacagctaa

SEQ ID NO: 32560 - DNA, 1533 bp, Escherichia coli
atggcgacgatcgattctatgaataaggacaccacacgtttgagcgatggacccgactggacgttcgacctgctggatgtttatctggcagagatagaccgggtggcgaaactctaccggctggatacctacccgcaccagattgaagtgataacctcagaacagatgatggatgcctactccagcgtcggcatgcccattaactatccgcactggtcattcggtaaaaagtttatcgagactgaacggctgtataagcacggtcagcaaggactggcctatgaaatcgtcattaactctaacccgtgtatcgcttacctgatggaagaaaacaccattaccatgcaagcgctggtgatggcacacgcctgctatgggcataactctttcttcaaaaacaattacttattccgtagctggaccgacgccagttcgattgtcgattatctgatttttgcccgtaaatatattaccgagtgcgaagaacgttatggcgttgatgaagtagaacggcttctggactcgtgccacgcgctgatgaactacggcgtggaccggtacaaacgcccgcaaaaaatctcgctgcaagaagagaaagcccggcagaaaagtcgcgaagagtatctgcaaagtcaggtcaatatgctctggcgtaccctgccgaagcgcgaggaagagaaaacggttgctgaagcgcgccgctatccgtccgagccacaagaaaacctgctctattttatggagaaaaatgcgccactgctggaatcatggcagcgtgaaattctgcgtattgtgcgtaaggtgagccagtatttttatccgcaaaaacagactcaggtgatgaacgaaggctgggcgaccttctggcactacaccatccttaaccatctgtatgatgaagggaaagtaacggaacgttttatgctggagtttttgcacagccacaccaatgtggtcttccagccgccctataacagcccgtggtacagcggcatcaacccgtatgccctcgggttcgccatgttccaggatattaaacggatttgtcagtcgccaacggaagaagacaaatactggttcccggatatcgccggttccgactggctggaaacgctgcatttcgcgatgcgtgatttcaaagatgagagttttatcagccagttcctgtcaccgaaagtgatgcgtgatttccgcttcttcaccgtgctggatgacgatcggcataattatctggagatttccgctattcataatgaagaaggttatcgggagatccgtaaccggttatcgtctcaatataatttaagtaatctggagccgaatattcagatctggaacgtggatttgcgcggcgaccgttcgctgacgctgcgttacattccacataatcgcgcaccgctggatcgggggcgcaaagaagtactgaagcatgtgcatcgcctgtggggatttgatgtaatgctggaacagcaaaacgaagacggcagcgtcgagttgctggaacgttgcccgccgagaatgggaaatctgtaa

SEQ ID NO: 32561 - DNA, 720 bp, Escherichia coli
atggtcattaaggcgcaaagcccggcaggtttcgcggaagagtacattattgaaagtatctggaataaccgcttccctcccgggactattttgcccgcagaacgtgaactttcagaattaattggcgtaacgcgtactacgttacgtgaagtgttacagcgtctggcacgagatggctggttgaccattcaacatggcaagccgacgaaggtgaataatttctgggaaacttccggtttaaatatccttgaaacactggcgcgactggatcacgaaagtgtgccgcagcttattgataatttgctgtcggtgcgtaccaatatttccactatttttattcgcaccgcgtttcgtcagcatcccgataaagcgcaggaggtgctggctaccgctaatgaagtggccgatcacgccgatgcctttgccgagctggattacaacatattccgcggtctggcgtttgcttccggcaacccgatttacggtctgatccttaacgggatgaaaggactgtatacgcgcattggtcgtcactatttcgccaatccggaagcgcgcagtctggcgctgggcttctaccacaaactgtcggcgttgtgcagtgaaggcgcgcacgatcaggtatacgaaacagtgcgtcgctatgggcatgagagtggcgagatttggcaccggatgcagaaaaatctgccgggtgatttagccattcaggggcgataa

SEQ ID NO: 32562 - DNA, 1542 bp, Escherichia coli
atggagatctcctggggccgcgcgctatggcgcaattttttgggccagtcccccgactggtacaaactcgccctcatcattttcttaatcgtaaatccgttaattttcctcatcagccctttcgtcgcgggctggttgctggtagcggaatttattttcactctggcgatggccctgaaatgctacccgctgctccccggtggtctgttggctatcgaagcggtattcatcggcatgaccagcgcggaacacgtccgtgaagaggtggcggcaaatcttgaagtcttgctgttactgatgtttatggtggcgggtatctattttatgaaacagctattgctgttcatatttacccgtttgctgttaagcattcgctccaaaatgctgctgtcgctctctttttgcgtggcggcggcgttcctctccgcgttcctcgatgccttaaccgtcgtggcggtggtgatcagcgttgcagtcggtttttatgggatttatcaccgcgtagcctcttcccgtaccgaagataccgacctgcaagacgatagtcatatcgacaagcattacaaagtggttctggaacagttccgtggctttctgcgtagcctgatgatgcatgccggtgtcggcactgcattaggcggcgtgatgaccatggtgggcgaaccacagaacctgatcatcgctaaagcggctggctggcattttggcgatttcttcctgcgcatgtcgccggtgaccgttccggttctgatttgtggcctgttaacctgcctgctggtagagaagctgcgttggtttggctacggtgaaacgctgccggagaaagtccgcgaagtgttgcaacagtttgacgatcaaagccgccaccagcgtacccgtcaggataaaatccgtctgattgtccaggcgattattggcgtctggctggtgactgcgctggcgttgcatctggcggaagttggcttgattggtttgtcggtcattattctggcgacatcattgaccggtgtcaccgatgaacatgctatcggtaaagccttcaccgaatctctgccattcaccgcactgttgacggtgtttttctcggtagtcgcggtgattatcgaccaacaactgttttcgccgattattcagtttgtgttgcaggcatcggaacatgctcagctgtcgctgttctatattttcaacggtctgctgtcatccatttcggataacgtcttcgtggggacgatttatatcaacgaagcgaaagcggcaatggaaagcggcgctatcacgttgaagcaatacgagctgctggcggtcgccattaataccggtaccaatctgccctccgtcgctacgccgaacggtcaggctgcgttcctgttcctgctgacctctgcactcgcgccattgattcgcctctcttatggccgcatggtgtggatggccctgccttacaccctcgtactgacactcgtcggactactttgcgtcgagtttacgcttgcccctgtaaccgaatggtttatgcaaatgggctggatagcaacgctttga

SEQ ID NO: 32563 - DNA, 531 bp, Escherichia coli
atgttgcgatttttgaaccaatgttcacaaggccggggcgcgtggctgttgatggcgtttactgctctggcactggaactgacggcgctgtggttccagcatgtgatgttactgaaaccttgcgtgctctgtatttatgaacgctgcgcgttattcggcgttctgggtgctgcgctgattggcgcgatcgccccgaaaactccgctgcgttatgtagcgatggttatctggttgtatagtgcgttccgcggtgtgcagttaacttacgagcacaccatgcttcagctctatccttcgccgtttgcgacctgtgattttatggttcgtttcccggaatggctgccgctggataaatgggtgccgcaagtgtttgtcgcctctggcgattgcgccgagcgtcagtgggattttttaggtctggaaatgccgcagtggttgctcggtatttttatcgcttacctgattgtcgcggtgctggtggtgatttcccagccgtttaaagcgaaaaaacgtgatctgttcggtcgctaa

SEQ ID NO: 32564 - DNA, 1269 bp, Escherichia coli
atgtttgccctctgtgatgtaaacgcgttttatgccagctgtgagacggtgtttcgccctgatttatggggtaaaccagtggttgtgctatcgaataatgacggttgcgttatcgcccgaaacgctgaggcaaaggcgctgggtgttaaaatgggcgatccctggttcaaacaaaaagatctgtttcgtcgctgtggcgtggtttgctttagcagcaattatgagctttacgcagacatgagcaatcgggtgatgtcgacgctggaagagctatcgccccgcgtcgagatttacagtattgatgaggcattctgcgatctgaccggtgtgcgtaattgtcgcgatctgactgatttgggcagagaaattcgcgcaacggtactacaacgtacccatcttactgttggtgtggggatcgcccagaccaaaacgctggctaagcttgccaatcatgcggcaaaaaaatggcagcggcagacgggtggggtggtggatttatcaaatctggaacgccagcgtaaattaatgtctgctctccccgtggatgaagtctgggggattggacggcggatcagcaaaaaactggacgcgatggggatcaaaaccgttctcgatttggcggatacagatatccggtttatccgtaaacattttaatgtcgtgctcgaaagaacggtgcgtgaactgcgcggtgaaccctgtttgcaactggaagagtttgcaccgacaaagcaggaaattatctgttcccgttcgtttggtgaacgcatcacggattatacgtcgatgcggcaggccatttgtagttacgctgcccgggcggcggaaaaacttcgcagtgagcatcaatattgtcggtttatttccacgtttattaagacgtcaccatttgcgctcaatgaaccttattacggcaatagcgcgtcggtaaaactgctgacacccactcaggacagcagggatatcattaacgccgctacgcgatctctggatgccatctggcaagcgggccatcgctaccaaaaagcgggcgtgatgctgggagatttcttcagtcagggagtcgcgcagctcaatttattcgatgacaacgcaccgcgccccgggagtgagcaattgatggcggtaatggatacgctaaatgctaaagagggcagaggaacactctattttgctgggcaggggatccagcaacaatggcagatgaagcgtgccatgctttcaccacgttatacaacgcgaagttctgatttactgcgggtcaaataa

SEQ ID NO: 32565 - DNA, 420 bp, Escherichia coli; identical to SEQ ID NO: 28207

SEQ ID NO: 32566 - DNA, 912 bp, Escherichia coli
atgactgaaatcgttgcagataaaacggtagaggtagttaaaaacgcaatcgaaaccgcagatggagcattagacctttataataaatatctcgatcaggtcatcccctggcagaccttcgatgaaaccataaaagagttaagtcgctttaaacaggagtattcacaggcagcctccgttttagttggcgatattaaaaccttacttatggatagccaggataagtattttgaagcaacccaaacggtgtatgaatggtgtggtgttgcgacgcaattgctcgcagcgtatattttgctatttgatgagtacaatgagaagaaagcatccgcccagaaagacattctcattaaggtactggatgacggcatcacgaagctgaatgaagcgcaaaaatccctgctggtaagctcacaaagtttcaacaacgcttccgggaaactgctggcgttagatagccagttaaccaatgatttttcagaaaaaagcagctatttccagtcacaggtagataaaatcaggaaggaagcgtatgccggtgccgcagccggtgtcgtcgccggtccatttggattaatcatttcctattctattgctgcgggcgtagttgaagggaaactgattccagaattgaagaacaagttaaaatctgtgcagagtttctttaccaccctgtctaacacggttaaacaagcgaataaagatatcgatgccgccaaattgaaattaaccaccgaaatagccgccatcggggagataaaaacggaaactgaaacaaccagattctacgttgattatgatgatttaatgctttctttgctaaaagaagcggccaaaaaaatgattaacacctgtaatgagtatcagaaaagacacggtaagaagacactctttgaggtacctgaagtctga

SEQ ID NO: 32567 - DNA, 447 bp, Escherichia coli
atgagcgatgtacctttctggcaaagtaaaaccctggacgaaatgagcgatgcggaatgggagtcgttgtgtgatggttgcggtcagtgttgcctgcataaactgatggatgaagacaccgacgaaatctacttcactaacgtcgcctgtcgccagctcaatattaaaacctgtcaatgtcggaactacgaacgtcgtttcgagtttgaacccgactgcattaaattaacccgtgaaaatctgccaacattcgaatggctgccaatgacctgcgcttatcgtttgctggcggaaggtaaagatttacctgcgtggcatccgctgcttactggttcgaaagcggcaatgcatggtgaacgtatctctgtgcgtcatatcgcagtgaaagaatcagaagtgattgactggcaggatcatatcttaaataaacctgactgggcgcagtga

SEQ ID NO: 32568 - DNA, 660 bp, Escherichia coli
atgtatcaacatcacaactggcaaggtgcgctgctggattatccggtgagtaaagtagtctgtgttggcagtaactatgccaaacatattaaagagatgggtagcgcagtgcccgaagagccagtgctgtttattaaaccagaaacggcactgtgcgatctgcggcagccattggcgatcccatccgatttcggttcagttcatcatgaagtcgaactggcggtattgattggcgcgacgctgcgtcaggctacggaagagcatgtccgtaaagccattgccggttacggcgtggcgctcgatctgacattgcgtgatgttcagggaaaaatgaagaaagccgggcagccgtgggaaaaggccaaagcgtttgataactcttgtccgctttccgggtttattcccgcggcggaattcaccggcgatccgcaaaatacaacgctgggcctgagcgtaaacggcgaacaacgccagcaaggtacgactgcggacatgatccataaaatcgttccgctgatcgcttatatgagcaagttttttaccctcaaggccggtgacgttgtgttgacaggcacgcctgatggcgtcggcccgttgcaaagcggtgatgagctgacagtcactttcgatgggcattctttgacaactcgcgttttgtaa

SEQ ID NO: 32569 - DNA, 294 bp, Escherichia coli
atgttttgtgtgatttatcgaagcagcaagcgtgaccagacctatttatatgtcgaaaaaaaagacgatttttcgcgtgtacctgaggaactgatgaaaggttttggtcagcctcagttagcgatgattctgccgctggatgggcggaagaaactggtcaatgccgatattgaaaaggttaaacaggcattaaccgagcaaggttactatttgcagttaccgccaccacccgaagatttgctgaagcaacatctttccgtcatggggcagaaaacacacgacacgaacaaataa

SEQ ID NO: 32570 - DNA, 402 bp, Escherichia coli
atgaaaatcaagggcatcagtaaggctgtattattgcttgcactgctaacctccacgagctttgctgcgggtaagaatgtcaatgttgagttcagaaaaggccatagcagcgctcagtactccggcgaaataaagggatacgattacgatacatataccttctatgccaaaaaaggtcagaaagtgcatgtgagtatctctaatgaaggcgctgatacttacctcttcgggccaggaatcgatgattctgttgatttatccagatattccccagaactcgatagtcacggacaatactcactccctgcttctggcaaatatgagctgcgagtgctgcaaactcgaaacgacgcccgtaaaaacaaaactaaaaaatataacgtcgatattcaaattaagtaa

SEQ ID NO: 32571 - DNA, 342 bp, Escherichia coli
atgactgacacgcattctattgcacaaccgttcgaagcagaagtctccccggcaaataaccgtcatgtcaccgtcggttatgcgagtcgctacccggattacagccgtattcccgccatcaccctgaaaggtcagtggctggaagccgccggttttgccactggcacggcggtagatgtcaaagtgatggaaggctgtattgtcctcaccgcccaaccacccgccgccgaggagagcgaactgatgcagtcgctacgccaggtgtgcaaactgtcggcgcgtaaacaaaagcaggtgcaggcgtttattggagtgattgccggtaaacagaaagtcgcgtaa

SEQ ID NO: 32572 - DNA, 1398 bp, Escherichia coli
atgaggaaggcatatcttatggaatctattcaaccctggattgaaaaatttattaagcaagcacagcaacaacgttcgcaatccactaaagattatccaacgtcttaccgtaacctgcgagtaaaattgagtttcggttatggtaattttacgtctattccctggtttgcatttcttggagaaggtcaggaagcttctaacggtatatatcccgttattctctattataaagattttgatgagttggttttggcttatggtataagcgacacgaatgaaccacatgcccaatggcagttctcttcagacatacctaaaacaatcgcagagtattttcaggcaacttcgggtgtatatcctaaaaaatacggacagtcctattacgcctgttcccaaaaagtctcacagggtattgattacacccgatttgcctctatgctggacaacataatcaacgactataaattaatatttaattctggcaagagtgttattccacctatgtcaaaaactgaatcatactgtctggaagatgcgttaaatgatttgtttatccctgaaaccacaatagagacgatactcaaacgattaaccatcaaaaaaaatattatcctccaggggccgcccggcgttggaaaaacctttgttgcacgccgtctggcttacttgctgacaggagaaaaggctccgcaacgcgtcaatatggttcagttccatcaatcctatagctatgaggattttatacagggctatcgtccgaatggcgtcggcttccgacgtaaagacggcatattttacaatttttgtcagcaagctaaagagcagccagagaaaaagtatatttttattatagatgaaatcaatcgtgccaatctcagtaaagtatttggcgaagtgatgatgttaatggaacatgataaacgaggtgaaaactggtctgttcccctaacctactccgaaaacgatgaagaacgattctatgtcccggagaatgtttatatcatcggtttaatgaatactgccgatcgctctctggccgttgttgactatgccctacgcagacgattttctttcatagatattgagccaggttttgatacaccacagttccggaattttttactgaataaaaaagcagaaccttcatttgttgagtctttatgccaaaaaatgaacgagttgaaccaggaaatcagcaaagaggccactatccttgggaaaggattccgcattgggcatagttacttctgctgtgggttggaagatggcacctctccggatacgcaatggcttaatgaaattgtgatgacggatatcgcccctttactcgaagaatatttctttgatgacccctataaacaacagaaatggaccaacaaattattaggggactcatag

SEQ ID NO: 32573 - DNA, 1047 bp, Escherichia coli
gtggaacagcccgtgatacctgtccgtaatatctattacatgcttacctatgcatggggttatttacaggaaattaagcaggcaaaccttgaagccatacccggtaacaatcttcttgatatcctggggtatgtattaaataaaggggttttacagctttcacgccgagggcttgagcttgattacaatcctaataccgagatcattcctggcatcaaagggcgaatagagtttgctaaaacaatacgcggcttccatcttaatcatgggaaaaccgtcagtacttttgatatgcttaatgaagacacgctggctaaccgaattataaaaagcacattagccatattaattaagcatgaaaagttaaattcaactatcagagatgaagctcgttcactttatagaaaattaccgggcattagcactcttcatttaactccgcagcatttcagctatctgaatggcggaaaaaatacgcgttattataaattcgttatcagtgtctgcaaattcatcgtcaataattctattccaggtcaaaacaaaggacactaccgtttctatgattttgaaagaaacgaaaaagagatgtcattactttatcaaaagtttctttatgaattttgccgtcgtgaattaacgtctgcaaacacaacccgctcttatttaaaatgggatgcatcgagtatatcggatcagtcacttaatttgttacctcgaatggaaactgacatcaccattcgctcatcagaaaaaatacttatcgttgacgccaaatactataagagcattttttcacgacgaatgggaacagaaaaatttcattcgcaaaatctttatcaactgatgaattacttatggtcgttaaagcctgaaaatggcgaaaacatagggggattattaatatatccccacgtagataccgcagtgaaacatcgttataaaattaatggcttcgatattggcttgtgtaccgtcaatttaggtcaggaatggccgtgtatacatcaagaattactcgacattttcgatgaatatctcaaataa

SEQ ID NO: 32574 - DNA, 6345 bp, Escherichia coli
atgactacacgctatttttcgtcacttattgaacaatcgttgtctcgttcaactgaagcaacgctcagtatcatgggcgttaccaacccgcagctgcgtgaacatctcgcgcaacaaatgggggctgattgtgggaaaccgggctcattccttgcttctccggtattccagcaaatgtttggctggaaggagtcaaaccacacgatgcgcagcctgacggaaggcaacgcattgttgagcaaagcagtggttgattcactggatgatcagaataatggccggtaccggtttggtgctgactggaggccttttacgcaccagttagccagttggaaagctttgctggaaaagaaacattcagtggtggtaaccagtggtacgggttcaggtaaaacggaatgttttatggtaccggtgctggaagatctttaccgggaactgcatgaaaatggcaacaatccgttggtcggtgtccgagccctttttctctatccattgaacgccctgattaattcacagcgcgagcgtctggatgcctggacgcgtggttttggtacagggatccgctactgcctttacaacggcaacaccgaaaacctacacgcttcggtaaaaagcgaacaggcaaaaaggccgaatgaggtgctctcgcgcgaaaaaatgcgtgaagaacctgcgccgattctggtgaccaacggcacgatgctggaatatatgatggttcgccaggtcgacgccccgattatccagcaatctaaagcacaaaaatcactacgctggattgtactggatgaagcgcatacctatgtagggtcgcaggccgctgaactggcgctccagctgcgtcgtgtgatgaccgcgtttggcgtgacaccagatgacgtgcgctttgtcgcgacctctgcgaccattgccggcagcgacgctgaaaagcagctgaaaaaatttctctctgaattatccggtatcccgcaggagcgcatcgatgttctggacggaagtcgggtgattcctgaactggaaccatccaaaaacgtttctgttccgttagacgagatagagcaaatacctgatctggatctaagagataaaaatgataataaaattaaagggataagtcctgagcgcttttatgcgcttacgcattcccccgaagcgcgttacatacgtgagatgttggtcaaacagcccaatccgatgaagctggatgagataacagagcggttacacgtgctgacaaaacagcattacagccagcaggaagtactgcgttggatcgatgtctgttcagggactcaacctaatgcaaaggatcccgcatttcttaaagtcagggcgcatatcttccagcgtaatacccagggaatatgggcttgtgttgataaagattgcagattaaagcacggtacaccgctcgacaaaggctggccctttggctatgtgtatgtgaaccagcgacaaaattgtgactgtggaagccctgtatacgaagttgcattctgtaatgattgtaatgagcctcatcttctggcacgggacaaaaagggcaaactagtccagtgggaaaataaaggtggcgatgaattctctttgcaggatgaagtacctgttgaacatgacgctacagaagaaaaagtcgaaaaagagaacagttttcagcctccgttgattattgccgcaggagagaccagcgaggcaggttataccctacaacgcctcgaccgtcagacgcgccgtattggcgttattaacaatgacagcattccgctgattattaatgatattgaacaggtttgtagtgccagtggctgtggctacagaggcatgagtgggaaacagcccttccggcgtgcactattaggtgggccattttacgttactaatatcgtgcccaccgttctagagtattgtcaggactttaccagtgatgaaggcaaagagggcgtcggaccagattcgttgccaggacgaggtcgtcgactcatcacctttacagacagtcgacaagggacagcccgaatggcggtgcgtatgcagcaagaagcagaacgcagtcgcttacgcggaagcgtagtcgaaattctcagctggcatcaaaggacgcaaacgtctacagcgccgaatgccaatgccgatctggaaaaattagcggccagggcgaagcaagcccgtgagcaggcagaagaatatcgaagctggggaatgccagaccaggcgaaattgtcacaagcacaggctgaacagcttgaacaggcttatcaggctgcaaccggtgggaaagctgcgactatcctggtatcccgaacctggacggagatggttaacgagcttaaagagagagccgatatccgcgggccggttctgcaatataaccattatcttaagcctgaagtgtttaatgaaaacggcggcccccttaagctttctgaaatgttgttgttccgggaattcatgcgtcgccctaaacggactaacagcctggaaacacaggggctggttcaggttggttaccaggggctggagaaaatacataagagccccttgcactggcaggaaaaaggattaacgctggatgactggcgcgattttctcaaggttacgttggatcattacgttcgcgagagcaacttcacacagctggatgatgagctgaaaaactggattggtagccgtttttcatcaaaattcgtccgtaacccggaatcaaaagatcctgaagataatcagaacagacgctggcctcaaattcgtaatggcaacgtatcccatcgtttagcgaagttgctgatgctgggggctggattcaaaaccgtcaatgcggcaactattgatattatcaatacatggctgaaagaagcatgggcccaacttaccggaccgcttgcagtactgaaacccgatggcaaccgtttttatttaccgaaagagcatatgactttttctttaatcacggatgcctggatttgcccggtaaccaataaaatcctggatacggcttttaaaggcttaaccccttatctgcctacccatatttcgttcgagcatcttaccctggcgcaatatgacacttttgtcgcgcagaaagtcacaatgccggaaatctggaagctggatcgttcacaggaagactacgcagagggtctggcaaaagcacgcgactgggtcagccatgatccgctgatcgcacaattgcggtcggaaaacgtctggacagacattaacgatcgtgtcgtggaaggcggcttctactatcgtactgccgagcactctgcccagcagtcgtcagaacgtctgcaaagctatgaaaagatgttcaagaatgggcaactaaatgttctcaactgttccaccaccatggaaatgggggttgatatcgggggtattactgcggtggtaatgaacaacgtaccgccacatccggccaactatttacagcgcgccgggcgagccgggcgtagtaaagaatcacgcgcgatctcttacaccctatgtaaaggtaacccacacgaccagcaggtttttgccaacccgctctggccatttgaaaccatgatcccggcacccatggtcgcgatgaactccgcccgactggtgcaacgtcacgtcaatgcattattactgtccgactttttatgtaacgttattggcgaaaccgataaagaaaaaaccagcctcgatagcctctggtttttcggtgaagatgacgggcagtcaaaatgcgaacgctttaaaatctggctggaacgtccggttcttgatatcgacacggcgctggaacggctggtgaaaggtacggcgttgcatggtgcaagagccgaatatctgcgggataaaacaatcaacgcgatcaccttcctgcaacagcggtggctctccgtttatcgcgatctcgtgacacaggagcgtgagtcgcagccgcaaacgccttatcgtaagcgcatagagctggagaagaaacggcactgtggcgagtatctgctgcgcgatctggctgccagaaccttcctgccgggatacggtttcccgacagatgtagtgacgtttgataacttcacgatggaagattatatccgcgaaaaatcgcagaaaagtcgtgataaaaaggaccgtgaagataacgtttcccgttataaaggattaccttcccgtaacctcggtgttgccattcgtgaatatgcaccgggagcagagatcatccttgatggccgtgtcttccgctctgccggtgtctcactgcactggcacaacattaatgctgataccaatgaagcccagcgtctggattgcgcctggcgctgtcacaaatgcgggaccattggctatgaagaggggatgagcagttccgggatgctcttttgctccaatagcgcctgcggcgaaaaaataatcatggataatcgccgtcaggtgctgcagcctgccgggtttgtcaccgatgcacacgctccggtaacgaacaatattgaaaccatgaaattcgtcccggttgtccccgcgtgggtctttgttaaagcagagcccgtaccgttgcctaacccgctaatgggttatatggcttctggggctgatgggcatgttttccagcaaagtttgggggaaggtggacacggttatgcattgtgtctgagctgtggccgtgctgagtcgatgctgaatgaaaatgatgcgccgaaaagtatggaagctcactatccaccgcgtccgggtaaagcggatcgcgacagccagaatcatcgtctgatttgccccggttcgacggcactcatgaagaatgtcaccctgggcgcactggcgcgtaccgatgtctttgaaatggttctgcgcaaaccgcaaaacggcgagtatctgccagataacacagaggaggggcggattgttgccatgactctggcggttgctctgcgtcaggcgctggcgggcgttctgggtatctccgccgcagaactcggctattctgtacgtccggtcagactggaggatgggcaatcggtattagccgtacagctttatgatgtgatcagcggtggtgcaggttttgcctccagcgcaccggtacacattgaagctatattgcagggaatggtgaaacagttaggctgccgccattgtgagactgcatgtagtgaatgcctgcttgattcccagactcgccacgatcacgatttgctggatcgcaaagcggcgctggcctggcttggcgatgacttcacgtattacatcggtttaccggatgaagagacattctcgctgccggatgcccgctactgccctggcgccattggcgatacgattcgccgggcgattaacgaaggcgctgaaaagctcaccctgtggatgaccggcgcgcccaatgagtgggatttatacgcacgtcagttccgcgcggcggttcagaactatcggctaaaagacaacgtcgaggtcgatcttgttattcctacgggagtggatgacccggacctgttgcatgaactatcgcaatttactgcgctgggtgtgcggctgtgccatgttgaacaggatctgcaattaccgatcgttgcccaggtcacctttaccgatcgcgtgatgacgctggcctctcgcagccagcaggcaacgattccggggccggagtggcacctgaatgacgaactggtggtgcgtagtctcggttataaaacggtagaactgaacgagtttattctgccggctaaagccaccaacgctgtcgagcgggtcaaagacattcagatccacaaacagttgaatggaccactgtcgcagtttgggcaacgcttctgggacgtgctgtttaacgaccatgaagaagcgcagtcactgatgaataacacgcgaattaccggcgttcactataccgatcgctatctgcaaaacccggttgcgctggcgttgttgggatcaattctgagaccgctaaaaacaaagctgaccgatggcgctgaagtgacgctggatacgctatttaaagataaagatcgccccggtaaccggcctttccatgactggatgagcatagcggattttcaggatttcgctgatcagtggtttgctgctgcgctgggcaggccggtagaactgacggtgttcgactcgccgcgcgatatccctcaccatcgtaaactgacggtgacttttgaggatggtcaggtattgaagatccgcttcgatcaggggatgggctactggcgcatcaacttttcatcgcaatggcattactttgatttccgcgatgacgtttctttccagttagtcaaaatggctcaggcctgcaaggaagggaatgtcgccaacagcgaagagagttgggcaacggatgtgctggtggaggtgatcgcctcctga

SEQ ID NO: 32575 - DNA, 2685 bp, Escherichia coli; identical to SEQ ID NO: 32537

SEQ ID NO: 32576 - DNA, 606 bp, Escherichia coli; identical to SEQ ID NO: 32538

SEQ ID NO: 32577 - DNA, 165 bp, Escherichia coli; identical to SEQ ID NO: 14676

SEQ ID NO: 32578 - DNA, 534 bp, Escherichia coli; identical to SEQ ID NO: 32539

SEQ ID NO: 32579 - DNA, 642 bp, Escherichia coli
ttgcaggaagtaagttgcaaagatgaagatcatgccgccgatcagcgcggtcaggaaaatcgcacgcgggatcacgcgctctgcatctttggtttcttccgacaggttgctgatgccgtcaaagccggtaaaggagaagcacaggattgtcgccccggtaatcatcgggataacatgcgcatcgccagaccagaacggacgagtgctcgccagcgtacccgcgccttcaccttcaaatacgccataaacaaccatgcccaggatcaccgcgatcagcactacctgcaacacgacgattacagtgttgaagttcgctacggatttcagactacgcaggttaaaggcggtcataaaggccaccagcgccaccacaaacatccacgatggaatggaaggcaccagagcttcaaaatagattttcgccagcagaatgttgatcatcggcgcgaacagatagtcgagcagagaagaccaacccaccataaagccgacagtcgggctaatggatttctgggcgtaagtgtatgcagagccagcagaaggatagcggcgaaccagcttcccgtagctcagagccgtaaacaggatcgcaatcaatgcgaacgcataggctgtcggcacatgaccatccgtgaggcctga

SEQ ID NO: 32580 - DNA, 312 bp, Escherichia coli
gtgttccatggtgcccgcgccaccggaggcaatcagcgggacgtggcaaacttcacgcacttttttcagttgatcgaggtcgtaaccgtttcgtacgccgtcctgattcatcatgttgaggacgatttctccggctccacgtttttgcacttcctctacccagtcgagtgtttcccactgagtgacgcgggtgcggctttcatcgccggtatattgattcacatgatatttaccggtttcggcgtcgtaccaggtatcaataccgaccacaatacactgcacaccaaaacgatcggccaggcgagtaattaa

SEQ ID NO: 32581 - DNA, 1428 bp, Escherichia coli
atggcatttgatgatttacgcagctttttacaggcgcttgatgaccacggccagttactgaaaatcagcgaagaggtgaacgcggaaccggatctggcagccgcagccaacgccaccgggcgtatcggcgacggcgcgcccgcgctttggtttgataatattcgcggctttatcgatgcccgcgtggcaatgaacaccatcggttcctggcagaaccacgcgatttccctcggcctgccgccaaacaccccggttaaaaaacagattgatgagtttatccgccgctgggataacttccccattgccccggagcgccgcgccaatccagcctgggcgcagaacaccgtcgatggcgacgagattaacctgttcgatattctgccactgtttcgtttaaacgacggtgatggcggtttctatctcgacaaagcgtgcgtagtttcccgcgatccgctcgacccggataacttcggcaagcagaacgtcggtatctatcgtatggaagtgaaaggcaaacgtaagctcggcctgcaaccggtgccgatgcacgatattgccctgcatctgcataaagcggaagagcgcggtgaagatctgccgattgcgatcacgctcggtaacgatccgatcatcacgctgatgggggccacgccgctgaaatatgatcagtccgagtacgaaatggcgggcgcgctgcgcgaaagtccgtacccgattgccaccgccccactgaccggttttgatgtaccctggggctcggaagtgatcctcgaaggagtcatcgaaagccgcaaacgcgagattgaagggccattcggtgagtttaccggccactactcaggcgggcgcaatatgaccgtcgtgcgcattgataaagtctcttatcgcagcaaacccatttttgaatcgctctatctcgggatgccgtggacggaaatcgactacctgatggggccagccacctgcgtgccgctgtatcagcaactgaaagccgagttcccggaagtgcaggcggtgaacgccatgtacacccacggcctgctggcgattatctccaccaaaaaacgctacggtggctttgcccgcgcggtgggcctgcgtgcgatgaccacgccacacggtctgggctacgtgaagatggtgattatggtcgatgaagacgttgatccgttcaacctgccgcaggtgatgtgggcgctctcctcgaaagtgaacccggcaggggatttggtgcagttgccgaatatgtccgtgctggaactcgaccccggctcaagcccggccggtatcaccgacaagctgattatcgacgccaccacgcctgtcgccccggacaaccgtggtcactacagccagccggtggtggatttaccggaaaccaaagcctgggctgaaaaactgaccgctatgctggccgcacgtaaataa

SEQ ID NO: 32582 - DNA, 594 bp, Escherichia coli
atgagactgatcgtcgggatgacaggggctaccggtgcgcctcttggggtggcattactgcaagcgctgcgggagatgccgaatgtcgagactcatctggtgatgtcgaagtgggcgaaaaccaccattgaactggaaacgccttacagcgctcgcgatgttgccgccctcgcagacttcagccataacccggcggatcaggctgcgactatctcttccggctcctttcgtaccgacggcatgatcgttattccatgcagtatgaaaacgctcgccggtatccgcgctggttacgccgatggtctcgtagggcgcgcggcggacgtcgtgctcaaagaaggccgcaaactggtgctggtgccgcgtgaaatgccgcttagcacaatccatctcgaaaatatgctcgcactttcgcgcatgggtgtggcgatggtgccgccgatgcctgccttttataaccatcccgaaacggtagatgacattgtccaccatgtggtagcccgcgtgctggatcaatttggcctcgaacatcctcacgccaggcgctggcaaggattgccgcaggcccggaatttttctcaggagaatgaataa

SEQ ID NO: 32583 - DNA, 408 bp, Escherichia coli
atggcgttacgaaataaagcgttccatcagttacgacagctttttcagcagcacacggctcgctggcagcacgagttacctgacctcaccaaaccacagtacgcggtgatgcgcgccattgctgataagcctggtattgaacaggtggcactgatagaagcagcagtcagcaccaaagcaacgctggcagaaatgttggcaagaatggaaaatcgtggcttagtcagacgtgaacatgacgccgctgacaagcggcgacgctttgtctggctgactgccgaaggagaaaaggtacttgctgcggcgataccgattggtgacagtgtggatgcggaatttttggggcgtttgagtggagaagagcaggagctgtttatgcagctggtgcgcaagatgatgagcaaatag

SEQ ID NO: 32584 - DNA, 993 bp, Escherichia coli
atgagtcagaatacgctgaaagttcatgatttaaatgaagacgcggaatttgatgagaacggagttgaggtttttgacgagaaagccttagttgaagaggaacccagtgataacgatttggctgaagaggagctgttatcgcaaggggccacacagcgtgtgttggacgcgactcagctttaccttggtgagattggttattcgccactgttaacggccgaagaagaagtttatttcgcgcgtcgcgcactgcgtggagatgtcgcttcacgtcgccggatgattgaaagtaacctgcgtctggtcgtgaagattgcccgccgttatggcaatcgtggtctggcgctgttggacctgatcgaagagggcaacctggggctgatccgcgcggtagagaagtttgacccggaacgtggtttccgcttctcaacatacgcaacctggtggatccgccagacgatcgaacgggcgattatgaaccaaacccgtactattcgtttgccgattcacatcgtaaaggagctgaacgtttacctgcgaaccgcacgcgagttgtcccataaactggaccacgaaccaagtgcggaagagatcgcagagcaactggataagccagttgatgacgtcagccgtatgcttcgtcttaacgagcgcattacctcggtagacaccccgctgggtggtgattccgaaaaagcgttgctggacatcctggccgatgaaaaagagaacggtccggaagataccacgcaagatgacgatatgaagcagagcatcgtcaaatggctgttcgagctgaacgccaaacagcgtgaagtgctggcacgtcgattcggtttgctggggtacgaagcggcaacactggaagatgtaggtcgtgaaattggcctcacccgtgaacgtgttcgccagattcaggttgaaggcctgcgccgtttgcgcgaaatcctgcaaacgcaggggctgaatatcgaagcgctgttccgcgagtaa

SEQ ID NO: 32585 - DNA, 1140 bp, Escherichia coli
atgagcgcgggaagcccaaaattcaccgttcgccgcattgcggctttgtcactggtttcgctatggctggcaggctgttctgacacttcaaatccaccggcaccggtaagctccgttaatggcaatgcgcctgcaaataccaattctggtatgttgattacgccaccgccgaaaatgggaacgacgtctacagcgcagcaaccgcaaattcagccggtacagcagccacaaattcaggctactcaacaaccgcaaatccagccagtacagccagtagctcagcagccggtacagatggaaaacggacgcatcgtctataaccgtcagtatgggaacattccgaaaggcagttatagcggcagtacctataccgtgaaaaaaggcgacacacttttctatatcgcctggattactggcaacgatttccgtgaccttgctcagcgcaacaatattcaggcaccatacgcgctgaacgtcggtcagaccttacaggtgggtaatgcttccggtacgccaatcactggcggaaatgccattacccaggccgacgcagcagagcaaggagttgtgatcaagcctgcacaaaattccaccgttgctgttgcgtcgcaaccgacaattacgtattctgagtcttcgggtgaacagagtgctaacaaaatgttgccgaacaacaagccaactgcgaccacggtcacagcgcctgtaacggtaccaacagcaagcacaaccgagccgactgtcagcagtacatcaaccagtacgcctatctccacctggcgctggccgactgagggcaaagtgatcgaaacctttggcgcttctgaggggggcaacaaggggattgatatcgcaggcagcaaaggacaggcaattatcgcgaccgcagatggccgcgttgtttatgccggtaacgcgctgcgcggctacggtaatctgattatcatcaaacataatgatgattacctgagtgcctacgcccataacgacacaatgctggtccgggaacaacaagaagtgaaggcggggcaaaaaatagcaaccatgggtagcaccggaaccagttcaacacgcttgcattttgaaattcgttacaaggggaaatccgtaaacccgctgcgttatttaccgcagcgataa

SEQ ID NO: 32586 - DNA, 627 bp, Escherichia coli
atggtaagcagacgcgtacaagcacttctggatcaattacgtgcgcaaggtattcaggatgagcaggtgctgaatgcacttgccgccgtgccgcgtgaaaaattcgttgatgaagcgtttgaacaaaaagcctgggacaatatcgccttgccgataggtcaggggcagacaatttcgcagccgtatatggtggcgcgaatgaccgaattactcgagctgacgccgcagtcgcgggtgctggaaattggcaccggttcgggatatcaaacggcaatcctggcgcatcttgtccagcatgtttgctcggtcgaacggattaaaggtttgcagtggcaggcgcgtcgccgcctgaaaaatcttgatttacataatgtttcaacccgtcatggcgatggatggcaaggttggcaggcacgtgcgccgtttgacgctatcattgttacggcggcaccgccggaaattccaactgcactaatgacgcagctggacgaaggcgggattctcgtcttacccgtaggggaggagcaccagtatttgaaacgggtgcgtcgtcggggaggcgaatttattatcgataccgtggaggccgtgcgctttgtccctttagtgaagggtgagctggcttaa

SEQ ID NO: 32587 - DNA, 762 bp, Escherichia coli
atgcgcatattgctgagtaatgatgacggggtacatgcacccggtatacaaacgctggcgaaagccttgcgtgagtttgctgacgttcaggtggtcgcccccgatcgtaaccgcagcggcgcttcaaattctctgacactggaatcctccctgcgcacgtttacctttgaaaatggtgatattgctgtgcaaatgggaaccccgaccgattgcgtctatcttggcgtgaatgctctgatgcgtccgcgcccggacattgttgtgtccggcattaacgccgggccgaatctgggggatgatgttatttattccggtacggtagccgccgcgatggaaggccgtcatttaggttttccggcgctggccgtctcgcttgacgggcataaacattacgacactgccgcggcggtaacctgttcaattttgcgcgcactgtgtaaagagccgctgcgcaccggacgtattcttaatattaacgttccggatttaccattggatcaaatcaaaggtattcgcgtgacgcgctgcggtacacgacatccggcagataaggtgatcccgcagcaagatccgcgcggcaatacgctgtactggattggcccgccgggcggtaaatgtgatgccggtccggggaccgattttgctgcggtagatgagggctatgtctccatcacgccgctgcatgtggatttaactgcgcatagcgcgcaagatgtggtttcagactggttaaacagcgtgggagttggcacgcaatggtaa

SEQ ID NO: 32588 - DNA, 1050 bp, Escherichia coli
atgattgagtttgataatctcacttacctccacggtaaaccgcaaggcaccgggttgctgaaagccaatccggaagactttgtggtggtggaagatttgggctttgagcctgatggtgaaggtgagcatattctggttagaatcctcaaaaacggctgcaatacccgttttgtggcggatgcactggcgaaattcctgaaaattcatgcccgtgaagtcagcttcgctgggcaaaaagacaaacatgctgtaacggaacagtggttatgtgctcgcgtgccgggcaaggaaatgcccgatctgagcgcctttcaactggaaggctgccaggtgctggagtatgtgcggcacaagcgcaagctgcgtttaggggcgctgaaaggtaacgcctttaccctggttctgcgcgaagtgagcaatcgcgatgacgttgaacaacgtctgatcgatatttgcgtaaaaggtgtaccgaactacttcggtgcccaacgtttcgggattggcggtagcaacttgcagggcgcgctgcgctgggcgcaaaccaatactccggtgcgcgatcgcaataaacggagtttttggttgtcggcagcccgcagtgcgttgtttaatcagattgttgctgagcgcctcaaaaaagcagacgttaatcaagttgttgacggcgatgcgctacaattagccggacgtggtagctggtttgtcgcaaccaccgaagaactggcggaattacagcgtcgcgtcaacgataaagagctgatgataaccgccgcattgccgggcagtggcgaatggggaactcagcgtgaagcgttggcattcgaacaagcagctgtcgccgcagaaactgaattacaagccttactggtgcgcgaaaaagttgaagccgcgcgcagagcgatgctgctgtatccgcaacaattaagctggaactggtgggatgacgtcaccgtagaaatccgtttctggcttccggcgggtagttttgcaaccagcgttgtcagggaacttatcaacacaacaggtgattatgcgcatattgctgagtaa

SEQ ID NO: 32589 - DNA, 480 bp, Escherichia coli
atgcgaattggacacggttttgacgtacacgcctttggcggtgaaggcccaattatcattggtggcgtacgcattccttacgaaaaaggattgctggcgcattctgatggcgacgtggcgctccatgcgttgaccgatgcattgcttggcgcggcggcgctgggggatatcggcaagctgttcccggataccgatccggcatttaaaggtgccgacagccgcgagctgctacgcgaagcctggcgtcgtattcaggcgaagggttatacgctgggcaacgtcgatgtcactatcatcgctcaggcaccgaagatgttgccgcacataccacaaatgcgcgtgtttattgccgaagatctcggctgccatatggatgatgttaacgtgaaagccactactacggaaaaacttggatttaccggacgtggggaagggattgcctgtgaagcggtggcgctactcattaaggcaacaaaatga

SEQ ID NO: 32590 - DNA, 711 bp, Escherichia coli
atggcaaccactcatttggatgtttgcgccgtggttccggcggccggatttggccgtcgaatgcaaacggaatgtcctaagcaatatctctcaatcggtaatcaaaccattcttgaacactcggtgcatgcgctgctggcgcatccccgggtgaaacgtgtcgtcattgccataagtcctggcgatagccgttttgcacaacttcctctggcgaatcatccgcaaatcaccgttgtagatggcggtgatgagcgtgccgattcggtgctggcaggtctgaaagccgctggcgacgcgcagtgggtattggtgcatgacgccgctcgtccttgtctgcatcaggatgacctcgcgcgattgttgacgttgagcgaaaccagccgcacgggggggatcctcgccgcaccagtgcgcgatacgatgaaacgtgccgaaccgggcaaaaatgctattgctcataccgttgatcgcaacggcttatggcacgcgctgacgccgcaatttttccctcgtgagctgttacatgactgcctgacgcgcgctctaaatgaaggcgctaccattaccgacgaagcctcggcgctggaatattgcggatttcatccgcagttggtcgaaggccgcgcggataacattaaagtcacgcgcccggaagatttggcactggccgagttttacctcacccgaaccatccatcaggagaatacataa

SEQ ID NO: 32591 - DNA, 312 bp, Escherichia coli
atgggtaaactaacgctgctgttgctggctattctggtctggctacagtattcgctgtggttcggtaagaacggtatacatgactatacccgcgtcaatgatgatgtggcggcacagcaagctacaaacgcgaaacttaaagcgcgaaacgatcaactttttgccgaaattgacgatctcaatggcggccaggaggcgctcgaagagcgtgcgcgtaatgaactcagcatgaccaggccgggcgaaactttttatcgtctggtgcctgacgcgtcgaagcgcgcacagtctgcggggcaaaacaatcgataa

SEQ ID NO: 32592 - DNA, 324 bp, Escherichia coli
atgcgtaatagccataacattacactaacaaataacgacagccttactgaggatgaagaaaccacatggtcactgcctggtgccgtggtcggttttatctcctggttatttgcgctggcgatgccgatgttgatttatggctctaacacgctgttcttctttatctacacctggcctttctttctggcactgatgcctgtcgcagtagtggtggggattgcgctgcattcattgatggacggaaagctacgctacagtattgttttcaccctgatgacagtaggcattatgtttggcgcactgtttatgtggctactgggctaa

SEQ ID NO: 32593 - DNA, 606 bp, Escherichia coli
atggcgctgcatgacgaaaacgtcgtctggcatagccatccagtcactgtacaacaacgcgagctacaccacggtcatcgtggtgtagtgctgtggtttaccggcctctccgggtccggtaaatcaacggtcgccggggcgctggaggaggcgttacataaactcggcgtcagtacgtatctgctggatggcgacaatgttcgccacggattatgcagcgatctcggttttagcgatgccgatcgtaaagagaatatccgtcgcgtcggtgaagtggcgaatttgatggttgaagccggactggtggtgctgaccgcattcatctcgccacaccgcgccgaacgccagatggttcgtgaacgcgtaggagaagggcgctttatcgaagtatttgtcgatacgccgctggcgatttgcgaagcccgcgatccaaaaggcttatataagaaagcgcgtgccggtgaactgcgcaactttacgggaatagattccgtttacgaagcgcctgaatcggcagaaattcatctcaatggtgaacaattagtaacaaatttggtacagcaattattagatctgttgagacagaacgatattatcagatcctga

SEQ ID NO: 32594 - DNA, 1428 bp, Escherichia coli
atgaacaccgcacttgcacaacaaatcgccaatgaaggcggcgtcgaagcctggatgattgcgcaacaacataaaagcctgctgcgttttctgacttgtggtagcgtcgatgacggaaaaagtaccctgattggtcgtctgctgcacgatacccgccaaatctacgaagatcagctctcatcgctgcataacgacagtaagcgtcacggcacccagggcgaaaagctggatctggctctgctggtggacggcctgcaagctgagcgcgaacagggcatcaccattgacgtggcttaccgttatttctctaccgagaagcgtaaatttattatcgccgataccccagggcacgagcagtacactcgcaatatggcgactggcgcatcgacatgtgaactggcgatcttactgatcgatgcccgtaaaggcgtgctcgatcaaacccgtcgtcacagttttatctccacactgttggggatcaaacatctggtcgtggcgatcaacaaaatggatctggtgggttacagtgaagagacgttcacccgtattcgcgaagattatctgacgtttgccgggcagctgccgggtaatctggatatccgctttgtgccgctctctgcactggaaggcgacaacgtggcttcgcaaagtgaaagtatgccgtggtacagcggtccgacactgctcgaagtgctggaaaccgtggagatccagcgagtggtggatgcccagccaatgcgcttcccggtgcagtacgttaatcgcccgaatctcgattttcgtggctacgccggaacgctggcatccggtcgagtggaagtcgggcaacgtgtcaaagtgctgccctctggtgtggaatcaaacgtcgcgcggatcgtgacttttgatggcgatcgcgaagaagcctttgccggagaagcgatcaccctagtgctgacggatgagatcgacatcagccgtggcgatctgctgctggcggcagacgaagcgttaccggctgtgcagagcgcgtcggtggatgtggtatggatggcggaacagccgctttccgcgggccagagttatgacatcaaaattgccggtaagaagacgcgtgctcgtgttgatggtattcgttatcaggttgatattaataaccttacccaacgcgaagttgaaaacctgccgctgaacggcatcggcctggtggatctcacttttgacgagccactggtgttagatcgttatcagcaaaatccggttaccggtgggctgatttttatcgatcgcctgagcaatgtgaccgtgggtgccggtatggtgcacgagccagttagccaggcaactgctgcgccatctgaattcagtgcatttgaactggaattgaatgccctggttcgtcgccactttccgcactggggcgcacgcgatttgctgggggataaataa

SEQ ID NO: 32595 - DNA, 909 bp, Escherichia coli
atggatcaaaaacgacttactcacctgcggcaactggaggcggaaagcatccacattattcgcgaggtggcggcagaattctcaaatccggtgatgctctactctatcggtaaagattccagcgtcatgctgcatctggcgcgcaaggcgttttatccaggtacgctgcctttcccgttgctgcatgtcgataccggctggaaattccgcgagatgtatgagttccgcgatcgtacggctaaagcctacggctgcgagctgctggtgcataaaaacccggaaggcgtagcgatggggattaatccattcgttcatggcagcgcgaaacataccgatattatgaaaactgaaggcctgaaacaggcgctgaacaaatacggttttgatgccgccttcggtggtgcgcgccgcgacgaagagaaatcccgcgctaaagagcgaatctactctttccgtgaccgcttccatcgctgggatccgaaaaatcagcgcccggagctgtggcacaactacaacgggcaaattaacaaaggcgaaagcatccgcgtcttcccgctctctaactggaccgagcaggatatctggcaatacatctggctggaaaatattgacattgttccactgtatctcgctgcggaacgaccggttctggaacgcgacggtatgttgatgatgattgatgacaaccgtatcgacctgcaaccgggagaagtgattaaaaaacggatggtgcgtttccgtacgctgggctgctggccgctgaccggtgcggtggagtcaaatgcacaaacactgccggaaatcatcgaagagatgctggtttccaccaccagtgaacgtcagggtcgcgtgattgaccgcgaccaggcgggatccatggagttgaaaaaacgtcaggggtatttttaa

SEQ ID NO: 32596 - DNA, 2874 bp, Escherichia coli
atgacacagacgttaagccagcttgaaaacagcggcgcttttattgaacgccatatcggaccggacgccgcgcaacagcaagaaatgctgaatgccgttggcgcacaatcgttaaacgcgctgaccggccagattgtgccgaaagatattcagcttgcgaccccgccgcaggttggcgcaccggcgaccgaatacgccgcgctggcggaactcaaggctattgccagtcgcaataaacgcttcacgtcttacatcggcatgggttacaccgccgtgcagctaccgccggttattctgcgtaacatgctggaaaatccgggctggtataccgcgtatactccgtatcaacctgaagtctcccagggccgccttgaagcactgctcaacttccagcaggtaacgctggatttaaccgggctggatatggcctctgcttctcttctggacgaggccaccgctgccgccgaagcaatggcgatggcgaaacgcgtcagcaaactgaaaaatgccaaccgcttctttgttgcttctgacgttcatccgcaaacgctggatgtggttcgcacccgtgccgaaacctttggttttgaagtgattgtcgacgatgcgcaaaaagtgctcgatcaccaggacgtcttcggcgtgctgttacagcaggtgggtacgacgggtgaaatccacgactacactgcgcttatcagcgaactgaaatcacgcaaaattgtggtcagcgtcgccgccgatattatggcgctggtgctgttaactgcgccgggtaaacagggcgcggatattgtctttggttcggcgcaacgctttggcgtaccgatgggctacggtggcccacatgcggcattctttgcggcgaaagatgaatacaaacgctcaatgccgggccgtattatcggtgtatcgaaagatgcagctggcaataccgctctgcgcatggcgatgcagactcgcgagcaacatattcgccgtgagaaagcgaactccaacatttgtacttcccaggtactgctggcaaacatcgccagcctgtatgccgtttatcacggcccggttggcctgaaacgtatcgctaaccgcatccaccgtctgaccgatatcctggcggcgggcctgcaacaaaaaggtctgaagctgcgccatgcgcactatttcgatactttgtgtgtggaagtggctgacaaagcgggcgtgctggcgcgtgccgaagcggctgaaatcaacctgcgtagcgatattctgaacgcggttgggatcacccttgatgaaaccaccacgcgtgaaaacgtgatgcagcttttcagcgtgctgttgggcgataaccacgggctggacatcgacacgctggacaaagacgtggctcacgacagtcgctctattcagcctgcgatgctgcgcgacgacgaaatcctcacccatccggtgtttaatcgctaccacagcgaaaccgaaatgatgcgctatatgcactcgctggagcgtaaagatctggcgctgaatcaggcgatgatcccgctgggttcctgcaccatgaaactgaacgccgccgccgagatgatccccatcacctggtcggaatttgccgaactgcacccgttctgcccgccggaacaggcagaaggttatcagcagatgattgcgcagttggctgactggctggtgaaactgaccggttacgacgccgtttgtatgcagccgaactccggcgcacagggcgaatacgcgggcctgctggcgattcgtcattatcatgaaagccgcaacgaagggcatcgcgatatctgcctgatcccggcttctgcgcacggaactaaccccgcttctgcacatatggcaggaatgcaggtggtggttgtggcgtgtgataaaaacggcaacatcgatctggctgatctgcgcgcgaaagcggaacaagcgggcgataacctctcctgtatcatggtgacctatccttccacccacggcgtgtatgaagaaacgatccgtgaagtgtgtgaagtcgtgcatcagttcggcggtcaggtttaccttgatggcgcgaacatgaacgcccaggtcggcatcacctcaccgggctttattggcgcggacgtctcgcaccttaacctgcataaaactttctgcattccgcacggtggcggcggcccaggtatgggaccgatcggtgtgaaagcgcatttggcaccgtttgtaccgggtcatagcgtggtgcaaatcgaaggcatgttaacccgtcagggcgcggtttctgcggcaccgttcggtagtgcctctatcctgccaatcagctggatgtacatccgcatgatgggcgcagaagggctgaaaaaagcaagccaggtggcaattcttaacgccaactatattgccagccgcctgcaggatgctttcccggtgctgtataccggtcgcgacggtcgcgtggcgcacgaatgtattcttgatattcgtccgctgaaagaagaaaccggcatcagcgaactggatattgccaagcgtctgatcgactacggtttccacgcgccgaccatgtcattcccggtggcgggtacgctgatggttgaaccgaccgaatccgaaagcaaagtggaactggatcgctttatcgacgcgatgctggctatccgcgcagaaattgaccaggtgaaagccggtgtctggccgctggaagataacccgctggtgaacgcgccgcacattcagagcgaactggtcgccgagtgggcgcatccgtacagccgtgaagttgcggtattcccggcaggcgtggcagacaaatactggccgacagtgaaacgtctggatgatgtttacggcgaccgtaatctgttctgctcctgcgtaccgattagcgaataccagtaa

SEQ ID NO: 32597 - DNA, 390 bp, Escherichia coli
atgagcaacgtaccagcagaactgaaatacagcaaagaacacgaatggctgcgtaaagaagccgacggcacttacaccgttggcatcaccgaacacgcccaggagctgttaggcgatatggtgtttgttgacctgccggaagtgggcgcaacggttagcgcgggcgatgactgcgcggttgccgaatcagtaaaagcggcgtcagacatttatgcgccagtaagcggtgaaatcgtggcggtaaacgacgcactgagcgattccccggaactggtgaacagcgaaccgtatgcaggcggctggatctttaaaatcaaagccagcgatgaaagcgaactggaatcactgctggatgcgaccgcatacgaagcattgttagaagacgagtaa

SEQ ID NO: 32598 - DNA, 1164 bp, Escherichia coli
atgctgggtttcgtggtgataatttcgccatggaaaagttgtcagccccgcttattcaatgaggacaagatggcacaacagactcctttgtacgaacaacacacgctttgcggcgctcgcatggtggatttccacggctggatgatgccgctgcattacggttcgcaaatcgacgaacatcatgcggtacgtaccgatgccggaatgtttgatgtgtcacatatgaccatcgtcgatcttcgcggcagccgcactcgggagtttctgcgttatctgctggcgaacgatgtggcgaagctcaccaaaagcggcaaagccctttactcggggatgttgaatgcctctggcggtgtgatagatgatctcatcgtctactacttttctgaagatttcttccgcctcgttgttaactccgccacccgcgaaaaagacctctcctggattacccaacacgctgaacctttcggcatcgaaattaccgttcgtgatgacctttccatgattgccgtgcaagggccgaatgcgcaggcaaaagctgccacactgtttaatgacgctcagcgtcaggcggtggaagggatgaaaccgttctttggcgtgcaggcgggcgatctgtttattgccaccactggttataccggtgaagcgggctatgaaattgcgctgcccaatgaaaaagcggccgatttctggcgtgcgctggtggaagcgggcgttaagccatgcggcctgggcgcgcgtgacacgctgcgtctggaagcgggtatgaatctttatggtcaggagatggacgaaaccatttctccgttagccgccaacatgggctggactatcgcctgggaaccggcagatcgtgactttattggtcgtgaagctctggaagcgcagcgtgaacatggtacagaaaaactggttggtctggtgatgaccgaaaaaggcgtgctgcgtaatgaactgccggtacgttttaccgatgcgcagggcaaccagcatgaaggcattatcaccagcgggactttctccccgacgctgggttacagcattgcgctggcgcgcgtgccggaaggtattggcgaaacggcgattgtgcaaattcgcaaccgtgaaatgccggttaaagtgacgaaacctgtttttgtgcgtaacggcaaagccgtcgcgtga

SEQ ID NO: 32599 - DNA, 1179 bp, Escherichia coli
atgagcgtaatcatcgtcggtggcggcatggcgggcgcgacgctggcgctggctatttcccggttaagtcacggggcgctgccggtacatttgattgaagcgactgcgccagagtcacatgctcatccgggctttgatggacgagctattgcgctggcggcgggtacctgtcagcaactggcgcgcatcggcgtctggcaatctctggctgattgcgcaaccgccatcaccagcgtgcatgtcagcgatcgtggtcatgccggattcgtcaccctcgccgcagaagattaccaactggcggcgctggggcaggttgtcgaattgcataatgtcgggcaacggctgtttgcattgctgcgcaaagcacctggcgtaacgctgcattgtcctgatcgcgtggctaacgttgcccgtactcagagtcacgttgaagtgacgctggagagtggcgagacgctgacgggccgcgtgctggtagcagctgatggcacccattcagcgttagccaccgcgtgcggcgttgactggcagcaggagccttacgaacaactggccgtgattgccaacgttgcgacttccgttgcgcacgaaggccgcgcttttgaacgcttcacgaaacatggcccgctggcgatgttgccgatgtctgacggacgctgttcgctggtctggtgtcatccactggaacggcgcgaagaggtgctgtcgtggagcgacgagaagttttgccgtgaactccagtctgcctttggctggcgactggggcaaattacccacgccggtaaacgcagtgcttatccgctggcgttaacccgcgccgccagacctattacccatcgtaccgtgctggtgggcaatgcggcgcaaactctgcacccgattgccgggcaagggttcaacctcggtatgcgagatgtcatgagccttgcggaaactctgactcaggcgcaggagcgcggagaagacatgggtgattacggcgtattgtgccgttatcagcagcgtcgacagcgcgatcgcgaagcaaccatcggcgtcacggacagccttgtacatctttttgccaaccgttggaccccgctggttgtcgggcgcaacatcgggctgatgacgatggaattatttaccccggcacgcgatgtgctggcgcagcgcaccctcggttgggtggcgcgttga

SEQ ID NO: 32600 - DNA, 1326 bp, Escherichia coli
atgagtgagatatcccggcaagagtttcagcgtcgccgtcaggccctggtggagcaaatgcaacccggcagcgccgcgctgatttttgctgcaccagaagtaacacgtagcgccgacagcgaatacccctatcgtcagaacagtgacttctggtacttcaccggctttaacgaaccggaagcggtgctggtgctgattaaaagcgatgacactcataaccacagcgttttgtttaaccgcgttcgcgacctgacggcagagatctggtttggtcgtcgcttaggccaggatgccgcgccagagaaactgggcgttgaccgcgcactggcattcagtgaaatcaatcagcaactttatcaactacttaacggcctggatgtggtttaccatgctcagggcgaatatgcatatgctgatgaaatcgtgaacagtgcgctggaaaaactgcgtaaaggctcgcgacaaaatctcaccgcgccagcaacgatgatcgactggcgtcccattgttcatgaaatgcgcctgttcaaatcgccggaagagattgccgtacttcgccgcgcgggtgaaatcaccgccctggcgcatacccgggcgatggaaaaatgccgtccgggaatgttcgagtaccacctggaaggcgaaattcaccacgaatttaaccgccacggcgcgcgctatccttcctataacaccattgtcggcagcggtgaaaacggttgcattctgcactataccgaaaacgagagtgaactgcgtgacggtgacctggtgttgattgatgcgggttgcgaatacaaaggttacgctggcgatattacccgcaccttcccggtcaacggcaaattcactcaggcccagcgtgaaatctacgacattgtgctggagtctcttgaaaccagcctgcgcctgtatcgtccgggaacttccatgcaggaagtcactggtgaagtggtgcgcatcatggttagcggcctggtaaaactcggcatcctgaaaggtgatgttgatgaactgatcgctcagaacgcccatcgtcctttctttatgcatggccttagccactggttaggactggatgtccatgacgttggcgtttatggtcaggatcgctcgcgcattctggagccggggatggtactgaccgtagagcctggtctgtatatcgcgccggatgcggatgtgccagaacaatatcgcggtatcggcattcgtattgaagacgacattgtgattaccgaaaccggcaacgaaaacctcaccgccagcgtggtgaaaaagccggaagaaatcgaagcgttgatggctgctgcgagaaagcaatga

SEQ ID NO: 32601 - DNA, 579 bp, Escherichia coli
atgtctatacagaacgaaatgcctggttacaacgaaatgaaccagtatctgaaccaacaagggacgggtctgaccccagctgagatgcatggtttaatcagcgggatgatatgtggcggtaacgatgacagctcatggctgccgctacttcacgacctgacgaacgaaggcatggctttcggtcatgagctggcacaggcactgcgtaaaatgcactctgccaccagcgatgccctgcaggatgacggcttcctttttcagctttatctgcctgatggcgatgatgtcagcgttttcgatcgggctgatgcactggcaggttgggttaatcacttcctgcttggtcttggcgttacgcaaccgaagctggacaaagtgaccggagaaaccggtgaagccatcgacgatctgcgtaacatcgcgcagttgggctacgacgaagacgaagatcaggaagagcttgaaatgtcgcttgaagagatcatcgagtacgtccgtgttgccgcgctgttatgccacgacacctttactcatccgcaaccgaccgcgccagaagtacaaaaaccgactctacactaa

SEQ ID NO: 32602 - DNA, 330 bp, Escherichia coli; identical to SEQ ID NO: 29270

SEQ ID NO: 32603 - DNA, 603 bp, Escherichia coli
atgacgcaactaccagaactcccactgacattatcccgacaagaaatccgcaaaatgattcggcaacgtcgtcgtacgttaacgccggaacaacagcaggaaatgggtcaacaagccgctacccggatgatgacgtatcccccagtggtgatggcgcatacggtcgctgtattcctctcttttgatggcgaactcgacacccagccactcatagaacaactctggcgcgccggtaagcgcgtatatcttccagttttgcatccctttagtgccggtaatttgctgttcctgaattaccatccgcaaagtgaactggtgatgaacaggttgaagatccatgagccaaaactggatgtgcgtgacgtgctacccctttcccgattagacgtgttgatcacaccgctggtcgcctttgatgagtacggtcagcgcctgggaatgggcggtggtttttatgatcgaaccttacaaaactggcagcactataaaatgcaaccggtgggttatgcgcatgattgtcagttggtggaaaaactccccgttgaagagtgggatatccctcttcctgcggtggttacaccgtcgaaagtctgggagtggtga

SEQ ID NO: 32604 - DNA, 1233 bp, Escherichia coli
atggcaaaggtatcgctggagaaagacaagattaagtttctgctggtagaaggcgtgcaccaaaaggcgctggaaagccttcgtgcagctggttacaccaacatcgaatttcacaaaggcgcgctggatgatgaacaattaaaagaatccatccgcgatgcccacttcatcggcctgcgatcccgtacccatctgaccgaagacgtgatcaacgccgctgaaaaactggtcgctattggctgtttctgtatcggaacaaaccaggttgatctggatgcggcggcaaaacgcggtatcccggtatttaacgcaccgttctcaaatacgcgctctgttgcggagctggtgattggcgaactactgctgctattgcgcggcgtgccggaagccaatgctaaagcgcaccgtggcgtgtggaacaaactggcggcgggttcttttgaagcgcgtggcaaaaagctgggtatcatcggctacggtcatattggtacgcaattgggcattctggctgaatcgctgggaatgtatgtttacttttatgatattgaaaacaaactgccgctgggcaacgccactcaggtacagcatctttctgacctgctgaatatgagcgatgtggtgagtctacatgtgccagagaatccgtccaccaaaaatatgatgggtgcgaaagagatttcactaatgaagcccggctcgctgctgattaatgcttcgcgcggtactgtggtggatattccggcgctgtgtgacgcgctggcgagcaaacatctggcgggggcggcaatcgacgtattcccgacggaaccggcaaccaatagcgatccatttacctctccgctgtgtgaatttgacaacgtccttctgacgccacacattggcggttcgactcaggaagcgcaggagaatatcggcctggaagttgcgggtaaattgatcaagtattctgacaatggctcaacgctctctgcggtgaacttcccggaagtctcgctgccactgcacggtgggcgtcgtctgatgcacatccacgaaaaccgtccgggcgtactaactgcgctcaacaaaatttttgccgagcagggcgtcaacatcgccgcgcaatatctacaaacttccgcccagatgggttatgtggttattgatattgaagccgacgaagacgttgccgaaaaagcgctgcaggcaatgaaagctattccgggtaccattcgcgcccgtctgctgtactaa

SEQ ID NO: 32605 - DNA, 660 bp, Escherichia coli
atgacgcaggatgaattgaaaaaagcagtaggatgggcggcacttcagtatgttcagcccggcaccattgttggtgtaggtacaggttccaccgccgcacactttattgacgcgctcggcacgatgaaaggccagattgaaggggccgtttccagttcagatgcttccactgaaaaactgaaaagcctcggcattcacgtttttgatctcaacgaagtcgacagccttggcatctacgttgatggcgcagatgaaatcaacggccacatgcaaatgatcaaaggcggcggcgcggcgctgacccgtgaaaaaatcattgcttcggttgcggaaaaatttatctgtattgccgacgcctccaagcaggttgatattctgggcaaattcccgctgccagtagaagttatcccgatggcacgtagtgcagtggcgcgccagctggtgaaactgggcggtcgtccggaataccgtcagggcgtggtgaccgataacggcaacgtgatcctcgacgtccacggcatggaaatccttgacccgatagcgatggaaaacgccataaatgcgattcctggcgtggtgactgttggcttgtttgctaaccgtggcgcggacgttgcgctgattggcacacctgacggtgtcaaaaccattgtgaaatga

SEQ ID NO: 32606 - DNA, 531 bp, Escherichia coli
atgtggctcgccttgtttcttatcttgcaaccacggcagcaaggaaacgccatccagcttaaggtcttttggaatgctgatatcggctgcatcaagagctgtcgggtagaaatccattgcggaaatcagcttgtcataattacctggttgaagttttcctttccaccacataaacattggggtgtgagtaccgccaggataagtctgactcttatagcctttttgcgccccgttcagcggcagaggaccatcgataaccgcaccattatcggaggtaaagagaataatagtattgtcatactgtccgtttttcttcagttgttcgagaatgcgttttacaccctgatcaacagaataaacggaagcgtagtagttatctgctgtttgactaccggtattaaattgcttctgatattgctccggtgcaggattatcatttggcaggtgcggagcattataagccaggtaaagcataaaaggctggtcaagtgttttggcacgatcaacaacgccaattgcctcatcggttaa

SEQ ID NO: 32607 - DNA, 540 bp, Escherichia coli
gtgggggaactgttcacgccacttaagccggtgtttgactggctgggcgaaaagttacaggccgcgtggcagtggtttaaaaacctgattgccccggtcaaagccacccgggacaccctgaaccgttgccgtgacacgggcgtcatgttcgggcaggcactggctgacgcgctgatgctgccgcttaatgcgttcaacaaactgcgcagcggtattgactgggtactggaaaaactcggtgttatcaacaaagagtcagacacacttgaccagaccgccgcaaggactcatgccgccacgtatggcaccggtgggtatattccggcgaccagctcttatgcaggctatcaggcttatcagccggtcacggcaccggctggccgctcttatgtagaccagagtaaaaacgaatatcacatcagccttacgggtggtactgcgccggggacacagcttgaccgccagttacaggatgcactcgaaaaatacgagcgggataaacgtgcgcgcgcccgtgccagcatgatgcatgacggttaa

SEQ ID NO: 32608 - DNA, 480 bp, Escherichia coli
atgatgctcgcgttaggtatgtttgtttttatgcgccagacgctgccacaccagaccatgcagcgtgaatcagattatcgctggccgtcaaattcccgtatcggtaaacgggatgcctttcagtttctcggtgtgggtgaggaaaacatcacgcttgccggtgtgctttatcccgaactgaccggcggcaagctgacgatgaccacgctcaggctgatggcagaggaaggccgggcgtggccgttgctggatggcaccggcatgatttacggcatgtatgtcatcagcagggtgagtgaaacagggagtattttctttgcagacggcacaccccggaaaattgattttacgctgtcacttacccgcgttgatgaatcactggccgcgctttatggcgatataggtaaacaggcggaatcgctcatcggtaaggctggcagtatggcgactaaattcacgggtatgacgggggcgggataa

SEQ ID NO: 32609 - DNA, 1164 bp, Escherichia coli
atgctggatgcgctgacatttgatgcaggcagtacgctgacaccggattacatgctgatgctcgacagcagggatattaccggcaatatcagcgaccgtctgatgagcatgaccctgacggataaccggggctttgaggctgaccagcttgatattgaactgaacgatgccgacgggcaggtcgggctgccggttcgtggcgctgtcctgacggtgtatatcggctggaaaggttttgccctggtatgcaaagggaaattcaccgttgatgaggttgaacaccggggcgcaccggatgtggttaccatccgcgcccggagtgcagattttcgcgggacgctcaattcccgccgtgaaggctcctggcatgacaccacgctcggtgcgattgttgaggcgatagcctcccgtaacaggctggaagccagtgtcgcgccgtcactggcaggaattaaaatcccgcacatcgaccagtcgcaggagtctgatgcgaaattcctgacccgtcttgcagaacgcaacggtggtgaggtctcggtaaaaatgggaaaactgttgtttctcaaagcggggcagggggtgacggccagcggtaaaaaaatcccgcaggtcaccataacccgcagcgacggcgaccgccaccattttgcgattgctgaccgtggagcctataccggcgtaacggcaaagtggcttcacaccaaagacccgaagccgcaaaagcagaaggtaaaactgaaacgcaaaaagaaagaaaaacacctgcgcgcactggagcacccgaaagcgaaaccagtcacgcagaagaaagcgccaaaagtaccggaagcgcgcgaaggtgaatacatggccggtgaggctgacaacgtttttgccctgaccacggtatatgccacgaaagcgcaggccatgcgcgccgctcaggcgaagtgggacaaactgcaacggggcgtcgcggagttctccatcagtctggctaccggtcgggcagatatttacacggaaacgccggtcaaagtgtcaggctttaagcgcgtcatagacgagcaggactggacaatcactaaggtgacacattttctgaataatagcggcttcacgacgtccttggagcttgaggtcaggctttctgatgtggagtacgaaacagaagatgatgagtga

SEQ ID NO: 32610 - DNA, 219 bp, Escherichia coli
atgtttcattgtcctttatgccagcatgccgcacatgcgcgtacaagtcgctatatcactgacacgacaaaagagcgttatcaccagtgccagaacgtgaattgcagcgccacgttcatcacttatgagtcggtacagcgatacatcgtgaagccgggagaagtccacgccgtaaggccgcacccgttaccgtcagggcagcaaattatgtggatgtaa

SEQ ID NO: 32611 - DNA, 1362 bp, Escherichia coli
atgtttaaaccggaactcctttccccggcgggaacgctgaaaaatatgcgttacgctttcgcttatggcgcagatgctgtttatgcgggccagccgcgttactccctgcgtgtgcgcaacaacgaatttaaccacgaaaatctccagctcggcatcaatgaagcccacgcgctggggaaaaagttttatgtcgtggtcaacattgcaccgcacaacgccaagctgaaaacctttatccgtgacctgaaaccggtggtggaaatggggccggatgcgctgattatgtccgatccagggctgattatgctggtgcgtgagcacttccctgaaatgccgatccatctctcggtacaggctaacgccgtgaactgggcgacggtgaaattctggcagcaaatgggcctgacccgcgtgatcctctctcgcgagctgtcgctggaagagattgaagagatccgcaatcaggtgccggatatggaggtagagatcttcgttcacggcgcgctgtgcatggcctactccggtcgctgcctgctctctggctatatcaacaagcgcgacccgaaccagggcacctgcaccaacgcctgccgctgggaatacaacgtccaggaagggaaagaagatgacgttggcaacatcgtacacaagtacgagccgattccggtgcaaaatgttgagccgacgctgggtatcggcgcaccaaccgacaaagtgtttatgatcgaagaggcccagcgtccgggcgagtatatgaccgcgtttgaagatgagcacggcacttacatcatgaactcgaaagatctgcgcgccatcgcccatgtagaacgcctgaccaaaatgggagtgcattcgctgaaaatcgaaggccgtaccaaatctttctactattgcgcacgcaccgcgcaggtttaccgtaaagctatcgatgacgcagctgcgggaaaaccattcgataccagcctgctggaaactctggaaggtctggcgcatcgtggctataccgaaggtttcctgcgtcgtcatactcacgacgattatcagaactacgaatacggttattcagtttctgaccgccagcagtttgttggtgagtttaccggtgagcgcaagggcgacctcgcggcggtagcggtgaaaaataaattctccgttggtgacagccttgagctgatgacgccgcaaggcaacattaactttacccttgagcacatggaaaacgccaaaggtgaagctatgccggtcgcaccaggcgatggttatactgtgtggctcccggtcccgcaggatcttgagctaaattacgcgctcctgatgcgtaatttctccggggaaaccacgcgtaacccccacggtaagtga

SEQ ID NO: 32612 - DNA, 333 bp, Escherichia coli
atggctggttggtttgaactcagtaaaagcagtgataatcaatttcggtttgtgctaaaagcgggcaatggtgagactatccttaccagcgagctgtatacctcaaaagcctctgcggaaaagggcatcgcgtcggtgcgtagcaacagcccgcaagaagaacgctatgagaaaaaaacggcaagcaacggcaaattctatttcaatctgaaagccgctaatcatcaaattatcggctccagccagatgtacgccaccgcgcaatctcgtgaaaccggaattgcctccgttaaagccaatggcacaagccagacggtgaaagacaatacgtaa

SEQ ID NO: 32613 - DNA, 723 bp, Escherichia coli
atgaccgagttaccaatcgacgaaaacacaccgcgtattttgatcgtggaagatgaaccgaagctgggacagttgctcattgattatctgcgtgctgcgagctatgcgccgacgcttatcagccacggcgatcaggtactgccgtatgtgcgccagacaccaccggatctgatcctgttggatctgatgctccctggcaccgatggcttgacgctgtgccgggaaattcgtcgtttttctgacattcctatcgtgatggtgacggcaaaaatagaagagatcgaccgcctgctcggactggagattggcgcagatgattatatctgtaagccgtacagcccacgggaagtggtagcgcgcgtcaaaaccattttgcgccgttgcaaaccgcagcgtgagttgcagcaacaggatgctgaaagcccgttgattatcgacgaaggtcgttttcaggcttcatggcgcggtaaaatgcttgacctgacgcctgcggaatttcgtctgctgaaaacgctctctcatgaaccaggaaaagtgttctcccgcgagcaattgctcaatcatctttatgacgactaccgcgtagtaaccgaccgcaccatcgacagccacattaaaaacctgcgccgcaagctggaatctctcgacgccgaacagtcctttatccgtgccgtttacggcgtcggttaccgctgggaagccgacgcctgccgcatcgtttaa

SEQ ID NO: 32614 - DNA, 1404 bp, Escherichia coli
atgaagttctggcgacccggtattaccggcaaactgtttctggcgattttcgccacctgcattgtcttgctgatcagtatgcactgggcggtgcgtatcagttttgagcgtggctttattgattacatcaagcatggtaatgaacagcgattacaactgttaagtgatgcgcttggcgagcagtatgcgcagcatggcaactggcgcttcctgcgcaacaatgatcgctttgtctttcagatcttgcgttcatttgaacacgataattcggaagataaacccggcccgggtatgccgccgcacggctggcgtacccagttctgggtggtcgatcaaaacaacaaagtgctggttggtccgcgagcgccgattccacctgacggtacacggcgacccattctggtcaacggtgcggaagtgggtgcggtgattgcctcccctgttgagcgactgacccgcaatactgatatcaatttcgataaacaacagcggcaaaccagctggctgattgttgctctggcaacgttactcgcggcactcgctacctttctgctggcgcgtggtttgctggcaccggtaaaacggctggtggacggcacgcacaaactggcggcgggcgatttcactacccgcgtaacgcccaccagtgaagatgaactgggcaaactggcgcaagacttcaaccagcttgccagcacgctggagaaaaaccagcaaatgcggcgcgattttatggccgatatttctcacgaactgcgtacgccattagcggtgctgcgcggtgaactggaagccattcaggatggcgtgcgtaaattcacgccggagacggtggcgtctttacaggcggaggtcggtacactgaccaaactggttgacgatctccatcagttgtcgatgtctgatgaaggcgctctcgcctatcaaaaagcaccggtagatttgatcccactgctggaagtggcgggcggcgcatttcgcgaacgattcgccagccgtggcctgaaactgcaattttccctgccagacagtattaccgtatttggcgatcgcgaccgtttaatgcagttattcaataacttactggaaaacagcctgcgctacactgacagcggcggtagcctgaaaatctctgccgggcagcacgacaaaacggtgcgactgacctttgccgacagcgcgccgggcgtcagtgacgatcagctacaaaaattgtttgaacgtttttatcgcaccgaaggttcccgcaaccgagccagcggcggttccgggctggggctggcgatttgcctgaacattgttgaagcacataatggtcgcattattgctgcccattcgccttttggcggggtaagcattacagtagagttaccgctggaacgggatttacagagagaagtatga

SEQ ID NO: 32615 - DNA, 1416 bp, Escherichia coli
atgacagatcttcccgacaacacccgctggcaattgtggattgtggctttcggcttctttatgcagtcgctggacaccaccatcgtcaacaccgcgcttccctcaatggcgcaaagcctcggggaaagtccgttgcatatgcacatggtcattgtctcttatgtgctgaccgtggcggtgatgttgcctgccagcggctggctggcggacaaagtcggcgtgcgcaatattttctttaccgccatcgtgctgtttactctcggttcactattttgcgcactttccggcacgctgaacgaactgttgctggcacgcgcgttacagggcgttggcggtgcgatgatggtgccggtcggcaggttgacggtgatgaaaatcgtaccgcgcgagcaatatatggcggcgatgacctttgtcacgttacccggtcaggtcggtccgctgctcggtccggcgctcggcggcctgctggtggagtacgcgtcgtggcactggatctttttgatcaacattccggtgggaattatcggcgcgatcgccacactaatgttaatgccgaactacaccatgcagacgcggcgcttcgatctctccggctttttattgctggcgattggcatggcggtattaaccctggcgctggatggcagtaaaggtacaggtttatcgccgctggcgattactggcctggtcgctgttggcgtggtagcactggtgctttatctgctgcacgccagaaataacaaccgcgctcttttcagtctgaaactgttccgcactcgtaccttttcgctgggcctggcggggagttttgccggacgtatcggtagcggcatgttgccctttatgacaccggttttcctgcaaattggccttggcttctcaccgtttcatgccggactgatgatgatcccgatggtgctcggcagcatggggatgaagcgaattgtggtacaggtagtgaatcgctttggttatcgtcgggtactggtggcaaccacgctgggtctgtcgctggtcaccctgttgtttatgactaccgctctgctgggctggtactacgttttgccgttcgtcctgtttttacaagggatggtcaactcgacgcgtttctcctccatgaacaccctgacgctgaaagatctcccggacaatctggcgagcagcggcaatagtctgctgtcgatgattatgcaattgtcgatgagtatcggcgtcaccatcgccgggctgttgctgggactttttggttcgcagcatgtcagcgtcgacagcggcaccacacaaaccgtctttatgtacacctggcttagcatggcgtttatcatcgcccttccggcgttcatctttgccagagtgccgaacgatacgcatcaaaatgtagctatttcgcggcgaaaaaggagcgcgcaatga

SEQ ID NO: 32616 - DNA, 3078 bp, Escherichia coli
gtgaagttttttgccctcttcatttaccgcccggtggcgacgattttactgtcggtcgccattaccctgtgcggcatactgggcttccgtatgctgccggtcgccccactgccgcaggtcgattttccggtgattatggtcagcgcctcgctgcccggtgcgtcaccagaaacaatggcgtcttccgttgccacgccgctggaacgttcgcttgggcgcattgccggggtcagtgaaatgacctccagcagttcgctcggcagcacgcgcattattttgcagtttgattttgaccgcgatatcaacggcgcagcgcgcgatgtgcaagcggcgatcaacgccgcgcaaagtttgctgcccagcgggatgccaagccgtccgacctatcgcaaagcgaacccgtcggatgcgccaattatgatcctgacgctaacatccgatacttattcgcaaggtgaactgtacgattttgcctcgacgcagctggctccgacgatttcgcaaatcgacggtgtcggtgatgtcgatgttggcggcagctcgctacctgcggtgcgcgtcgggctgaacccgcaggcgctgtttaatcagggcgtctcgctggacgacgtacgcactgccatcagcaatgccaacgtgcgtaaaccgcaaggggcgctggaagatggcactcaccgctggcagatccagactaacgatgaactgaaaactgccgctgaatatcagccgctgattattcattacaacaacggcggcgcggttcgtctgggcgatgtagcgacggtgaccgactcagtgcaggatgtgcgcaacgccgggatgaccaacgccaaaccggctattttgctgatgatccgcaagctgccggaagccaatattatccagacggtagacagcatccgggcaaaattaccggagttgcaggaaaccattccggcggcgattgatctgcaaattgctcaggatcgctcccccaccattcgcgcctcgctggaagaagtcgagcaaacgctgattatctcggtggcgctggtgattctggtggtctttttattcctgcgctcgggtcgcgccactattattcccgccgttgcggtgccggtttcgctgattggtacgtttgcggcgatgtacctgtgcggattcagtctcaataatctttcgttaatggcgctcaccatcgctactggtttcgtggtggatgacgccatcgtggtgctggaaaacatcgcccgtcatctggaggcggggatgaaaccgctacaggccgcgctgcaaggcactcgcgaagtcggttttacggtgctgtcgatgagtctgtcactggtggcggtgttcctgccgctgctgttgatgggcggattgccgggccgactgttacgcgaatttgccgtgacgctttctgtcgccattgggatttcgttgctggtttccctgacgctaacgccgatgatgtgcggctggatgctaaaagccagcaagccgcgcgagcaaaagcgactacgtggttttggtcgcatgttggtagccctgcaacaaggctatggtaagtcgctgaaatgggggcttaatcatacccgtctggtgggcgtggtgttgcttggcaccattgcgctgaatatctggctatatatctcgatcccgaaaaccttcttcccggagcaggacactggcgtactgatgggcgggatacaggcggatcagagtatttcgtttcaggcgatgcgcggcaagttgcaggattttatgaaaattatccgtgacgatccggcggtggataatgtcaccggctttaccggcggttcgcgggtgaacagtgggatgatgtttatcaccctcaagccacacgacgaacgcagcgaaacggcgcagcaaattatcgaccgtctgcgcgtaaagctggcgaaagaaccgggggcgaatctgttcctgatggcggtacaggatattcgcgttggtgggcgtcagtcgaacgccagctaccagtacacgttgttatccgacgacctggcggcactgcgcgaatgggagccgaaaatccgcaaaaaactggcgacgttgccggaactggcggacgtgaactccgatcagcaggataacggcgcggagatgaatctggtttacgaccgcgacaccatggcacggctgggaatcgacgtgcaggccgccaacagcctgttaaataacgccttcggtcagcggcagatctcgaccatttaccagccgatgaaccagtataaagtggtgatggaagtggatccgcgctatacccaggacatcagtgcgctggaaaaaatgttcgttatcaataacgaaggaaaagcgatcccgctgtcgtatttcgctaaatggcaaccggcgaatgctccgctgtcggtgaatcatcagggattatcggcagcctcgaccatttcgtttaacctgccgaccgggaaatcgctctcggacgccagtgcggcgatcgatcgcgcaatgacccagcttggtgtgccttcgacggtacgcggcagttttgccggcacggcgcaggtgttccaggagacgatgaactcgcaggtgattctgattatcgccgccatcgccacggtgtatatcgtgctgggtatcctttacgagagttacgtacatccgctgacgattctctccaccctgccctcggcgggcgttggagcgctgctggcgctggagctgttcaatgccccgttcagcctaatcgccctgatagggatcatgctattaatcggcatcgtgaagaaaaacgccattatgatggtcgattttgcgcttgaagcccaacggcacggtaacctgacgccgcaggaagctattttccaggcctgtctgctgcgttttcgcccgattatgatgactaccctggcggcgctgtttggtgcgctgccgctggtgttgtcgggcggtgacggctcggagctgcgccaacccctggggatcaccattgtcggcggtctggtaatgagccagcttctgacgctgtataccacgccggtggtgtatctctttttcgaccgtctgcggctgcgtttttcgcgtaaacctaaacaaacggtaacagagtaa

SEQ ID NO: 32617 - DNA, 1371 bp, Escherichia coli
atggcccagcggcaacgccaggtcgcggatgtgattttgcaggatccggcagtgcaaagtctgacctcatttgttggcgttgatggcactaacccgtcgctgaacagtgcgcgtttgcagatcaacctcaaaccgttggatgaacgtgatgatcgggtgcaaaaagtcatcgcccgtctgcaaacggcggtggataaagtgccgggcgtcgatctcttcctgcaaccaacgcaggacctgaccatcgatactcaggtcagccgcacccagtaccagtttaccttgcaggccacgtcactggatgcgctcagtacctgggtgccacagttgatggaaaaactccagcaactgccacagctttctgatgtctccagcgactggcaggacaaagggctggtggcgtatgtcaatgttgatcgcgacagcgccagccgtctggggatcaacatggcggatgtcgataacgccctgtacaacgcgtttggtcagcggctgatttccactatttatactcaggctaaccagtatcgcgtggtgctggaacacaacactgaaaataccccaggcctcgcggcgctggataccattcgcctgaccagcagcgacggtggcgtggtgccgttaagctcaattgccaaaattgagcagcgttttgcgccgctctccatcaaccatctggatcagttcccggtaacgaccatctcctttaacgtgccagataactattcgctgggcgatgcggtgcaggcgattatggacaccgaaaagacgctgaatctgccggtggatatcaccacgcagttccagggcagcaccctcgccttccagtcggcgctgggcagcactgtctggctgattgtcgcggcggtggtggcgatgtatatcgtactcggcattctttacgaaagctttattcacccgatcaccattctctcgacgttgccaacggcaggggtcggcgcactgctggcgttgctgattgccggtagcgaactggatgtaatcgccattatcggcattattttgctgatcggtatcgtgaagaagaacgccatcatgatgatcgacttcgcgctggctgctgagcgcgagcaaggcatgtcgccgcgcgatgcaatctaccaggcttgtctgttgcgttttcgtccgatcctgatgactactctggcggctctgcttggcgcgttgccgctgatgttaagtaccggggtcggcgcggaactgcgtcgtccgttaggtatcggcatggtcggcggtctgatagtcagccaggtgctgacgctgtttaccacgccggtgatttatttgctgttcgaccgcctggcattgtggaccaaaagccgctttgctcgtcatgaagaggaggcgtaa

SEQ ID NO: 32618 - DNA, 585 bp, Escherichia coli
atgaccgacatttcattctgcgacaggcggttaagcggaacaccagtccattcggcaattaccgccgcaatctgttttttatcgacatgcggagagaccagcaaccgatcgttatgcagggcgtccagttcggcagtaagctgtgccagccgctgtaccggggaaactgtttcagcggtctcttccggctgtacgctgccagcttcatcagccggtatggcaccagtattatcctgttctgactctggcggcgtatccactacggcatctgtgtcctctgcaacgcccagtaactgctggcgtagcgtaataatctcctgtaccagcgcctgttgctggtgccaggcggcttccagttcatccagcgccgtcagtgtttcatcgtactgcaccagcacttccgtcatccgggcggtatcggtacgcagcccgatacgcctttcgcgctcaagctggcggatttccgtctcctgctgctggcttaacgtggccagcgccgaaatctgtttcggcggcgaagaaaggttgattgccacgcgggcgcaggcggtgtccagcacatcaatcgctttgtccggcaactga

SEQ ID NO: 32619 - DNA, 459 bp, Escherichia coli
atgcgctttgacttcaaagaaatctttcgccacgaagttttcaatctcttcgtcgcggcgcactaccagcccgagcacgggcgtctgcacgcgtcccacggaaagtacgccctgataaccggcattgcgaccgagaatagtatacgcacgggtcatattgatgccgtacagccagtcggctcgggctcgcgccagcgcagaaacgcacagcggtacaaactcactgttggaacgaagacggtcgatcgcccgctcaaccgcctgcgggttcaggtcgtttatcaagcaacgctgcacctgctggcgcttttccggtgccagttgcagatagtccagcacttcatccaccagcaattgcccttcacgatccgggtccccggcgtgaacgatttcgctggcttcatgcaggaagcgtttgatgacgttaagttgtttggtcacggagggtcggggctgtaa

SEQ ID NO: 32620 - DNA, 1044 bp, Escherichia coli
atgagcgagaactcgattcgtttgacccaatacagccacggagctggttgcggctgtaaaatttccccaaaagtgttggaaaccatcctgcacagtgagcaggcgaagtttgttgatccgaatttgcttgtgggtaatgaaacccgcgacgatgcggcggtgtacgatctgggcaatggcaccagcgttatcagtaccaccgacttctttatgccgatcgttgataatcctttcgattttggccgcattgcggcgactaacgccatcagcgatatcttcgcgatggggggcaaaccgattatggcgattgcgatcctcggctggccgattaacaaactttccccggaaattgcccgcgaagtaaccgaaggtggacgctatgcatgccgtcaggcgggtattgcgctggctggcggtcactccatcgatgcgccggagccgatttttggtctggcggtaacggggatcgtaccgaccgagcgggtgaagaaaaacagtaccgcacaagccggatgtaaactgttcctgacgaaaccgctggggatcggcgttcttactacggctgagaaaaaatcattgctgaaaccagaacatcagggactggcgacggaagtgatgtgccggatgaacatcgcaggcgcgtcctttgccaacatcgaaggcgtaaaagcgatgaccgacgttacgggctttggtctgctggggcatttaagcgaaatgtgtcagggtgctggtgtgcaggcgcgcgtcgactatgaagcgatcccgaaactgccgggggttgaagagtacattaagttgggcgcagtgcctggcggcaccgaacgtaactttgccagctacggtcatctgatgggtgaaatgccgcgtgaagtgcgcgatttgctgtgcgatccgcaaacttctggcggtttgctgctggcggtcatgccggaagcagaaaatgaggttaaagctacagccgccgagtttggcattgaactgacggcgattggcgaactggtgccagcgcgcggcggtcgtgccatggttgagatccgttaa

SEQ ID NO: 32621 - DNA, 1857 bp, Escherichia coli
atgcgaaccctttggcgatttattgccggattttttaaatggacgtggcgtctgctgaatttcgtccgtgaaatggtacttaacctgttctttatttttctcgtactggttggtgtggggatctggatgcaggtcagtggtggtgattcgaaagaaacggccagtcgtggcgcgctgctgctggacatttctggtgtgatcgtcgataaacccgacagttctcagcggtttagtaaattaagccgccaactgcttggtgccagttccgatcgtctgcaggaaaactcactgtttgatatcgtcaataccattcgccaggcgaaggatgaccgcaatatcaccggtatcgtgatggatctgaaaaacttcgcaggcggcgaccaaccgtctatgcagtacatcggcaaagccctgaaagagtttcgtgacagcgggaaaccggtttatgccgttggcgagaactacagccaggggcaatattatctcgccagtttcgccaataaaatttggctgtctccgcaaggcgtggtggatctgcacggttttgctaccaacggtctgtactacaaatcgttgctggataagctgaaagtttccacccatgtgttccgcgtgggtacgtataaatctgccgttgaaccgtttattcgtgatgatatgtcaccggcagcccgcgaagctgacagccgctggattggtgagctgtggcaaaactatctgaatactgttgccgctaaccggcagatccctgctcagcaggtattccctggcgcgcaagggttgcttgagggtttaaccaaaaccggtggcgataccgcgaaatatgcactggaaaacaagctggtcgatgcactggcatcgagtgcggaaatcgaaaaagctctgaccaaagagttcggctggagtaagactgataaaaattatcgcgccatcagttattacgattacgcattgaaaacgccggcagataccggtgacagcatcggtgtcgtcttcgcgaatggcgcaattatggatggcgaggaaactcagggaaatgttggcggtgataccactgcggcacaaatccgcgacgctcgccttgacccgaaagtgaaagcgattgttctgcgtgttaatagcccaggtggcagcgttaccgcgtccgaagtgattcgcgctgaactggctgccgccagatcagcgggtaaacctgtggttgtgtcgatgggcggtatggcggcatctggtggttactggatttccacgccagctaattacattgtggctaaccccagcaccctgaccggttctatcggtatcttcggcgtgatcaccaccgtagaaaatagtctggattcgattggtgttcatactgatggtgtatcaacttcaccgttggcggatgtttctatcaccagggcactgccgccggaagcgcagcagatgatgcagttaagcattgagaatggctataaacgctttatcacgctggttgctgatgcgcgtcattcgacgccggagcagattgataaaatcgcccagggccacgtctggaccggtcaggatgcaaaagctaacgggctggtcgatagtctcggggatttcgatgatgcggtcgccaaagcagcagagctggcaaaagtgaaacagtggcatctggaatactacgttgatgaaccgaccttcttcgacaaagtgatggacaacatgtctggttctgtccgggcaatgttgccagatgcgttccaggccatgttacctgcaccgctggcctcggtagcctctaccgttaaaagtgaaagcgacaagctggcagcgtttaacgacccacaaaaccgttatgcgttttgcctgacctgcgccaacgtgcgttaa

SEQ ID NO: 32622 - DNA, 1017 bp, Escherichia coli
atgcaaaagaaatcaatttacgtcgcctacacgggcgggaccatcgggatgcagcgttccgagcagggttatattccggtgtcaggtcatctacagcgccaactggcgctgatgccggaattccatcgcccggagatgccagatttcaccattcatgaatatacgccgctgatggactcttcagatatgacgccagaagactggcagcatattgctgaagatattaaagcgcattatgacgactatgatggttttgtcattctgcacggcaccgacacgatggcgtataccgcctctgcgctgtcgttcatgctcgagaatctcggtaaaccggtcattgtgacagggtcacaaatcccgctagctgagttacgctctgacggacaaattaatctgctgaatgcgttgtacgttgcggcgaattatccgatcaacgaagtaacgctcttttttaataaccgactttatcgtggcaaccgtaccaccaaagcccatgccgatggttttgatgcgtttgcctctccaaaccttcctccgttactggaagcaggtatccatattcgtcgtttgaatacgccacccgccccgcacggtgaaggggaattgatcgttcatccaatcaccccacaacccattggcgtagtgacgatttatccggggatttctgctgacgtcgtgcgcaattttctgcgccaaccggtgaaagcattgattctgcgctcatatggcgtgggtaatgcgccacaaaacaaagccttcctgcaggaattacaagaagccagcgatcgcggtattgtggtggtcaacctgacacaatgtatgtccggtaaagtgaacatgggtggttatgccaccggtaacgccctcgcccatgccggcgttattggcggtgcagatatgactgtagaagccacactaaccaaactgcattacctgcttagccaggaactggatactgaaaccattcgcaaggccatgagccaaaacctgcgcggcgaactgacgccggatgattaa

SEQ ID NO: 32623 - DNA, 642 bp, Escherichia coli
atgccccctcgcgccctgttactggtcgatttacaaaatgatttctgtgctggtggcgcgctcgccgtgccggaaggtgacagtacggtggatgtcgctaaccgcctgattgactggtgccagtcgcgcggtgaagcggttatcgccagtcaggactggcacccggcgaatcacggcagttttgccagtcagcacggtgtagagccttatacgccaggccaactcgacggtttgccacaaaccttctggccagatcactgtgtgcagaacagtgaaggcgcacaattacatccgttactgaaccaaaaagcgatcgcagcggtgttccataaaggcgaaaatcctttagttgacagttacagtgccttttttgataacggccgtcggcagaaaaccacgctcgatgactggttacgcgatcatgaaatcgatgaattgatcattatgggcctggctactgactattgcgtgaagtttaccgtactggacgcgttacagttaggttataaggttaatgtgattaccgatggttgtcgtggtgtgaatatccagccacaggacagtgcgcacgcgtttatggagatgtcagcagctggggcaacgctatatacgctggcagactgggaagagacgcaggagtaa

SEQ ID NO: 32624 - DNA, 759 bp, Escherichia coli
gtggcggcaaaagacaggattcaggcaattaagcaaatggttgccaacgataaaaaggtgacagtctcaaatttgagtgggatttttcaggtaaccgaagaaaccattcgccgcgatcttgagaagctggaagatgaaggctttttgaccagaacctatggtggtgctgttttaaatacagcgatgttgacggagaatatccatttttataagcgtgcttcatcgttttatgaagagaagcagcttattgcacgcaaggcactaccctttatcgacaataaaaccaccatggcagccgattccagtagtaccgtaatggaattgctcaaattgttacaggaccgtagtgacctgacgttgctaaccaactcggcggaagcgattcatgttctggctcagtcagaaattaaagtcgtttcaacgggtggggaactaaacaaaaatacactttccctgcaaggaagaattactaaagagatcatcagccgctaccatgtcgatatcatggtaatgagttgtaaaggtctagatattaacagcggcgcgctggactctaacgaagcggaagctgaaatcaaaaagacaatgatccgtcaggcgacagaggtagcgttattggttgatcactctaagtttgatcgcaaagcttttgtccagttagctgactttagtcatattaattacataataactgataaatcaccgggtgcagagtggatagcattttgcaaagacaataatatccagctggtgtggtaa

SEQ ID NO: 32625 - DNA, 981 bp, Escherichia coli
atgaaaaagatacctttaggcacaacggatattacgctttcgcgaatggggttggggacatgggccattggcggcggtcctgcatggaatggcgatctcgatcagcaaatatgtattgatacgattcttgaagcccatcgttgtggcattaatctgattgatactgcgccaggatataactttggcaatagtgaagttatcgtcggtcaggcgttaaaaaaactgccccgtgaacaggttgtagtagaaaccaaatgcggcattgtctgggaacgaaaaggaagtttattcaacaaagttggcgatcggcagttgtataaaaacctttccccggaatctatccgcgaagaggtagaagccagcttgcaacgtctgggtattgattacatcgatatctacatgacgcactggcagtcggtgccgccattttttacgccgatcgctgaaactgtcgcagtgctcaatgagttaaaggccgaagggaaaattcgcgctataggcgctgctaacgtcgatgctgaccatatccgcgagtatctgcaatatggtgaactggatattattcaggcgaaatacagtatcctcgaccgggcaatggaaagcgaactgctgccgctatgtcgtgataatggcattgtggtacaggtttattccccgttagagcagggattgttgaccggtaccatcactcgtgattacgttccgggcggcgctcgggcaaataaagtctggttccagcgtgaaaacatgctgaaagtgattgatatgcttgaacagtggcagccactctgtgctcgttatcagtgcacaattcccactctggcactggcgtggatattaaaacagagtgatttaatctccattcttagtggggctactgcaccggaacaggtacgcgaaaatgtcgcggcattgaatatcaacttatcggatgcagacgcaacattgatgagggaaatggcagaggccctggagcgttaa

SEQ ID NO: 32626 - DNA, 948 bp, Escherichia coli
atggataatctcgacgttatttgtataggtgccgctattgttgatattccattgcaaccggtcagtaaaaatatctttgatgtggattcttatcctcttgaaagaatcgcaatgaccaccgggggtgatgcaataaatgaagcaacaattatttctcgtctgggccatcgcacagcattaatgagtcgtgttggtaaagatgccgcaggacaatttattctcgaccattgccgcaaagagaatattgatattcaaagcctgaagcaggacgtcagcatagatacctctattaacgttggactggtgacggaggatggcgagcggacgtttgtcacaaaccgtaacggcagtctgtggaaattgaatattgacgatgttgattttgcgcggttttctcaggcgaaattattatcactggccagtattttcaacagtcctctattggatggtaaagcgctaacagaaatttttacgcaagctaaagcccggcagatgattatctgtgccgatatgatcaaaccacggttgaatgaaacgctggatgatatttgcgaagcattgagttttgtcgattatctgtttcctaattttgccgaggcaaaattactcaccgggaaagagacactggatgaaattgctgactgctttcttgcgtgcggcgtaaaaacggtggtgattaaaacgggtaaagacggctgctttatcaagcgtggtgacatgacgatgaaggtgccggcggtcgcaggaataaccgccatcgacaccattggcgcgggcgataactttgcttcaggttttattgcggcactgttagaaggcaaaaatctgcgtgaatgcgcacgctttgccaatgcaacggcggctatctcggttctaagcgtcggtgccaccaccggcgtaaaaaacagaaagctggtcgaacaattgctggaagaatacgaaggataa

SEQ ID NO: 32627 - DNA, 837 bp, Escherichia coli
atgctcgcagatatcagatattgggaaaacgatgccacaaataaacattatgcaattgcccattttaacgtatggaatgcagaaatgttgatgggcgttatcgacgcagccgaagaagcgaaatcaccggttattatttcttttggtacaggttttgtcgggaacacctcatttgaagatttctctcacatgatggtatcaatggcaaaaaaagcaacggtgccggtaataactcattgggatcatggtcggagtatggaaattattcataacgcctggactcatggtatgaattcattaatgcgtgatgcttccgcatttgatttcgaagaaaatattcgtttaaccaaagaggctgttgatttcttccatccgctgggtattccggtagaggcagaattagggcatgtcggtaatgaaaccgtttatgaagaagcgctggcgggctatcactataccgatcctgaccaggcggctgaatttgttgaacgtacgggctgtgactcattggctgtcgccatcggcaaccaacatggggtttatacgtcagagccacaattgaattttgaggtcgtcaaacgcgtacgcgatgccgtttctgttccgctggttttgcacggcgcatcggggatcagtgataccgacattaaaactgcaatttcgttgggtatcgcgaaaatcaacattcatacggagctctgtcaggccgcaatggtagcagtgaaagaaaaccaggatcagcctttcctgcatttagaacgtgaagtacgtaaagctgtaaaagaacgggcattggaaaaaattaaactgttcggttctgatggcaaagcggaataa

SEQ ID NO: 32628 - DNA, 720 bp, Escherichia coli; identical to SEQ ID NO: 19365

SEQ ID NO: 32629 - DNA, 1302 bp, Escherichia coli
atgatctctccgacgcttaatgtgcctcaggcgcgatttctttcaatgccccataaatttaaagcctatattgctggttttggctcgggcaaaacatgggttgggtgtggcggcatatgcaaggggatttgggagcatccaggtataaatcagggatattttgcgccaacgtatccccaaattcgcgatattttttaccctacagtggaagaagttgctgctgactggggattgaacgtaaaaattaatgagggaaataaagaggttcacttttattacggacgccagtatcggggaaccactatctgcagatcgatggagaagccacaaacgatcgtcggtttcaaaattggtaatgcgttggtggatgaactggacattttgccgaaggaaaaagccagaacggcgtggcgcaagataattgcacgtatgcgttataagattgatggacttcgcaacggtattgacgttacaaccacgccggaaggattcaaatttgtctacgagcagtttgttaaagccgtgcgtgaaaaaacagagctggcctcactgtatggtctggtgcaggcatctactttcgataatgaaaagaacctgccagcagattacattccttcgcttcttgaatcataccctccagagctgattaaagcctatcttcgaggacagtttactaacctgacaagtggtactgtttaccatcagtttgaccggaaactgaataattgcgaagaagtggagcagccaggggagccgatttatattgggatggattttaacgttggaaagatggcgggaatcgtccatgtgctgcgtttggggcttccatgtgcggtaactgaaatcatcaatgcctacgatacgccggatatgatccgcatcattaaagaacgcttctggctgtatgatgggaatgattaccggaaagtgagggaaatttatatttatccagatgcttccggggattccagaaaatcaagtaacgcaagtacgacggatatagcccagcttaagcaggctggttttaacgttgtggtgaacagctcgaacccgccagtaaaagatcgcgttaactcaatgaatgcaatgttctgcaatgccaatggtgagcgtcgctataaagttaatgtgaagcgttgcccgttatatgccgaatctctggagcaacaggtctgggatgagaagggggagcctgataaaaaatctggcaatgatcacccgaatgatgccggaggttatttcatcgttaagcaattccctattgtcaaaccgaccggaagagtcacatcacttcggatttaa

SEQ ID NO: 32630 - DNA, 489 bp, Escherichia coli
  misc_feature (328)..(337): n is a, c, g, or t
atgatgcaaaccgtgaatgaacggctgcgtgatgaatcaattgctcatgcagtctgggtatcccgctatagcactggcgtggctgccagaatggtgaaaatactgaatgacagcgatgcggaacttactgctcgcctgctgatagcactggacagcctcgatccaggtagttttaccgttaagcgcctggagtcacttctggcgagcgtcagagaggttaaccgcactgctattaacagcatgtttaccagtctctccggagagctgaacgagctggcaatttatgaggctggttatcagttaagtctgtttgattctatgcctgtcnnnnnnnnnnttctatgctacctgattttgttgctgatgttcaccctctggttggtatctctcctgatgcactttatgccgctgcaatggcgcgaccattccagggacgactgctcagtgagtgggcctcagatcttgaagcggatcggctcagacgcataa

SEQ ID NO: 32631 - DNA, 438 bp, Escherichia coli
gtgaatggagagaaaaaagaaggcgatgttcttatttccattgatactggttcggggtgtatttctgcaggtcagattgttacgttcgctggtgatccgaatcagtatgttgtggcagcagcgaccagcaatctgattactcttgcagcgcccggactgcgtcaggatctggccgatgatactgccatcacagttgttggggcctttactgcaaatatggcgtttgatcgcaacgcgtttctgctggcatcccgtactccggcaatgccggaaggtggcgataatgctgatgatgtaatgaatgttacggacccgatttcagggattacgttccagattgcactgtatcgtcagtatcgccaggtgcgctatgaagttggactggcatggggtgtttcatcagtgaagccggcacatggttgtctgattcttggttaa

SEQ ID NO: 32632 - DNA, 2535 bp, Escherichia coli
atggccgggaatgaccgcgagccaattggacgcaaagggaaaccgacgcgtccggtcaaacaaaaggtaagccgtcgtcgttacgaagatgacgatgattacgacgattatgatgactatgaggatgaagaaccgatgccgcgcaaaggtaagggcaaaggcaaagggcgtaagcctcgtggcaaacgcggctggctatggctgctgctaaaactggctatcgtttttgccgtgctgatcgccatttacggcgtttatctcgatcaaaaaattcgcagccgtattgatggcaaggtctggcaattgcccgcggcagtttatggccggatggtcaaccttgagccagacatgaccatcagcaagaacgagatggtgaagctgctggaggcgacccagtatcgtcaggtgtcgaaaatgacccgtcctggcgaatttaccgtgcaggccaacagcattgagatgatccgccgtccgtttgatttcccggacagcaaagaagggcaggtgcgcgcgcgtctgacctttgatggcgatcatctggcaacgatcgtcaatatggagaacaaccgtcagttcggtttcttccgtcttgatccgcgtctgatcaccatgatctcttcgccaaacggtgagcagcgtctgtttgtgccgcgcagtggtttccctgatttgctggtggatactttgctggcgacagaagaccgtcatttctacgagcatgatgggatcagtctctactccatcggacgtgcggtgctggcaaacctgacagccggacgcacggtgcagggtgcgagtacgctgacgcaacagctggtgaaaaacctgttcctctccagcgagcgctcttactggcgtaaagcgaacgaagcttacatggcgctgatcatggacgcgcgttacagcaaagaccgtattcttgagctgtatatgaacgaggtgtatctcggtcagagcggcgacaacgaaatccgcggcttcccgctggcaagcttgtattactttggtcgcccggtagaagagctaagcctcgaccagcaggcgctgttagtcggtatggtgaaaggggcgtccatctacaacccgtggcgtaacccgaaactggcgctggagcgacgtaatctggtactgcgtctgctgcaacagcaacagattattgatcaagaactctatgacatgttgagtgcacgtccgctgggcgttcagccgcgcggtggggtaatctctccacagccagcctttatgcagctggtgcgtcaggagctgcaggcaaaactgggcgataaggtaaaagatctctccggcgtgaagatcttcactacctttgactcggtggcccaggacgcggcagaaaaagccgccgtggaaggcattccggcactgaagaaacagcgtaagttgagcgatcttgaaaccgcgattgtggttgttgaccgctttagcggtgaagttcgtgcgatggtcggtggttctgagccgcagtttgcgggctacaaccgtgcgatgcaggcgcgtcgttcgattggttcccttgcaaaaccagcgacttatctgacggccttaagccagccgaaaatctatcgtttgaatacgtggattgccgatgcgccaatcgcgctgcgtcagccgaatggccaggtctggtcaccgcagaatgatgaccgtcgttatagcgaaagtggcagagtgatgctggtggatgcgttgacccgttcgatgaacgtgccgacggtgaatctggggatggcgctggggctgcctgcggttacggagacctggattaaactgggcgtaccgaaagatcagctgcatccggttccggcaatgctgctgggggcgttgaacttaacgccaatcgaagtggcgcaggcattccagaccatcgccagcggtggtaaccgtgcaccgctttctgcactgcgttcggtaatcgcggaagatggcaaggtgctgtatcagagcttcccgcaggcggaacgcgcggttccggcgcaggcggcgtatctgacactatggaccatgcagcaggtggtacaacgtggtacggggcgtcagcttggggcgaaatacccgaacctgcatctggcagggaaaacagggactaccaacaataacgtagatacctggtttgcgggcattgacggcagcacggtgaccatcacctgggtaggccgtgataacaaccagccgaccaagctgtatggtgccagcggggcaatgtcgatttatcagcgttatctggctaaccagacgccaacgccgctgaatcttgttccgccagaagatattgcagatatgggcgtggactacgacggcaactttgtttgcagcggtggcatgcgtgtcttgccggtctggaccagcgatccgcaatcgctgtgccagcagagtgagatgcagcagcagccgtcaggcaatccgtttgatcagtcttctcagccgcagcaacagccgcaacagcaacctgctcagcaagagcagaaagacagcgacggtgtagccggttggatcaaggatatgtttggtagtaattaa

SEQ ID NO: 32633 - DNA, 2430 bp, Escherichia coli
gtgtcgtcgttgcccgttgctgccgtcttacctgagttacttgctgccctcgatggtgcaccgcaggtgttattaactgcgccgaccggggccgggaaatcaacctggctgccgctgcaactgctggcgcatcccggcattaacgggaaaattatcctcctggagccgcgtcgtttggcggcgcgtaacgttgcgcaacggctggcggagctgcttaacgaaaagccaggcgataccgttggctaccggatgcgtgcgcaaaactgcgtcgggccgaatacccgcctggaagtggttaccgaaggcgtgctgacgcgcatgatccagcgtgacccggaactgagcggtgttggattggtgatcctcgatgagtttcatgagcgcagcttgcaggcggatttggcgttggcgctgttactcgatgtgcaacaaggtctgcgtgatgaccttaaactgctgattatgtcggctacgctggacaacgaccgcttgcagcaaatgctgccagaagcgcccgtcatcatctcagaagggcgctcgtttccggttgaacgccgttatttaccactgcccacgcatcagcgttttgacgaagccgttgcggtagccaccgccgaaatgctgcgtcaggaaagcggatcattactgttatttttacctggcgtcggagaaattcagcgtgtgcaggaacaactggcttcgcgcatcggcagtgatgtgttgctctgcccgctgtatggcgcgttgtcgctgaacgatcagcgaaaagcgatccttccggcaccgcaaggaatgcgcaaagtggtgctggcgaccaatattgctgaaacaagtttaaccatcgaaggtattcgtctggtggtggattgtgcccaggagcgtgtggcgcgttttgatccgcgcacggggcttacgcggttgattactcaacgcgttagtcaggcatccatgacgcagcgtgccgggcgcgccgggcgtctggagccgggtatctgcctgcatttaatcgccaaagaacaagcagaacgcgctgccgcgcaaagtgaaccggagatattacaaagcgatctttccggtttgctgatggaattactgcaatggggatgcagcgatccggcgcagatgagctggctggatcaaccgccagcagtgaatttacaggccgcgaaacgcctgttacggatgctgggggcgctggatggcgaacggctaagcgcgcaagggcaaaaaatggcggcgctgggtaacgatccgcgtttagcggcaatgctggttagcgcgaagagcgacgacgaagctgctaccgcggcaaaaattgccgctattctcgaagagccgccacggatgggcaatagtgacctgggcgtggcgttttcgcgcaatcaaccagcctggcagcaacgtagtcagcaactgttaaaacgtttaaacgtacgcggcggtgaggcagacagttctcttatcgcgccgctacttgccggggcgtatgccgatcgcattgctcgtcgccgtgggcaagatggacgctatcaactggcaaacggcatgggggcgatgctcgatgccgacgatgcgctaagccgccacgaatggttgatcgcaccgttattattgcagggcagcgcctcgccggatgcgcggattttactggcgctgccggtcgatattgatgagttagtacaacgctgcccgcagctggtacagcagtctgacaccgtggaatgggatgacgcgcaaggtacgctgaaagcctggcgtcggctgcaaatcggtcagttgacggtgaaagtgcagccactggcgaaaccgtcagaagacgagttgcatcaggcgatgcttaacggcattcgtgataaaggtttaagcgtgctcaactggacggcggaagcggaacagctacgcttgcgtttgttatgcgccgcaaagtggttgccggaatatgactggccagcggttgatgatgagagtttgttggcgacgctggaaacgtggctactgccgcatatgagcggcgtgcattcactacgcggcctgaaatcactcgacatttatcaggcactacgcggattacttgattggggaatgcagcaacgtctggatagtgaattgcctgcgcattacactgtgccgacgggaagccggatcgccattcgttatcatgaagataatccgcccgcgctggcggtgagaatgcaggagatgtttggtgaggccaccaatccgacgatcgcccaggggcgcgtgccgctggtgctggagttgctttcccctgcccaaaggccgctgcaaatcacgcgtgatttgagcgccttctggaaaggagcgtaccgtgaggtgcaaaaagagatgaaagggcgttatcccaaacatgtctggccggacgacccggcaaacacagcaccaacgcgacgaacgaaaaagtattcgtga

SEQ ID NO: 32634 - DNA, 531 bp, Escherichia coli
atgtctgaaccgcaacggctgttctttgctatcgacttacctgcagaaatccgcgaacagattatccactggcgcgccacacacttcccacctgacgcgggacgtccggtcgccgccgataatttgcatctgactctggcatttttaggcgaagtgagcgccgagaaagagaaggcgctttctcttttagccgggcggattcgtcaaccgggtttcacactcacgcttgatgacgccggtcaatggctgcgttcgcgtgtggtgtggttagggatgcgtcagccgccacgcggcttaatccagctggcgaatatgctccgttcacaggctgcccacagcggttgttttcaaagcaatcgtccgtttcatccacatattaccttattgcgcgacgccagcgaggcggtgacaatcccgccgccaggttttaactggtcgtatacggtgacggagttcaccctttacgcctcctcgtttgcgcgtggacgcacacgctacacgccgctaaaacgctgggcgctaacgcaataa

SEQ ID NO: 32635 - DNA, 705 bp, Escherichia coli
atggaattttctccccctctacagcgcgcgacgctaattcagcgttacaaacgttttttagccgatgtgatcacacccgatggtcgcgaattaacgctacactgcccgaatacgggtgcgatgaccggttgtgcaacgcctggcgataccgtctggtattcgacttcagacaacaccaaacggaaatacccacacacctgggaattgactcaaagccagagcggcgcaattatttgcgtcaatacgctttgggctaacaggttgacgaaagaggctatccttaatgaatcaatttcagaactgtcaggctatagctcgctgaaaagcgaagttaaatacggcgcagaacgcagccgtattgactttatgttgcaggcggattcgcgtccagactgctatattgaagtgaaatcggttacgttagcggaaaacgaacagggatattttcccgatgcggtcactgaacgaggtcagaaacaccttcgggagttgatgagcgtagcggctgaaggccagcgtgcggttatcttttttgccgtgctgcattcagccattacacggttttcacccgcgcgccacatcgatgagaaatacgcgcaactattgtcagaagctcaacagaggggggtagaaattctggcttacaaagcggaactttctgccgaaggcatggctcttaaaaaatcactaccggttacattgtag

SEQ ID NO: 32636 - DNA, 456 bp, Escherichia coli
atgcaagaagggcaaaaccgtaaaacatcgtccctgagtattctcgccatcgctggggtggaaccatatcaggagaagccgggcgaagagtatatgaatgaagcccagctggcgcacttccgtcgtattctggaagcatggcgtaatcaactcagggatgaagtcgatcgcaccgttacacatatgcaggatgaagcagccaacttcccggacccggtagaccgtgcagcccaggaagaagagttcagcctcgaactgcgtaaccgcgatcgcgagcgtaagctgatcaaaaagatcgagaaaacgctgaaaaaagtggaagacgaagatttcggctactgcgaatcctgcggtgttgaaattggtattcgccgtctggaagcgcgcccgacagccgatctgtgcatcgactgcaaaacgctggctgaaattcgcgaaaaacagatggctggctaa

SEQ ID NO: 32637 - DNA, 927 bp, Escherichia coli
atgctcccgccttattttttgttcaacgagatgacagacacacactatattggccgctttgccccctctccttccggcgagcttcattttggctctctgattgccgcgcttggcagctatttacaggctcgcgcccggcacggtcgctggctggtacgcattgaagatatcgacccgcctcgtgaagttcccggtgccgcagatactatcctgcgccagctggaacattacggcctgcactgggacggcgatgttctctggcaatcgcaacgtcaccacgcctatcgcgaagcactcgcctggttacatgagcaaggattaagttattactgcacctgcacgcgtgcgcgtattcaaagcattggcggtatttacgacggccattgccgggaattgcatcatggaccagacaacgccgcagtacgtatccgccagcagcatccggtcacccagtttactgacctgctgcgaggcattattcacgccgacgaaaaactggcacgggaagattttattattcatcgccgtgatggtttgtttgcctataacctggcggtggtggtggatgatcacttccagggcgtgagcgaaattgtccggggggcagatttgatcgaaccgacagtgcggcaaatctcgctgtaccagctttttggctggaaagtgccagattacatccatttaccgctggcgcttaatccacaaggcgctaaactttccaagcagaatcatgcgcctgcgttgccgaaaggcgatccacgcccggtgttaatcgcggcacttcattttctgggtcagcaggtagaaacacactggcaggatttcagcgtcgagcaaatccttcagtcagccgtcaaaaactggcggctcaccgcagtgcctgagtcggcaattgtaaattcaacattctcaaatgcgtcatgctga

SEQ ID NO: 32638 - DNA, 1365 bp, Escherichia coli
gtgctaagccgcgaggaaagcgaggctgaacaggcagtcgcccgtccacaggtgacggtgatcccgcgtgagcagcatgctatttcccgcaaagatatcagtgaaaatgccctgaaggtaatgtacaggctcaataaagcgggatacgaagcctggctggttggcggcggcgtgcgcgacctgttacttggcaaaaagccgaaagattttgacgtaaccactaacgccacgcctgaacaggtacgtaaactgttccgtaactgccgcctggtgggtcgccgtttccgtctggctcatgtgatgtttggcccggagattatcgaagttgcgaccttccgtggacatcacgaaggtaacgtcagcgaccgcacgacctcccaacgcgggcaaaacggtatgttgctgcgcgacaacattttcggctccatcgaagaagacgcccagcgccgcgatttcactatcaacagcctgtattacagcgtagcggattttaccgtccgtgattacgttggcggcatgaaggatctgaaagacggcgttatccgtctgattggtaacccggaaacgcgctaccgtgaagatccggtacggatgctgcgcgcggtacgttttgccgccaaattgggtatgcgtatcagtcctgaaaccgcagaaccgatccctcgcctcgctaccctgctgaacgatattccaccggcacgtctgtttgaagaatctttgaaactgctgcaagcgggctacggttacgaaacctataatctgctgtgtgaatatcacctgttccagccgctgttcccgaccattacccgctacttcacggaaaatggcgacagcccgatggagcggatcattgaacaggtgctgaagaataccgatacgcgtatccataacgatatgcgcgtgaacccggcgttcctgtttgccgccatgttctggtacccactgctggagacggcacagaagatcgcccaggaaagcggcctgacctatcacgacgctttcgcgctggcgatgaacgacgtgctggacgaagcctgccgttctctggcgatcccgaaacgtctgacgacgttaacccgcgatatctggcagttgcagttgcgtatgtcccgacgtcagggtaaacgcgcctggaaactgctggagcatcctaagttccgtgctgcttatgacctgttggccttgcgagctgaagttgaacgtaacgctgaactgcagcgtcttgtgaaatggtggggggagttccaggtttccgcgccaccagatcaaaaagggatgctcaacgagctggatgaagagccgtcaccgcgtcgccgttctcgtcgtccacgcaaacgcgcaccgcgtcgtgagggtaccgcatga

SEQ ID NO: 32639 - DNA, 480 bp, Escherichia coli
atgacagtggcgtatattgccataggcagcaatctggcctctccgctggagcaggtcaatgctgccctgaaagcattaggcgatatccctgaaagccacattcttgccgtttcttcgttttaccgcactccaccgctggggccgcaagatcaacccgattacttaaacgcagccgtggcgctggaaacctctcttgcacctgaagagttactcaaccacacacaacgtattgagttacaacaaggtcgcgtccgtaaagcggaacgctgggggccgcgcacactggatctcgacatcatgctatttggtaatgaagtaataaataccgaacgcctgaccgttccgcactacgatatgaagaatcgtggatttatgctgtggccgctgtttgaaattgcgccggagctggtgtttcctgatggaacagtattaggaaatttattaaaaataaataaatttcatgaattaaacaaatggtga

SEQ ID NO: 32640 - DNA, 510 bp, Escherichia coli
atgatgacgctgattattccgcgaaaggaggctcccgtgtccggtgagggtacggtggtcatcccgcaaccggcaggcgacgagccggtgattaaaaacacgttcttttttcccgatatcgacccgaagcgcgtccgggaacgtatgcgccttgagcagaccgtcgcccccgcccgtctgcgtgaggccatcaagtcaggcatggcggagacgaatgcggagctgtacgagtaccgcgaacagaaaattgccgccggttttacgcgtctggcggacgtcccggcggacgacatcgacggtgaaagcatcaaagttttttactacgagcgcgccgtgtgtgcgatggcgaccgcgtcgctttatgaacgttatcgcggtgtggatgccagtgcgaaaggcgacaagaaggccgacagcattgacagcaccattgatgagctgtggcgggatatgcgctgggcagtggcgcgcatccagggcaagccgcgctgcatcgtgagtcaaatctga

SEQ ID NO: 32641 - DNA, 204 bp, Escherichia coli
atgaagacctttgcgctacagggcgacacgctcgacgccatttgtgtccggtattacgggcgcactgagggcgtggttgagaccgtgctcgccgcaaatccgggactggctgaactgggtgcggtgctgccacacggcaccgccgtcgaactgcccgacgttcagaccgcgcccgtggctgaaactgtcaatctgtgggagtaa

SEQ ID NO: 32642 - DNA, 282 bp, Escherichia coli
atgacagcagaagaaaaaagcgtcctgtcgcttttcatgattggggtgctgattgttgtcggcaaggtgcttgccggtggtgaacccatcaccccgcgtctgtttatcgggcgcatgttgctcggtggttttgtctcgatggttgccggtgttgttctggtgcagtttcctgacctgtcactgcctgcggtgtgcggcatcggctccatgctgggtatcgccggttatcaggtgattgagattgccattcagcgccgctttaagggcagggggaaaccgtaa

SEQ ID NO: 32643 - DNA, 426 bp, Escherichia coli
atgtcaaagctgatgattgtgctggtcgtgttgttatcgctggcggtggcggggctgtttctggcgaagcatgaaaacgccagcctgcgcacctcactggacagggcgaacagcgtcgccagcgggcagcagacgaccatcaccatgctgaaaaatcagcttcatgttgcactcaccagggcagacaaaaacgagctggcgcaggtggcactgcgtcaggaactggagaacgccgcgaagcgtgaagcactgcgcgagaaaaccatcacgaggttacttaatgaaaacgaggattttcgccgctggtatggcgctgacctgcctgatgctgtgcgccggttgcaccagcgccccgcctgcaccgacgccagtgattgtccacaacgcctgcccgaaagtgagtctttgcccgatgccgggcagtga

SEQ ID NO: 32644 - DNA, 159 bp, Escherichia coli; identical to SEQ ID NO: 6452

SEQ ID NO: 32645 - DNA, 468 bp, Escherichia coli
atgctcaaacccgacagcctgcgcagggcgctgactgatgccgtcacggtgctgaaaactaaccccgatatgctgcggatattcgtggataacgggagtattgcttccacactggcgacgtcgctgtcattcgaaaagcgttacacgctcaatgtcattgtgaccgactttaccggtgattttgacctgctcatcgtgccggtgctggcgtggctgcgggaaaatcagcccgacatcatgaccaccgacgcaggtcagaaaaagggcttcacgttttatgcagacatcaacaatgacagcagctttgatatcagcatcagcctgatgctgaccgagcgaacgctggtcagtgaggtggacggcgcactgcatgtgaagaatatcccggaacctccgccgccggagccggtcacccgcccggtggagctttatatcaatggcgaactggtgagcaagtgggatgaatga

SEQ ID NO: 32646 - DNA, 162 bp, Escherichia coli; identical to SEQ ID NO: 27732

SEQ ID NO: 32647 - DNA, 150 bp, Escherichia coli
atgctcccagtcctccgtaaacgtgagctggtttttacgcgccaggttgctgacggtatcgccatcgcaggcggtatccagcagaagaatattggtgaagtcggcaagcatcgcgccaaccgccggttgcagcggctggcggtcgaataa

SEQ ID NO: 32648 - DNA, 1233 bp, Escherichia coli
atgtcgtcatttgattacctgaaaactgccatcaagcaacagggctgcacgctacagcaggtagctgatgccagcggtatgaccaaagggtatttaagccagttactgaatgccaaaattaaaagccccagcgcgcaaaaactggaggcattgcaccgttttttggggcttgagtttccccgccaaaagaaaaccattggcgtggtattcggtaagttctacccgttgcataccggacatatctaccttatccagcgcgcctgtagccaggttgacgagttgcatatcattatgggctttgacgatacccgtgaccgtgcgttgtttgaagacagcgccatgtcgcagcagcccacggtgccggatcgtctgcgctggttattgcaaacctttaaatatcagaaaaatatccgtattcatgctttcaatgaagagggcatggagccatatccgcacggctgggatgtatggagcaacggcatcaaaaagtttatggctgaaaaggggatccagccggacctgatctacacctcggaagaagccgatgcgccacagtatatggaacatctggggatcgaaacggtgctggtcgatccgaaacgcacctttatgagtatcagcggtgcgcagatccgcgaaaacccgttccgctactgggaatatattcccaccgaagtgaagccgttctttgtgcgtaccgtggcgatccttggcggcgagtcgagcggtaaatccaccctggtaaacaaacttgccaatatcttcaataccaccagtgcgtgggaatatggtcgcgattatgtcttttcacaccttggcggtgatgagatcgcattgcagtattccgactacgataaaatcgcgctaggacacgcgcaatatattgattttgcagtgaaatacgccaataaagtggcgtttatcgacactgattttgtcactacccaggcgttctgcaaaaagtacgaagggcgtgagcatccgttcgtgcaggcgctgattgatgaataccgttttgatctggttatcttgctggagaacaacacgccgtgggtggcggatggtttacgcagcctcggtagttcggtggatcgcaaagagttccagaacttgctggtggagatgctggaagagaacaatatcgaatttgtgcgtgttgaagaggacgattacgacagccgtttcctgcgctgtgtggagctggtgcgggagatgatgggcgagcagagataa

SEQ ID NO: 32649 - DNA, 1383 bp, Escherichia coli
gtggcaaaagctccaaaacgcgcctttgtttgtaatgaatgcggggccgattatccgcgctggcaggggcagtgcagtgcctgtcatgcctggaacaccatcaccgaggtgcgtcttgcagcgtcgccaacggtggcgcgtaacgagcgtctcagcggctatgccggtagcgccggggtggcaaaagtccagaaactttccgacatcagccttgaagagctgccgcgtttttccaccggatttaaagagttcgaccgcgtattaggcggcggcgtggtgccgggaagtgccattctgattggcggtaaccctggtgcggggaaatccacgttgctactgcaaacgctgtgcaaactggcgcagcagatgaaaacgctgtatgtcaccggcgaagagtcgctgcaacaggtggcaatgcgcgctcatcgccttggcctgccgactgacaatcttaatatgctgtcggaaaccagcatcgagcagatctgcctgattgccgaagaagagcaaccgaagctgatggtaattgactcgatccaggtgatgcatatggcggatgtacaatcatcgcctggtagcgtggcgcaggtgcgtgaaacggcggcttatctgacgcgcttcgccaaaacgcgcggcgtggcgattgtcatggtcgggcacgtaaccaaagatggctcgctggctggccctaaagtgctggaacactgtatcgactgttcggtgcttttggatggcgatgccgactcccgttttcgcaccttgcgcagccataaaaaccgcttcggcgcggtgaatgagctgggcgtcttcgcgatgaccgaacaggggctgcgtgaagttagcaacccttccgccatctttttaagccgcggtgatgaagtgacctccggtagctcagtgatggtggtatgggaaggaacgcgtccactgctggtggagatccaggcgctggtcgatcactcgatgatggcgaatccacgccgcgtcgcagtagggctggagcaaaaccgtctggcaatcctgctggctgtcttgcaccgtcacggtggtctgcaaatggccgatcaggatgtgtttgtgaacgtggtcggcggcgtgaaggtaaccgaaaccagcgccgacttagcgttactgctggcgatggtttccagcctgcgtgacagaccgctgccacaggatctggtggtgtttggtgaagtcgggctggcaggggagatccgcccggtgcccagcggccaggaacgaatctctgaagcggcgaaacacggttttcggcgggcgattgttccggcggctaatgtgccgaaaaaagcgccggaagggatgcagatttttggcgttaaaaaactctccgacgcgcttagcgtgttcgacgacttataa

SEQ ID NO: 32650 - DNA, 969 bp, Escherichia coli
atgcctaacattacctggtgcgacctgcctgaagatgtctctttatggccgggtctgcctctttcattaagtggtgatgaagtgatgccactggattaccacgcaggtcgtagcggctggctgctgtatggtcgtgggctggataaacaacgtctgacccaataccagagcaaactgggcgcggcgatggtgattgttgccgcctggtgcgtggaagattatcaggtgattcgtctggcaggttcactcaccgcgcgggctacgcgcctggcccatgaagcgcaactggatgtcgcgccgctggggaaaatcccacacctgcgcacgccgggtttgctggtgatggacatggattccaccgccatccagattgaatgtattgatgaaattgccaaactggccggaacgggcgagatggtggcggaggtaaccgaacgggcgatgcgcggcgaactcgattttaccgccagcctgcgcagccgcgtggcgacgctgaaaggcgctgacgccaatattctgcaacaggtgcgtgaaaatctgccgctgatgccaggcttaacgcagctggtactcaagctggaaacgctgggctggaaagtggcgattgcctccggtggctttactttctttgctgaatacctgcgcgacaagctgcgcctgacagccgtggtagccaatgaactggagatcatggacggtaaatttaccggcaatgtgatcggcgacatcgttgacgcgcaatataaagcgaaaaccctgacccgcctcgcgcaggagtatgaaatcccgctggcgcagaccgtggcgattggcgatggagccaatgacctgccgatgatcaaagcggcagggctggggattgcctaccatgccaagccaaaagtgaatgaaaagacggaagtcaccatccgtcacgctgacctgatgggggtattctgcatcctctccggcagcctgaatcagaagtaa

SEQ ID NO: 32651 - DNA, 228 bp, Escherichia coli
atgatcgatctggaaaaccaggaacgggaggttatcaatttaatgttcagccagggtatatcctggctagccgccgtgcgtatcaggcataaattatcgcttgctgaagtaagtaaaatgttaggtatctcgattaattctctaaaacggatcgaaaagacggaacggcttagctcaaacatcaaaagaaaatggcaggaatttatggttgtccaccagagttgctga

SEQ ID NO: 32652 - DNA, 720 bp, Escherichia coli
atggctaccccacacattaatgcagaaatgggcgatttcgctgacgtagttttgatgccaggcgacccgctgcgtgcgaagtatattgctgaaactttccttgaagatgcccgtgaagtgaacaacgttcgcggtatgctgggcttcaccggtacttacaaaggccgcaaaatttccgtaatgggtcacggtatgggtatcccgtcctgctccatctacaccaaagaactgatcaccgatttcggcgtgaagaaaattatccgcgtaggctcctgtggcgctgttctgccacacgtaaaactgcgcgacgtcgttatcggtatgggtgcctgcaccgattccaaagttaaccgcatccgttttaaagaccatgactttgccgctatcgctgactttgacatggtgcgtaacgcagtagatgcagctaaagcactgggcattgatgctcgcgttggtaacctgttctccgctgacctgttctactctccggacggcgaaatgttcgacgtgatggaaaaatacggcatcctcggcgtggaaatggaagcggctggtatctacggcgtcgctgcagaatttggcgcgaaagccctgaccatctgcaccgtgtctgaccacatccgtactcacgagcagaccactgccgctgagcgtcagaccaccttcaacgacatgatcaaaatcgcactggaatccgttctgctgggcgataaagagtaa

SEQ ID NO: 32653 - DNA, 1224 bp, Escherichia coli
atgaaacgtgcatttattatggtgctggactcattcggcatcggcgctacagaagatgcagaacgctttggtgacgtcggggctgacaccctgggtcatatcgcagaagcttgtgccaaaggcgaagctgataacggtcgtaaaggcccgctcaatctgccaaatctgacccgtctggggctggcgaaagcacacgaaggttctaccggtttcattccggcgggaatggacggcaacgctgaagttatcggcgcgtacgcatgggcgcacgaaatgtcatccggtaaagataccccgtctggtcactgggaaatcgccggtgtcccggttctgtttgagtggggatacttctccgatcacgaaaacagcttcccgcaagagctgctggataaactggtcgaacgcgctaatctgccgggttacctcggtaactgccactcttccggtacggtcattctggatcagctgggcgaagagcacatgaaaaccggcaagccgattttctatacctccgctgactccgtgttccagattgcctgccatgaagaaactttcggtctggataaactctacgaactgtgcgaaatcgcccgtgaagagctgaccaacggcggctacaacatcggtcgtgttatcgctcgtccgtttatcggcgacaaagccggtaacttccagcgtaccggtaaccgtcacgacctggccgttgaaccgccagcaccgaccgtgctgcagaaactggttgatgaaaaacacggccaggtggtttctgtcggtaaaattgcagacatctacgccaactgcggtatcaccaaaaaagtgaaagcgactggcctggacgcgctgtttgacgccaccatcaaagagatgaaagaagcgggtgataacaccatcgtcttcaccaacttcgttgacttcgactcttcctggggccaccgtcgcgacgtcgccggttatgctgcgggtctggaactgttcgaccgccgtctgccggagctgatgtctctgctgcgcgatgacgacatcctgatcctcaccgctgaccacggctgtgatccgacctggaccggtactgaccacacgcgtgaacacattccggtactggtttacggcccgaaagtaaaaccgggctcactgggtcaccgtgaaaccttcgcggatatcggccagactctggcaaaatattttggtacttctgatatggaatatggcaaagccatgttctga

SEQ ID NO: 32654 - DNA, 417 bp, Escherichia coli
gtgctggacaacggtaaagcggcagaagtctttggtcgtatggtagcggcacaaaaaggcccaaccgacttcgttgagaactacgcgaagtatctgccgacagcgatgctgacgaaagcagtctatgctgataccgaaggttttgtcagtgaaatggatacccgcgcgctggggatggcagtggttgcaatgggcggcggacgccgtcaggcatctgacaccatcgattacagcgtcggctttactgatatggcgcgtctgggcgaccaggtagacggtcagcgtccgctggcggttatccacgcgaaagacgaaaacagctggcaggaagcggcgaaagcggtgaaagcggcaattaaacttgccgataaagcaccggaaagcacaccaactgtctatcgccgtatcagcgaataa

SEQ ID NO: 32655 - DNA, 396 bp, Escherichia coli
atgtggcaggagaaaaatgctgcagcagagcgtaagcagaatatgcgatacagaagatattccgcttcctcgctcactaactcgctacgctcggtcgttcggctgcggcgagcggtaccggcttacggacggggcggaaatttcctggaagatgccaggaagacacttagcaaagaagagataaggccacggcgaagccgtttttccataggctccgcccccctgacaagcatcgcaaaatctgacgctcaaatcagtggtggcgaaacccgacaggactataaagatcccaggcgtttccccctgatggctccctcgtgcgctctcctgttcctgcctttcggtttaccggtgtcattccgctgttatggccgcggtttctcattccacgcctga

SEQ ID NO: 32656 - DNA, 1179 bp, Escherichia coli
atgaattcgacatcgcatcccgtagaacgtttttctttcagcaccgcgttattcgggatgctggttctgaccttaggtatgggtttaggccgctttctctatacgccgatgctgccagtcatgctggcggaaggcgaattttcctttagcgaactctcatggatcgccagtggtaactatgccgggtatctggcggggagcctgctgttttcattcggcgcgtttcatttaccctcacgcctgcgcccgttcctgttagcttccgccctcgcaaccggattattaatcctcgcgatggcgtggctgccgccgtttcttctggttttcatcattcgctttctggcgggggtcgccagcgccgggatgttgattttcggctcaacgctcatcatgcagcatactcgtcatccctttgtccttgcggcgctattttctggtgttggcgtcggcatcgctctgggcaatgaatatgtgctggcaggcctgcattttgccctctcttcacagacgttgtggcaaggtgccggagcactttctgccattatattgcttgctctggcgctgctcatcccgtcgaataaacacgttatcgcgccagcgccattggcaaaaatcgcgcaacaacccatgagctggtggttactggcgattttgtatggtctggcgggttttggttatatcatcgtcgccacctacctgccgctcatggcgaaagacgcgggccagcctgtgctgacggctcacctctggacactggtcggcttgtcgattgtcccaggttgctttggctggctgtgggcagccaaacggtggggagcattaccttgcctgaccgcgaatttgctggtgcaggcgatctgcgtgctgttaaccctcgccagcagctctcctttattactcatcatcagcagtattggttttggcggcacctttatgggaacgacctcgctggtgatgaccatcgcccgccagcttagcgtgccgggaaatctaaaccttttgggctttgtgacactcatttatggtatcgggcaaattcttggcccggcgctgaccagcatgctcggcaacggaacgtcggccctcgccagtgccacgctctgcggcgcagcggcgctatttatcgcagcattaatctgcgggatgcaaatattcaaattgcatacgaattattcttaa

SEQ ID NO: 32657 - DNA, 273 bp, Escherichia coli
atgcaccctctggatgtccatgatatcgccgtcactctgaatgccgacagccgggcattgcgtagccactggtttgtgcgcgagaacggcaccctgctggagtccagccgggggctgtccgggattgatgaaattaagcaactgttcggcgcaaaaacgctgacagtggataccggcgcagataacgccgcaggaaagctgacctttaacattgacgggctggcaagggcgattgcccccctgcgcgttgcctgccactgggcgggagaataa

SEQ ID NO: 32658 - DNA, 1353 bp, Escherichia coli
atgaatagtaacggactgacacaaactatcgttaccggcagtgacccgcgcgggttgccggaattcagcgccatccgcgaggaaataaacaaagccagccatccgtcacagcctgagctgaactggaaactggtggagtcgctggcgctggcgatttttaaagccaacggtgtggatttacacaccgccacctactatacgcttgcccggacacggacacagggactggcgggattctgcgaaggtgcggaactgctggcggcaatggtaagccacgactgggataaattctggccgcagggcggtccggcgcgtactgaaatgctggactggtttaactcccgaaccggcaatattctgcgtcagcaaatctcctttgcggaacccgatctgccactgatctaccgcacagagcgggcattgcagcttatctgcgacaagcttcagcaggtggagctgaagcgcgttccgcgcgtggagaatctgctctattttatgcagaacacgcgtaagcggcttgaaccccagccgaagagtaacgttgaaaacgccgtacagaccacggttagaacactgatttatgccccggaaacaacggcttcctccacgccagaagcggtagtgcctcccctgcccgacctgcctgagatgaaagtagaagtgcgcagtctgtcagagaatcccccacaggccagtgtgatgaagcaaggcagtacggtaagagggtttatcacggggatcgcctgttcagtggctgtcgcctcagcattgtggtggtggcaggtctatccggtgcaacagcaactgttacaggttaacgacaccgcgcagggcgcagcaacggtgtggatggcctcacctgaactagaaaactatgagcgcaggctgcaacagcttcttggcgtctccccggtacaaccgctggaaaccgggatgcagatgatgcgtgttgccgacagtcgctggccggaaagcctgcagcagcagcaggcctcgacacattggaatgaagcactcaaaacccgcgcacagagtagcccgcagttgcgtggctggttgcagacccgtcaggacttacatgcttttgcagatctcgtgatgcggcgcgagaaagagggactaaccctttcctatatcaaaaatgtcatctggcaggcggagcggggactggggcaggaaacacccgttgagtctctgttgacgcagtaccaggatgcccgtgcgcagaagcagaatatagatgcgctggaaaaacaaattaatgagcgactcgaaggcgtgttaatccgctggctgctgctgaagaataacgtcatgccagaggcggcaaccgggaccacggccgaaaaataa

SEQ ID NO: 32659 - DNA, 426 bp, Escherichia coli
atgatatttaccagctcggcggtcttcccgtctgaggctttaaacgcagcggtcagtttgtccagctttccagttgaggcggcagtcatcagcacggcggcggctgagctggcctcctccccgaaaatggttttcatgtattcagcctgctgggcagtaccgagccggtttttctcaaaactggcctgcatttctttcagaatggtaaatactggtcgggtattccccttgctgtctgaggttttcacgccaagctctttgagtgcatcccatgcttttcccgtcggtgcctgcaggcggcttaacacggcacggcttcccgtccccgccattgaacctgtgatttttgcatcatgcagcgccccgaccattgcggcggtttcttcaatgctgacaccggcattttttgccacaggtgcggcatag

SEQ ID NO: 32660 - DNA, 363 bp, Escherichia coli
atgtttctaaactatttcgcgttgggagtgctgatcttcgtctttctggtgattttttatggaatcatcgcgatacatgacatcccttatctgattgccaaaaagcgcaaccatccccatgccgacgctattcatacggcgggctgggtgagcctgtttactctacatgttatctggccgttcctgtggatctgggcgacgctctatcaaccggagcgcggctggggcatgcagtcacatgttgcgtcgcaagagaaagcgactgacccggaaatcgccgcactttctgaccgaatttcccggctggagcaccaactcgccgccgagaaaaagactgactattccacgttcccggagatctaa

SEQ ID NO: 32661 - DNA, 1914 bp, Escherichia coli
atgtcatccgatattaagatcaaagtgcaaagctttggtcgtttcctcagcaacatggtgatgccaaatatcggcgcgtttatcgcgtggggtatcatcaccgcgttatttattccaacagggtggttaccgaacgaaacgctggcgaagctggtcgggccgatgatcacttatctcctgccgctgctgatcggttataccggtggtaagctggtaggcggcgaacgtggcggtgtagtcggtgccatcaccaccatgggcgttatcgtcggcgcagatatgccgatgttcctcggttctatgattgcaggtccgctgggcggctggtgcattaagcacttcgaccgctgggtagacggtaagatcaaatccggttttgagatgctggtgaataacttctccgcaggcatcatcgggatgatcctcgctattctggcattcctcggcattggcccgattgttgaagctctgtctaaaatgctggctgcgggcgttaacttcatggttgtccatgacatgctgccgctggcgtctatctttgttgaaccggcgaaaatcctgttcctcaacaacgccattaaccacggtatcttctcgccgctgggtattcagcagtcccatgaactgggtaaatccatcttcttcctgattgaagctaacccaggtccgggtatgggcgtgctgctggcgtacatgttctttgggcgtggtagcgctaaacagtctgcgggcggtgcggcaatcatccacttcctgggcggtatccacgaaatctacttcccgtatgtgctgatgaatccgcgtctgattctggccgttatcctcggtggtatgactggcgtgttcacgctgactatcctgggcggtggtctggtttctccggcatctccgggttctatccttgctgtactggcgatgacaccaaaaggtgcatacttcgctaacatcgcgggtgtgtgtgcggcgatggctgtctccttcgttgtctctgccattctgctgaaaaccagcaaagtgaaagaagaagatgatattgaagcagcaactcgtcgtatgcaggacatgaaagctgagtctaaaggcgcgtctccgctgtctgcgggcgatgtgactaacgacctgagccacgtacgtaaaatcatcgttgcctgtgatgccggtatgggttccagtgcgatgggcgcaggtgtgctgcgtaagaaaattcaggatgcaggtctgtcgcagatttcggtcactaacagcgcgatcaacaacctgccgccagatgtggacctggtcatcactcaccgtgacctgaccgaacgcgctatgcgccaggttccgcaggcacagcatatttcgctgaccaacttcctcgacagcggcctgtacaccagcctgaccgaacgtctggttgctgcccagcgccatactgaaaacgaagtgaaagtgaaagacagtctgaaagacagctttgacgattccagtgctaacctgttcaaactgggcgcggagaacatcttcctcggtcgcaaagcggcaaccaaagaagaagcgattcgttttgctggcgagcagctggtgaaaggcggttacgttgagccggaatacgttcaggcgatgctggatcgtgaaaaactgaccccgacttatctgggtgagtctatcgcggtgccacacggtacggttgaagcaaaagatcgcgtactgaaaacgggcgtggtgttctgccagtacccggaaggcgtgcgcttcggtgaagaagaagatgacattgcccgtctggtgattggtattgctgcccgtaacaacgagcacattcaggttatcaccagcctgaccaatgcactggatgatgagtctgtcatcgagcgtctggcacacaccaccagcgtggatgaagtgctggaactgctggcaggtcgtaagtaa

SEQ ID NO: 32662 - DNA, 1149 bp, Escherichia coli
atgaaagcattacattttggcgcaggtaatatcggtcgtggctttatcggtaaactgctggcagacgcgggtatccaactgacgtttgccgatgtcaatcaggtggtacttgatgccctgaatgcccgtcatagctatcaggttcatgtggtcggtgaaaccgagcaggtagataccgtttccggcgtcaatgccgtcagcagcattggtgatgatgtcgttgatctgattgctcaggttgatttagtcactaccgccgttggtccggttgtgctggaacgtattgccccggcaatcgccaaagggctggtgaaacgtaaagaacaaggtaatgaatccccgctgaacatcatcgcctgtgaaaacatggtacgcggcaccacgcagctgaaaggccatgtaatgaacgccctgccggaagatgccaaagcgtgggtagaagaacacgttggctttgtcgattccgccgttgaccgcatcgtgccgccttcggcttctgcaaccaacgatccgctggaagtgacggtagaaacattcagcgaatggattgttgataaaacccagttcaaaggcgcgctgccgaacatcccaggcatggagttaactgacaacctgatggcatttgtcgaacgtaaactcttcaccctgaacacgggtcatgctataaccgcgtacctcggaaaactggccggtcatcagaccattcgtgacgctattctcgacgagaaaatccgcgcggtggtaaaaggtgcgatggaagaaagtggtgcagtattgatcaagcgctacggctttgacgcagacaaacatgcggcgtacatccggaaaatcctcggtcgtttcgagaacccgtatctgaaagatgatgtagagcgcgtaggccgtcagccgctgcgtaaactgagtgctggcgaccgtctgatcaagccactgctcggaacgctggaatatggtctgccacataaaaacctgattgaaggtattgccgctgcaatgcacttccgcagtgaagatgatccgcaggctcaggaactggcagcactgatcgctgacaaaggtccgcaggcggcgctggcacagatttccggtcttgatgccaacagcgaggttgtatccgaggcggtaaccgcttataaagcaatgcaataa

SEQ ID NO: 32663 - DNA, 588 bp, Escherichia coli
atggtggaccaggcgcaggataccctgcgcccgaataacagattgtcagatatgcaggcaacaatggaacaaacccaggcctttgaaaaccgtgtgcttgagcgtctgaatgctggcaaaaccgtgcgaagctttctgatcaccgccgtcgagcttttgaccgaggcggtaaatcttctggtgcttcaggtattccgcaaagacgattacgcggtgaagtatgctgtagaaccgttactcgacggcgacggtccgctgggcgatctttctgtgcgtttaaaactcatttacgggttgggcgtcattaaccgccaggaatacgaagatgcggagctactgatggcattgcgtgaagagctaaatcacgacggcaacgagtacgcgtttaccgacgacgaaatccttggaccctttggtgaactgcattgcgtggcggcgttaccaccgccgccacagtttgaacctgcagactccagtttgtatgcaatgcaaattcagcgttaccaacaggctgtgcgatcaacaatggtcctttcactgacagagctgatttccaaaatcagcttaaaaaaagccttccaaaagtaa

SEQ ID NO: 32664 - DNA, 210 bp, Escherichia coli; identical to SEQ ID NO: 28880

SEQ ID NO: 32665 - DNA, 363 bp, Escherichia coli
atgaaagaagtcgaaaaaaacgaaatcaaacgtcttagcgatcgcctggacgctatccgccatcagcaagccgatctgtcactggttgaagccgcagacaaatatgccgagctggaaaaagaaaaagccactctggaagcagaaattgctcgcctgcgcgaagttcacagccagaaactcagtaaggaagcacagaagctgatgaagatgccgttccagcgcgcgattactaaaaaagagcaagctgatatgggcaaactgaagaagagcgttcgcggactggtcgttgtgcacccaatgaccgcgctgggccgcgaaatgggcctacaagagatgacagggttctctaagactgcgttttaa

SEQ ID NO: 32666 - DNA, 684 bp, Escherichia coli
atgaacctaaagaaaacactgttaagcgtgttaataatagtgcctctctgcttattggcagggtgtgactatattgaaaaagcgagtaaggtcgacgacctcgttacacagcaagagttgcaaaaaagcaaaattgaggcgcttgagaaacagcaggaactcgataagcgaaagatagaacattttgaaaaacaacaaactactgtcataaatagtaccaagacgctcgctagcgtggtgaaagcggttaaagacaagcaggacgaatttgtctttacagaatttaacccagcacaaacacaatatttcattttaaataacggatcggtcggtttggcaggccgggtgctggctattgatgcggttgaaaatggcagtgttattcgtatttcgctggttaaccttttaagcgttcccgtatcaaatattggctttcatgcgacatggggcaatgaaagacccaccgatgccaaagctctggcaaagtggcaacaattacttttcaacaccaccatgaattccactctgcaattaatgcctggtcaatggcaagacattaatctgacattaaaaggcgtttcgcctaataacctgaagtatctgaagttgtccatcaatatggccaatctccagttcgacactgttcaatctgctgaaactcggcagcgaaaaaacaaaaaataa

SEQ ID NO: 32667 - DNA, 543 bp, Escherichia coli
atgattttggtgacggggggcgcacggagcgggaagagtcgccatgcagaggcgcttattggggactcttcacaggttctgtatatcgccacctcacaaatccttgatgatgagatggctgcacggatagaacatcatcggcaaggccgcccggcgcactggcacacagtggagcgctggcaacatcttgatgaattaattcatgcagacattaacccgcatgaggctgtgttgctggaatgcgttaccacaatggtgactaatctgttgtttgattatggcggcgataaagaccctgatgaatgggattatcaggcgatggaacaggcgattaatgctgagattcagtcgttgattgctgcctgccaacgttgccccgcgaagattgtattagtgactaacgaagtgggaatggggattgtgccggagagtcgtctggcacgacattttcgtgatattgccgggcgggtcaatcagcagctggccgctgcggcaaatgaagtgtggctggtggtttcgggtattggagtaaaaatcaaatga

SEQ ID NO: 32668 - DNA, 1080 bp, Escherichia coli
atgcaaacacttgccgatttactgaatacgatccctgccatcgatcctgccgctatgtcgcgtgcacaacggcatatcgacgggttactcaaacctgttggtagcctgggaaggctggaggcgcttgccatacaactggcgggaatgccggggttgaatggcataccgcatgtgggcaaaaaagcggtactggttatgtgtgccgatcacggcgtctgggaggaaggggtcgctatttccccaaaagaagtgacagccattcaggctgaaaatatgacccgcggaacaaccggcgtgtgtgtgctggcagcacaagcgggcgctaacgtccacgtaattgatgttggtattgatactgctgagcctatccccgggcttatcaacatgcgtgtcgcacgaggtagcggcaatattgcttcagctccggcaatgagtcgccgtcaggctgaaaagttgcttttggacgtcatatgttatacgcgggagctggcaaaaaacggtgtcacgctgtttggtgtaggtgaactggggatggcaaacacgacaccggcagcggcaatagtcagcacaatcactggccgggatcctgaagaagtggttgggattggcgcaaacctgccgacagataaactggttaataaaattgatgttgtgcgacgggcgattatgttgaatcaaccaaatccgcaggatggcgttgatgtccttgcaaaagtgggtggatttgatttggtcggaatggctggcgtgatgttaggcgctgcgtcctgcggtttaccggtgttgctggatggatttctttcttatgctgctgcgctcgcagcctgccagatgtctcctgcaatcaaaccgtatctcattccttctcacctgtcggcagaaaaaggggcgcgtatagcgctgtcgcatttggggctggagccttatctcaatatggagatgcgtttaggtgaggggagtggcgcagctctggcgatgcccatcatcgaagcagcctgtgcgatatacaacaacatgggcgaacttgctgccagtaatattgttctaccggggaatacgacttctgatttgaacagttaa

SEQ ID NO: 32669 - DNA, 936 bp, Escherichia coli
atgatgcgtcgtgtaaatattctttgctcatttgctctgctttttgccagccatactagcctggcggtaacttatccattacctccagagggtagccgtttagtggggcagtcgtttactgtaactgttcctgatcacaatacccagccgctggagacttttgccgcacaatacgggcaagggttaagtaacatgctggaagcgaatccgggcgctgatgtttttttgccgaagtcaggttcgcaactcaccattccgcagcaactgattttgcccgccactgttcgtaaagggattgtggttaacgtcgctgagatgcgtctttattactacccaccagacagtaatactgtggaagtctttcctattggtatcggccaggctgggcgagaaaccccgcgtaactgggtgactaccgttgaacgtaaacaagaagcaccaacctggacgccaacgccgaacacccggcgcgaatatgcgaaacgaggggagagtttgcccgcatttgttcctgcggggcctgataatcccatggggctgtacgcgatttatattggcaggctatatgccatccacggtaccaatgccaattttggtattgggctccgggtaagtcagggctgtattcgtctgcgcaatgacgatatcaaatatctgtttgataatgttcctataggtactcgtgtgcaaattattgatcagccaatgaaatacacaacggaaccggatggttcaaagtggctggaagttcatgagccgctgtcgcgcaatcgtgctgaatatgagtctgaccgaaaagtgccattgccggtaaccccatctttgcgggcgtttatcaacgggcaagaagttgatgtgaatcgcgcaaatgctgcgttgcaacgtcgatcgggaatgcctatgcaaattagttctggttcaagacagatgttttaa

SEQ ID NO: 32670 - DNA, 918 bp, Escherichia coli
atgaacttcagacgcctgaaatacttcgtaaaaattgtagatattggtagcctgacccaggctgctgaagtattgcatatcgcacaaccagcgctcagtcagcaggttgccacactggaaggtgagttaaatcaacaacttttgattcgcacaaaacggggcgttacgccaactgacgccggaaaaattctctatacccatgcgcgggccattttacgtcagtgtgagcaggcccaactggcggtgcataacgttggtcaggcattatcggggcaagtctcgattggctttgcgccaggaaccgctgcgtcatccatcaccatgcccttattacaggcggttcgcgctgaattcccggaggtcgttatctatcttcatgaaaatagcggtgcagtgcttaacggaaaactgataaatcaccaactcgatatggcggtgatttatgagcattcccctgtggctggtgtatccagtcaggctttactgaaagaagatctttttctggtaggaactcaagattgcccggggcaaagcgttgatgttaatgctattgcgcaaatgaacctctttctccccagtgattacagtgctgttagacttcgtgttgatgaggctttttccctacggcggctcacggcaaaagtcattggtgaaattgagtctattgccacgcttaccgcagccattgcaagcggcatgggcgttgcagtattacccgaatcggccgcgcgttcgttatgtggcgcagtaaacggatggatgtcacgcattaccacaccttcaatgagtctctctttgtcattaaatttacccgccagagcgaacttatcgccacaggcacaggcagtgaaagagttgttaatgtcagtgatgagttctccagtgatggaaaaaaggcagtggcaattggtgagttaa

SEQ ID NO: 32671 - DNA, 951 bp, Escherichia coli
gtgaatttccaacaactaaagataatccgcgaggctgcacgtcaggattacaacctgacagaggttgcgaatatgctttttacctcacagtcaggcgtcagccgtcacatacgggaactggaggatgaacttggcatcgaaatatttgttcgacgaggtaagcgactgctgggcatgactgaaccgggcaaagcattactggtcattgcagaacgtattctgaatgaagccagtaatgttcgtcggcttgcagacctgtttaccaacgatacgtctggcgttctcactattgcaacgacgcatactcaggcacgttatagcttgcctgaggtcattaaagcttttcgcgaacttttcccggaggttcggctggagctaatccagggtacaccacaggaaattgcgacgttgttgcaaaatggcgaagctgatattggtatcgccagcgagcgtttaagtaatgacccgcagctcgtcgccttcccgtggtttcgttggcaccatagtttgcttgttccactcgatcatcccttgacgcaaattacaccgttgacgctggaatcaatagcgaagtggccgttaattacttaccgacaggggattacggggcgctcacgtattgatgacgcatttgtccgcaaaggtttgctggcagatattgtattaagtgcgcaggattctgatgtcattaaaacctatgttgcactcgggctggggatcggattagttgccgaacaatccagtggtgaacaagaggaaaagaatttaatccgtctggatacgcggcatcttttcgatgctaatactgtctggttgggactgaagcgagggcaacttcaacgtaactatgtctggcgctttctggaactttgtaatgcaggactgtcagttgaggatatcaagcgccaggtgatggagaacagtgaagaggaaattgattatcagatatag

SEQ ID NO: 32672 - DNA, 681 bp, Escherichia coli
atggtatggcgtgcagacactaaatccaacgtttatggtaaaaaccatgacaccggcgtttctccggtcttcgctggcggtgttgagtatgcgatcactcctgaaatcgctacccgtctggaataccagtggaccaacaacatcggtgacgcacacaccatcggtactcgtccggacaacggcatgctgagcctgggtgtttcctaccgtttcggtcagggcgaagcagctccagtagttgctccggctccagctccggcaccggaagtacagaccaagcacttcactctgaagtctgacgttctgttcaccttcaacaaagcaaccctgaaaccggaaggtcaggctgctctggatcagctgtacagccagctgagcaacctggatccgaaagacggttccgtagttgttctgggttacactgaccgcatcggttctgacgcttacaaccagggtctgtccgagcgccgtgctcagtctgttgttgattacctgatctccaaaggtatcccggcagacaagatctccgcacgtggtatgggcgaatccaacccggttactggcaacacctgtgacaacgtgaaacagcgtgctgcactgatcgactgcctggctccggatcgtcgcgtagagatcgaagttaaaggcatcaaagacgttgtaactcagccgcaggcttaa

SEQ ID NO: 32673 - DNA, 453 bp, Escherichia coli
atgaaatatcaacaacttgaaaatcttgaaagcggttggaaatggaagtatctggtgaagaagcatcgcgaaggggagttaatcacccgttacatagaagccagtgccgcccaggaagccgtcgatgtgttgctctcgctggaaaatgaacccgtgctggtaaatggctggattgacaagcatatgaatccggaactggtcaatcgcatgaagcagaccattcgggccagacgaaagcgccattttaatgcggaacaccagcatacgcgcaaaaaatcgatcgatctggaatttattgtctggcaacgtctggctggtcttgcgcagcgtcgcggtaaaacgctttctgaaacgattgttcagctgattgaagatgcggaaaacaaagagaaatacgcgaataaaatgtcttctttgaagcaggatctgcaggcattgctgggtaaggaataa

SEQ ID NO: 32674 - DNA, 627 bp, Escherichia coli
atggccattacgttggctgaactggtttattccgaactgatcggacttgttcagcgtacacgtgttagctatcctgcgtgcttcaataaaataaggcttacagagaacatggtagataaacgcgaatcctatacaaaagaagaccttcttgcctctggtcgcggtgaactgtttggcgctaaaggtccgcaattgccagcaccgaacatgctgatgatggaccgtgtggtcaaaatgaccgaaacgggtggtaacttcgacaaagggtatgttgaagcagaactggatatcaatccggatctgtggttcttcggatgccacttcattggtgatccggttatgccaggatgtctgggcctggacgcaatgtggcagctggtagggttctacctcggctggctgggcggcgaaggtaaaggccgcgcgctgggcgttggcgaagtgaaattcactggtcaggtactgccgacagcgaaaaaagtgacctaccgtattcactttaaacgcattgttaaccgtcgtctgattatgggcctggcggatggcgaagtgctggttgatggtcgtctgatctataccgccagcgacctgaaagtcggtctgttccaggatacgtctgccttctga

SEQ ID NO: 32675 - DNA, 168 bp, Escherichia coli; identical to SEQ ID NO: 907

SEQ ID NO: 32676 - DNA, 564 bp, Escherichia coli
atgaaaaagtggctagtgacgattgcagcactgtggctggccggatgcagctccggcgaaattaataaaaactattaccagttacctgtggtgcagagcggtacacaaagtaccgccagccagggtaatcgcctgttatgggtagagcaggtcgctgttcctgactatctggcggggaatggtgtggtttatcaaaccagtgatgtgaagtatgtgattgccaacaacaacttgtgggccagcccgttggatcaacagttgcgcaacactctggttgccaacctgagcacgcaactgcccggctgggtggttgcctcccagcctctgggaagcgcccaggatacgctcaatgttaccgtaacggagtttaacgggcgatatgatggcaaggtcattgtcagtggtgagtggctgttgaaccaccagggacaactgatcaaacgtccgttccgtctggaaggggtgcaaactcaggatggttacgatgaaatggttaaagtgctggccagtgtctggagtcaggaagccgcttctattgcgcaagagataaagcgtctaccgtaa

SEQ ID NO: 32677 - DNA, 1641 bp, Escherichia coli
atggaatctaataatggggaagccaaaatccagaaagtgaagaactggtctcccgtgtggatatttcctatcgtcacggcgctcattggggcctgggttcttttttatcattacagccatcagggaccggaagtgaccctgatcaccgcgaatgcggaaggaattgaaggtggcaaaaccaccattaaaagccgtagcgttgacgtcggcgtggttgaaagcgccacactggctgatgatttgacgcacgttgaaatcaaagcgcggctgaattccggtatggaaaaattgctgcataaagataccgtcttttgggtggtgaaaccgcagattggtcgagaagggattagcggcctgggaacgctgctgtctggggtttatatcgaactgcagccaggcgcgaaaggcagcaaaatggataaatacgatttgctggactcgccaccgttggctccgcctgatgcgaaaggtatccgtgtgattctcgatagcaaaaaagccgggcagctctcgccaggagatcccgtgctgttccgtggctatcgggtaggttcggttgaaaccagcaccttcgatacgcaaaaacgcaatatcagctatcaactgttcatcaatgcaccttatgaccgactggtgaccagcaatgttcgtttctggaaagatagtggcattgcggttgatttgacgtcagcgggaatgcgtgtggagatgggctcattgacaacgctgctgagtggcggtgtcagctttgatgtgccggaaggtctggatttagggcagccagtggcaccgaaaacagctttcgttttgtatgatgatcagaagagcattcaggattcgttgtacaccgatcacattgattatctgatgttctttaaagattcggtacgcggtctgcaaccgggagctccggtagaattccggggtattcgcctgggtaccgtaagcaaagtgccattctttgcgccgaatatgcgtcagacatttaacgatgattaccgtattccggtactgattcgtatcgagccagagcggctgaaaatgcagcttggcgaaaatgcggatgttgttgagcaccttggcgaattgttgaaacgtggtttacgcggatcgctgaaaaccggaaacctggtcactggcgcactgtatgttgatctcgatttctatccaaatacgcctgcaataaccggtattcgtgaatttaatggttatcagattatcccgaccgttagcggcggtctggcgcaaatccagcaacgactgatggaagcgttggataagatcaacaaactgccattgaatccgatgattgaacaggcaaccagtacgctttctgaaagtcagcgcacaatgaaaaacctgcaaacgacgctggatagcatgaacaagatcctcgccagccagtcgatgcagcagttaccgacggatatgcagtcaacgttgcgtgaattgaatcgcagtatgcagggcttccagcctggctccgcagcctacaacaagatggtggcggatatgcagcgacttgatcaggtgttgcgagaactgcaaccggtgctgaaaacgctcaacgagaagagtaacgcgctggtatttgaagcgaaggacaaaaaagatccagagccgaagagggcgaaacaatga

SEQ ID NO: 32678 - DNA, 462 bp, Escherichia coli
atgctgtatcttccggctaatattttgcccatcatggtgacggatttattaggttcgaagatgccatcgacgattctcgctggggtcatcctgttatggagcgaaggatcttatcccgtcgctgcggttatctttctggccagtattatggtgccaacgttaaagatgatcgccatagcgtggctgtgctgggatgccaaagggcatggcaagcgcgacagtgaaagaatgcatttgatttatgaagttgttgagtttgtaggccgctggtcgatgattgacgttttcgttatcgcggtgctctcggcgctggtgcgtatgggaggtttaatgagtatttatccggcaatgggtgcattaatgtttgctttagtcgtcataatgacaatgttttctgctatgacgtttgacccgcgtttgtcgtgggatcgtcaacctgaatcagagcatgaggagtcctga

SEQ ID NO: 32679 - DNA, 213 bp, Escherichia coli; identical to SEQ ID NO: 7905

SEQ ID NO: 32680 - DNA, 132 bp, Escherichia coli
atgcctaaatcttacacaccaaactggttttttaccgctttacttgacaatcacatcaatcaaatgatggcacgctattcctgcctgcgggccttacgcatggatttcttctacagaaaaagatacgcctga

SEQ ID NO: 32681 - DNA, 1131 bp, Escherichia coli; identical to SEQ ID NO: 14735

SEQ ID NO: 32682 - DNA, 255 bp, Escherichia coli; identical to SEQ ID NO: 14736

SEQ ID NO: 32683 - DNA, 651 bp, Escherichia coli
atggcagtttcagcaaagcacgacgaatttaatcactggtgggcaacagagggcgactgggttgaagagcctaactatcgccgtaatggtatgagcggggtgcaatgcgtcgagcgcaacggcaaaaagctatatgtaaagcgcatgacgcatcatctgtttcattccgtacgttatcctttcggccgaccaacgattgtccgtgaggttgcggtaattaaagaactggaacgggccggtgtcatcgtgccgaagatcgtttttggtgaagcggtgaaaattgagggggaatggcgcgcgttgctggtgactgaagatatggcggggttcatcagcattgctgactggtatgcccagcatgcagtaacgccctattctgacgaagtacggcaagccatgttgaaagcagtggcgctggcgtttaagaaaatgcatagcgttaatcgtcagcatggctgttgttatgttcgccatatctatgtgaaaacagaaggtaaggcagaagctggttttcttgatctggagaaaagtcgtcgccgcttgcgtcgcgataaagcgattaatcatgacttccgccagctggaaaaatatctggagccgatccctaaagcggactgggagcaggtgaaagcgtattactacgccatgtaa

SEQ ID NO: 32684 - DNA, 1191 bp, Escherichia coli
atgaaagagaagttatggacgaaggatttttgggcaataaccatcatcagctttattattttcttcgtcttttatgttttactaacattgttgccaatttatatctctgaccgcttgcatgcctctcctgataaagccggtttattggtgactttatttttaattgccgccattgttattcgcccctttgccgggcaatgggtgggtaaatattcgaataaaactattctggtgctctcttctctggcctttttgttggtcactgcgttgtatcctttttgccactcaattgaatcactgctttttattcgggtgcttcatggtattaccttcggggttattactacggtaaaaggaacgatttccgcgcggctgatcccggcctcccgacgtggggagggcatcagttttttctctctggcaatggggctggcaatggtggtcgggccgtggattggcctgaatatggcgcgctgggaggcctttaatatggctttctggttatgcaccggcgtggcagcggtggggattattctgtcgctgattatgacagtgccgccggttatcagccatgctgatggttcaaagccgaaaatgggcttcgccgccatgttcgatcgcgcggcgttgccatttgcgatggtcaccttttttatgaccttttcgtatgccggggtttctgcttttctggcgctttatgcacgcgaacttaacctgatgtcggcagccagtaatttcctgctttgctacgctatcttcctgatgatctgccgtacctttaccggcaatgtctgcgacaaaaaaggaccgaaatatgtggtttacccttgccttgtgttctttacggttggactggtggttctcggctacacccagggaagcataatgatggttgtttctggcgcgttgattggtatcgggtatggttccgtgacgccagtttttcagacgcagattatcagttcagtggaaccgcataaaatcggtgtcgcaaactccctattcttcaatgcgatggatgcaggcctggcgctgggagcctgtgtgatggggatgatggttgcacatactggctaccgaatgatttatctgctgggtgcactattagtggtagtggctggtggagtctatgcgctgcaaatgaagggtaaaagcggtgtcgcgctagtagtggcaaaagaaattcattaa

SEQ ID NO: 32685 - DNA, 879 bp, Escherichia coli
atgactcttacccaaataaattctttactcgccgtgctggattacggtggctttactgaagccagcaagcgattgttcatgacgcagtcggcggtaagtcaggcaattgctgccctcgaacaagaacttggtgtgaatatactgttacgcgatcgccgtaaagctatacaactgaccacagcaggtcatcgcattgtgcatcatctgcgcgccattaatcgggaagttaacgcagtaaaagagatagccgagcaggaaaagcagaaccctcaaagaacgctgagacttggttgtttccccagcgtctgcgcctgtatcttaccggctgtgattcgctactttgaaattcatcatccgaatataaaaattattccttttgaggaaaatagcacagcgattattgattcccttcagaatgaatccattgatgccggttttgttcattttccggtgagcggaatgtactccgtgcccatttatcaggataaattcaccgtagtgttaccgcccaaccatgctctggcaaaaaacagcactattacagtggaagagttaatgggtgaaccattaattattagtaaaggacgctatgaattaagcattatggcactatttaaagaaaagaatattaccccacagataaaatatgaatttaatcacccggatacagcgatcagttttattcgacagggattaggcatcgccttattaccagagttaacgctgaaaaccattgcagatgaattgtgttccgttcctctcgaaccaaccttctatcgacagatttcgttgctggctaaagaaaagccggtagaaggcagtccactgtttttactacaaatgtgtacggaacaactcgtggtgagtggaaaaatttga

SEQ ID NO: 32686 - DNA, 132 bp, Escherichia coli; identical to SEQ ID NO: 32380

SEQ ID NO: 32687 - DNA, 1071 bp, Escherichia coli; identical to SEQ ID NO: 32530

SEQ ID NO: 32688 - DNA, 456 bp, Escherichia coli
  misc_feature (6)..(15): n is a, c, g, or t
atgatnnnnnnnnnnacttctattaatgatgcattcgccaactgcggcggttcaggtatgacgttggggttattgttggctatttttatcgcgtctaagcgtgcggaataccgtgatctggcaaaaatgtcgtttatccccggtattttcaatatcaatgaaccgataatgttcggccttcctattgtacttaaccccatcatgatggtgccgtttattctggttcccattgttaactgtgccattggttacttctttgtttcgatggaaattattccaccggttgcttatgccgtgccctggactacgcccggacctttaattgctttcctcggaaccgggggaaactggctggcgttactggtgggttttttatgtttaggtgtggcgacaatgatctatttaccttttgttattgccgccaacaaggtcaataacatgacaactaacggataa

SEQ ID NO: 32689 - DNA, 1335 bp, Escherichia coli
atgactgctggcgctcacggtgtgccgcgtgaagtgacagaaggcgttatcgacggacttaattatcccaatcatgaagcaattgatttttatcatcgctataaaacagatattcagttatttgccgagatgggattcaaatgctttcgaacttccattgcctggacacgaatctttccgcaaggtgacgaacaggagccgaatgaagagggtttaaaattttatgatgatctgttcgatgaatgcctgaagcagggaatggaacctgtggtgacgctttcgcattttgagatgccttaccatctggtgacaaaatatggtggctggcgaaaccgtaaactgatcgacttttttatccgcttcgcatcaacggtcttcacgcgctataaagaaaaagtaaagtactggatgacgtttaacgaaatcaataatcaggtgaatttcagcgaaagcctgtgtccatttactaattccggtatcttgtattcgccagaggaagatatcaatgagcgcgaacaaataatgtaccaggcggtacattacgagttagttgccagtgccctggcggtacagactggaaaatcgatcaatcctgaatttaatatcggctgtatgatcgccatgtgccccatctatcctctgacgtgtgcacccaacgatatgatgatggccacgaaagcgatgcatcgtcgttactggtttactgatgttcatgcgcgtggatattatccgcaacatatgctgaattactttgccaggaaaggattcaacctcgatatcacaccagaagataatgcgattcttgccagaggttgtgtcgactttatcggctttagctactacatgtcttttacgacacaattttcgccagataacccgcaactggattatgttgagccacgagatttggtcagcaacccttatatcgatacatccgaatggggatggcaaattgatccggcagggctacgttattcactcaactggttctgggatcatttccagttgccgctgtttattgtcgaaaatggatttggtgcggttgaccagagacaagctgacggcacggtgaacgatcactatcgcattgattactttgcttcccatattcgggaaatgaaaaaagccgttgttgaagatggtgttgacttaattggctacacaccgtggggctgcattgacctggtttctgccggaacaggggaaatgaaaaagcgctacggaatgatttacgtcgataaagacaacgaagggaagggaacgctggaacggatacgtaaagcgtcgttttactggtatcgggatctcatcgccaacaatggcgaaaatatttga

SEQ ID NO: 32690 - DNA, 1818 bp, Escherichia coli
gtgaaaaaacacctgaatgccattaaccaggtcgcttcgttaaaagcagaaattaatgagctgaatattgagtataaatacctgcagcaatggcagagtcagaatcttcgaccggaggagcttttttctcacaaataccgattttcctcacaaaaaacaaccgacctgatggcttatattcattacctttctgacaggcggattggattcagaaacagaattgatttgttgttaaacttcatgatactgaaagtcaaaccattgatgattccggagagaaggctggcgctatttacttctcttcagctttcttattatgaaaaaaatatccgggaaaaacaaatttctctgagtgaatatgaggaagtatttaaaaaatctgattttaaaattttactggggcgcctgacatcatggtctatgctttatttaaagcaacatctgcgaagaaatgtttcaacaagaagttcattctcggcagagacatacagggatgaatttgaccgttttataaagcgttttccgattattggtagcagtacgcattcgattattaactctatcggcaagggggcccttcttgattatgttattattgatgaagcctcgcagcaggatattgttccgggcattctgggactgggatgtgcccgtaatgtaatcgttgtaggggatcgtaagcaacttccacatgttcctgtattactcccgaacagcccatctccaccggcagaatactataattgtgagaaatatagtctacttgattcggtttgtatgttgttcaggaacatggtgccagtaacccttcttaaagagcattatcgttgtcatcctaaaatcattcaattttgtaataagcagttttatgataatgctctgataccgttaacggttgattccggtgaagcctcattatctctggtcatcacggcaaaaggaaaccatacccgtaatttttcaaatctcagggagcttgaatctctggaaggtcattactgggatgaagaaagtagcaggggatacattgccccatataatgcacaggttaatctggctgaaaaagtgctgcctgctgattttgtgaaatcgacggtgcataaatttcagggacgggagtgcgatgaaattgtgttttccactgtgctggataagaagcgcagcagccagcacagtcggaacatcgcgtttgttgataatcctgaactggtgaatgtcgctgtttcaagagcccgaaataaatttacgctggtgactggtaatgatgtatttgaacgccacgctggacatattgcggcgctgattcgttacatcaaatactacgctgatgacggagagattttcgagagcccggtcatatcagcatttgatttgctgtacagtgagtatgacaaatcactggaacgactgaatagtagattgaattcaaatgattcacactttaagtcagaacagattgtggcctgcctgttgcgggatatcctgtcgcaggatagttatcggagtatgatgtttcattcacaaatagcgctgaatcagttggtgttgctggagcggggggattttacacaccgtgaacagttattcatgcgtaaccgggccagttgtgactttgttgtttactataaggtcgggaagactccattaggggttattgaagtggatggaggttatcatctgaccagtgttcaggctgaacgtgatgaacttaaaaacagtatactgaagaaatgcggcctgccattgctaagattacgtactatagacagtgatatagaagggaagttgggagcgtttctgtcaggcctgacaggctaa

SEQ ID NO: 32691 - DNA, 741 bp, Escherichia coli
atgaccgctatgagcactgcaattacacgccagatcgttctcgataccgaaaccaccggtatgaaccagattggcgcgcactatgaaggccacaagatcattgagattggtgccgttgaagtggtgaaccgtcgcctgacgggcaataacttccatgtttatctcaaacccgatcggctggtggatccggaagcctttggcgtacatggtattgccgatgaatttttgctcgataagcccacgtttgccgaagtagccgatgagttcatggactatattcgcggcgcggagttggtgatccataacgcagcgttcgatatcggctttatggactacgagttttcgttgcttaagcgcgatattccgaagaccaataccttctgtaaggtcaccgatagccttgcggtggcgaggaaaatgtttcccggtaagcgcaacagcctcgatgcgttatgtgcccgctacgaaatagataacagtaaacgaacgttgcacggggcattactcgatgcccagatccttgcggaagtttatctggcgatgactggtggtcaaacgtcgatggcttttgcgatggaaggagagacacaacagcaacaaggtgaaacaacaattcagcgcattgtgcgtcaggcaagtaagttacgcgttgtttttgcgacagatgaagagcttgcggcacatgaagcccgtctcgatctggtgcagaaaaagggcggaagctgcctctggcgggcataa

SEQ ID NO: 32692 - DNA, 468 bp, Escherichia coli
atgcttaaacaggtagaaattttcaccgatggttcgtgtctgggtaatccaggacctgggggttacggcgctattttacgctatcgcggacgcgagaaaacctttagcgcaggctacacccgcaccaccaacaaccgtatggagttgatggccgctattgtcgcgctggaggcgttaaaagaacattgcgaagtcattttgagtaccgacagccagtatgtccgccagggtatcacccagtggatccataactggaaaaaacgtggctggaaaaccgcagacaaaaaaccagtaaaaaatgtcgatctctggcaacgtcttgatgctgcgctggggcagcatcaaatcaaatgggaatgggttaaaggccatgccggtcatccagaaaacgaacgttgcgatgaactggctcgtgccgcagcgatgaatcccacactggaagatacgggctatcaagtcgaagtttaa

SEQ ID NO: 32693 - DNA, 723 bp, Escherichia coli
atgaaaccggcaagagtccctcaaactgtcgtggctcctgattgctggggcgatttgccctggggagagctttatcgcaaggcgctggagcgccagctcaacccgtggttcactaaaatgtatggttttcatctgcttaagattggcaatttaagcgcagaaatcaattgcgaagcgtgcgcggtttctcatcaagtgaatgtttctgcgcaaggactgcccgtccaggtgcaggcggacccacttcatcttccttttgccgataaatccgttgatgtttgtctactggcacatacattgccgtggtgcaccgatccgcatcgtttattgcgtgaagccgatcgggtattgattgatgatggctggctggtgattagtggcttcaatcccatcagtttaatgggattacgaaaacttgtgccggtattgcgcaaaacctcgccctataatagccggatgtttactctgatgcggcagctggactggctctctttgttgaattttgaagtgctacacgccagccgtttccacgttctcccgtggaacaaacacggtggaaaactattgaatgcgcatattcctgcgcttggttgcttacaacttattgtcgcccggaaacggactattcctttaacgctaaatccgatgaaacagagtaaaaacaagccacgaattcgccaggcggttggagccacccggcaatgtcgtaaaccacaggcttaa

SEQ ID NO: 32694 - DNA, 756 bp, Escherichia coli
atgaatcttaacagtattcccgcctttgatgacaattacatctgggttttgaatgatgaagcaggtcgctgcctgattgtcgatcccggagacgcagagccagtattaaacgccattgccgccaataactggcaaccggaggccatatttctcacccaccatcaccacgatcacgttggcggcgtaaaagaactggtgaaaaagtttccgcaaattgtggtgtatggtccacaagagacacaagataagggaacaacacgggtagtcaaagatggcgaaattgccttcgttttggggcatgaatttagtgtaattgccacaccgggtcacactttaggacatatctgttacttcagtaaaccttatctattttgcggcgacacgctgttttctggtgggtgtggtcggttgtttgaagggacaccatcacaaatgtatcaatcacttaaaaaattaagtgcgttacctgacgatacattggtatgttgtgctcatgaatataccttatcaaatatgaagtttgctttgagtattcttccgcacgatttgtccataaatgattattatcgtaaagttaaggagttacgggcaaaaaatcaaataacactacccgtaattctgaaaaatgagcggcaaattaatgtttttttaagaaccgaagatattgatttaattaatgtaattaatgaagaaacattattgcaacaacctgaagaacgttttgcatggttaaggtcaaagaaagataggttctga

SEQ ID NO: 32695 - DNA, 1221 bp, Escherichia coli
atggacgatgggacgtctatcgcgccagatggtgacttgtgggctttcattggcgacgagctaaagatgggaattccggaaaatgaccggattcgcgaacagaaacagaaatatttacgcaataagagctatctccacgatgtaactttacgggcagagccgtatatgtactggatagccgggcaagttaaaaaacgtaacatgcctatggaactggtactactacccatagtggagagcgcttttgatcctcacgcaacgtctggcgccaatgccgcaggcatctggcagatcattccgagcacggggcgcaattatggtttgaaacagacccgcaattatgacgcgcgtcgcgatgttgttgcttcaacaactgccgcgctgaacatgatgcagcgtctgaacaagatgtttgacggcgactggcttctgaccgtagcggcttataacagcggcgaaggtcgagtcatgaaggcaattaaaacgaacaaagcgcgtgggaaatccacggacttctggtcgttaccgttgccgcaggaaacgaagcagtacgtgcctaaaatgctggcattgagtgatattctcaaaaacagcaagcgttatggcgtacgtctgccaacgaccgatgaaagccgtgctctggcgcgtgtgcacctgagcagcccagttgaaatggcgaaggttgcagatatggcggggatttccgtcagcaagctgaagacattcaacgctggcgtgaaaggctccacgctgggcgcaagtggtccgcagtacgtgatggtgccaaagaagcatgcagatcaactgcgtgaatctctggcttcgggcgaaattgctgctgtacagtcgacgctggttgccgacaatacgccgcttaacagccgtgtttacaccgtacgctctggcgacacgctttcaagtatcgcttcacgtctcggcgttagcaccaaagatttgcagcagtggaacaaactgcgcggatctaagctgaagccaggccaaagcttgacgattggcgcaggtagtagcgcacagcggttggcaaacaacagcgatagcattacgtatcgtgtgcgcaaaggcgattcgctttcaagcattgctaaacgccacggcgtgaacatcaaagatgtgatgcgctggaacagcgatactgcgaatctgcaaccaggcgataagctgacgttgtttgtgaaaaacaacaacatgccagattcctga

SEQ ID NO: 32696 - DNA, 660 bp, Escherichia coli
gtgcgtctggctgattatcctgatgcaagtgtacttgatatgggctgcggagcagggcatgccagctttgtcgctgcgcagaacgtgagcgcggtggtggcgtatgacttatctgcccaaatgctggatgtcgtggcacaagctgccgaagcccggcaactgaaaaatatcaccacccgccagggttatgccgaaagtctgccatttgccgataacgcatttgatattgttatcagccgttattctgcccatcactggcatgatgttggtgcagcactgcgtgaagtgaatcgggtattgaaacccggcggtaggctgattgtgatggacgtaatgtctccgggtcatccagtgcgcgacatctggttacagacggtagaagcattacgcgatacctctcacgtacgaaactacaccagcggtgagtggttgacgttaatcaatgaagccaatctgatagttgataatttaattacagataagttacctctggaattttcttcatgggtcgcgagaatgcgtacgccagaagcgttagtagacgctattcgcatttaccaacagagcgcatcgacagaggtgagaacgtattttgccttgcagaatgacggctctttcaccagtgatatcatcatggtagaagcacataaagcagcataa

SEQ ID NO: 32697 - DNA, 294 bp, Escherichia coli
gtgcaaaagtggctcttccgcaacctgggtggagattttcatgccagtggactcagtgcccttgctgagcagttatcgctgctcttccgccagtatccacagcccggtatacgtgaatcactgatgttgctgtgctggtgtgagctggcgaaagggattgagccggaagcatggtacacactgcatctgctgcttccggccacgctgaagaaatggatcaatacacgacaaaaagagctcaatggtttatcggcactgactgaggattacattcgtgccacccggccactgtga

SEQ ID NO: 32698 - DNA, 1344 bp, Escherichia coli
atgacgacgattctcaagcatctcccggtaggtcaacgtattggtatcgctttttccggcggtctggacaccagtgccgcactgctgtggatgcgacaaaagggagctgttccttatgcatatactgcaaatctgggccagccagacgaagaggattatgatgcgatccctcgtcgtgccatggaatacggcgcggagaacgcacgtctgatcgactgccgcaaacaactggtggccgaaggtattgccgctattcagtgtggcgcatttcataacaccactggcggcctgacctatttcaacacgacgccgctgggccgcgccgtgactggcaccatgctggttgctgctatgaaagaagatggcgtgaatatctggggtgacggcagcacctataaaggaaacgatatcgaacgtttctatcgttacggtctgctgaccaatgctgaactgcagatttacaaaccgtggcttgatactgactttattgatgaactgggcggtcgtcatgaaatgtctgaatttatgattgcctgcggtttcgactacaaaatgtctgtcgaaaaagcctactccacggactccaatatgcttggtgcaacgcatgaagcgaaggatctggaatacctcaactccagcgtcaaaatcgtcaacccgattatgggcgtgaagttctgggatgagagcgtgaagatcccggcagaagaagtcacagtacgctttgagcaaggtcatccggtggcgctgaacggtaaaacctttagcgacgacgtagaaatgatgctggaagctaaccgcatcggcggtcgtcacggcctgggcatgagcgaccagattgaaaaccgtatcatcgaagcgaaaagccgtggtatttacgaggctccgggaatggcgctgctgcacattgcgtatgaacgtctgcttactggtattcacaacgaagacaccattgagcagtatcatgcacatggtcgtcagttgggccgtctgctgtaccaggggcgttggtttgattcccaggcgctgatgctgcgtgactctctgcaacgctgggttgccagccagatcactggtgaggttaccctggagctgcgccgtgggaacgattattcgatcctgaataccgtctcagagaacctgacctacaagccagagcgtctgacgatggaaaaaggtgactcggtgttctcgccagatgatcgtattggtcaattgaccatgcgtaacctggatatcaccgatacccgcgagaaacttttcggttatgccaaaactggcctgctctcctcctctgccgcttcgggcgtgccgcaggtggagaatctggaaaataaaggccagtaa

SEQ ID NO: 32699 - DNA, 333 bp, Escherichia coli
atgtacgaagctcttttagtagttttccttattgtggcaattggccttgttggtctgatcatgctgcagcaaggtaaaggcgctgatatgggagcctccttcggagcaggcgcttccgctacgctgtttggttcaagtggttctggtaacttcatgacccgcatgacggcgctgctggcaacgttattcttcatcatcagtctggtgttgggtaacatcaatagcaacaaaaccaataaaggtagcgaatgggaaaacctgagtgcgccggcgaaaaccgaacaaactcagccagctgctccggctaagccgaccagcgatatcccgaactaa

SEQ ID NO: 32700 - DNA, 654 bp, Escherichia coli
gtgctggctgaaaaagcggatctcggtattgccttcgacggcgacggcgatcgcgtgattatggttgaccatgaaggcaataaagtcgatggcgatcagatcatgtatatcatcgcgcgtgaaggtcttcgtcagggccagctgcgtggtggcgctgtgggcacattgatgagcaacatggggctggaactggcgctgaaacagttaggtattccatttgcgcgcgcgaaagtgggtgaccgctacgtactggaaaaaatgcaggagaaaggctggcgtatcggtgcagagaactccggtcatgtgatcctgctggataaaaccactaccggtgacggtatcgttgctggcttgcaggtgctggcggcgatggcgcgtaaccatatgagcctgcacgatctttgcagcggcatgaaaatgttcccgcagattctggttaacgtgcgttacaccgcaggtagcggcgatccgctggagcatgaatcagtcaaagctgtgaccgcagaagttgaagcggcgctgggtagccgtggacgtgtgctgttgcgtaaatccggcaccgaaccgttaattcgcgtgatggtggaaggcgaagacgaagcacaggtgactgaatttgcacaccgcatcgccgatgcagtaaaagccgtttaa

SEQ ID NO: 32701 - DNA, 429 bp, Escherichia coli
ttgtttcaccagtgcatcattaccattaattttcgagccagtcgaattttcaccatcaacgttcattgtacctttattatcgactttggcgtcatcgccattaatcagactaccggtaccgccattggtgaatgtcgaatcacctgcgacattcaatgtcgtacgatcgccattgacaataacggccgtcccaccatcaacttccgtctcaccattattagtaatggtgatatcatcaccggtaagaatacctaccaccgaaccttcaccaatcgcggtagttttgccgtcgttgttcagggtgatgtcgttaccgtcaacgtttatcacaacgccgccattcagggcgatgttgccgccatggtcggtaatagtggcatcgttaatatggaaatgttcgccagttgtaccgtctgcggtggtgagtga

SEQ ID NO: 32702 - DNA, 369 bp, Escherichia coli
gtggtcaaagttgatgaccccgttatcctggttccagaagaaagcattctgatccccagcattactggcgctaaccaccagcgacttagcagagacatcaatcgttccatcgttgataaagcgaccattcccaccccacatattgacagcaccgttgtgggaggaattactgatgtccatgtgaccagtgttataaagcgtaccggactgattaatatgtacagcattcttgttgttatcgaggataaactcaccgctgttattgaagacggcgttgttattaacttccagcatacctgcgttattgccgccactgctactaccgaggcgccaggttccttcgttattgacccaggcatcaccggttaa

SEQ ID NO: 32703 - DNA, 390 bp, Escherichia coli
atgcacttccgtgttattaccgttgttaccgttcacgccttcaacattaatgctgtcaccctgcttgatcaggccagaacccgtaaccccatcggcgatcaccaccgtgccgttgttaaccacgtgaccttctgtacccagcacgctgaatgcaaacgagtcattggcgaagatattgatggtgccgttgttctcgatcaccgcatccgccgtggcgttggcatcgagttgcataccgatcatgcccgtatcggtagtgccctctgtgccgaggttgatggtgccgttgttaaccagttgcgcgttcttatcaccttccatagccacagcaccggtaccgctgatattcatagtgccgtcattctgcgcgatgaagttactgtgggttaa

SEQ ID NO: 32704 - DNA, 3930 bp, Escherichia coli
gtgaacagaatatattcacttaagtattgtcaccttactcaagggcttatagctgtatcagaattagcatctcgagtatcctctaaaaccggtcgaaaacttctcgctacatttatagtttccgccttgtcttatggtgctgctgaacatgcctatgcagcgcagatggatacccgaaatttctggatccgtgattatcttgatttggcacagaataaaggtgtatttcagcctggagcatacggggtaaaaacgccattaaaaaatggtggtgaatttagttttcctgaagtaacgatccctgatttttctccagtatccgctaaaggtgcaacaactgctattggtgatgcctacagtgttaccgcaagccataatggcactattcaccatgccgttaaaactcagacatggggacagtcagactatcattatgttgatcgggtgaccaaaggtgactttgcggtccagcgtctggataagtttgttgttgaaacagctggtgcaacagagcatgctgatttcaacttatcagcagcagaagcactagagcgttatggtattgatttcaatggaaagaaacagatcatcggttttcgggttggagccggagcaaccggtgttacatcttatggggtgggacaggcatacaatccattattacgtagtgcctccatgtttcagttaaactggaacaatatgttagccacgaataatacaggcggattttataatgaagtgacaggaggagacagcggttccggattttatctttatgacaatcagagaaaaaaatgggtcattcttggaacaacatatggtaaagcattctccagtaaggatacctgggccttttttgctcgatatgatcagaacactgtcgacaccctgaaaaatacttttactcaggaagtgaatctcaatggtgagaaaatgacagttaataataaaaatattactgttaacggtaatacaaccgctattgaactgaccaagaataataaaaataaagatttaaaatttcatggtggcgggaacattgaactcaccgataacctgaattcaggatctggaggattgatttttgatgagggacaatattattcaatcaccgggaaagataaaacatataaaggtgcgggtattgatatcggaaaagatacggttgtcgactggtcggtaaaaggggaggcaaacgataacctgcacaaaacaggacccggtacactgaacgttaatgtggcccaggggaataacctgaaaatgggtgacggtactgttgttcttaatgcagcaaaggcctttaatgctatctatgttgccagtggtcgcggaacggtcaaactagggcaggccgatgcgctggataaaaatagtgattacagaggtatttattttaccagtcgtggggggactctggatttaaacgggttcagccagtcgtttaagaagattgcggcaactgatgttggtaccattatcaccaatacttctgataaaacagcgaccctttctctacaaaacctctcccgttatgtctatcacggcaatatcacgggaaatacgaatatcgaacactctgggacacagaaaagtgctgacagtagcctgattattgatggaaacattgatacgcacaatgatatctccatacagaattcccagcttcggttacagggtcatgccacaacacatgcaatattccgcgaggggcctcggcactgctatgtccccggagttctttgtgacaaagattatgttgctgattttgccaaactggaaagtgaggcaaataagaaaaataacagtgcctataaaacaaataaccaggtggcttcttttgatcaacctgactgggaaacccggcatttccgatttaagactctgaatctggaaaactcagaattcacaactgcacgtaactcagttgctgagggtgatattgtcgcatcgaattcaacgctgaaactggggggcgacgttccggtgttcattgatatgtatgatggcatcaatatcaccggtaatggttttggcttccgccaggacgttcgtgaaggacgctcagcagatgatggcagtagcagctatacgggcaaaattacactgcaaaaaggctccacgctggacatcaacaaccggttcattggcggtattgaagcccatgacagtaaggtaaacgtcacctcaccggatgccctgctgcagaacagtggtgttttcgtgaattccaccctttctgtccgtgacggcggtcatctgacggcacaaaaagggctctacagtgacggccgggttcagattggaaagaacggtacgctttccctgagcggcacgccggaaaatggcgctgataaaacctggatgcccgtactgacatatatgacagaaggctatgatttaaccggtgataacgccatgctgaacatcagccagcaggcgcatgtttccggggatgttcatgcaaccagttcatccagcattcgtattggctccgaaaaccctggctcagtttcctcttctgtctcccctgttctggctgccgggttgttcagcggatataacgcggcgtactacggtgccatcaccggcggtaaggggaacgtcagtatgaataatggcctgtggcagctgaccggagattccgacatcaacagtctgacgacccgtaacagccgggtacagtctgaagaaaacggagccttccgtaccctgacggttaagacacttgatgcctcgggcagtgattttgtcctgcgcactgacctgaagggcgctgataaaatcagtattacggagaaagccagcggttcagacaacaccctgaatgtcagctttatgaagaacccgtctccgggacagtccctgaatattccattggtcagtgcaccggccggaacatcaggggatatctttaaggcgggcacccgggtgacaggcttcagtcgtgtgacgccgacgctgcgtgttgacaccactgacggcagtacgaagtggattctggatggtttcaggacggaaggcgataaagcggctgcagcgaaggcgaacagtttcatgaatgccggctacaaaaactttatgacggaagttaacaacctgaacaaacgtatgggtgagctgcgtgacacgaacggtgatgccggtgcctgggcccgtatcatgaacggtgccggttcagccgatggcggatacagtgataactacacccacgttcaggtcggttttgacaaaaaacatgcgctggacggtgttgacctgttcaccggtgtcacgatgacctataccgacagcagtgcagacagtgatgcgttcagcgggaagacaaaatccgtggggggaggtctgtatgcttcagcactgtttaactccggtgcctatatcgatttgattggtaaatatattcaccatgacaatgactacacaggcaactttgccggtctgggtacgaagcactacggaacccactcctggtatgctggagcggaaacgggttaccgttatcacctgacggaagacacatttattgagcctcaggccgaactggtttacggcgcagtgtccgggaaaacattcaactggaaagacggtgagatggatctaagtatgaagaacaaggatttcagcccgttgattggcagaacagggattgagctgggcaaaaccttcaggggtaaggactggagtgtgacagcccgtgccggaaccagctggcagtttgacctgctgaataatggcgagacagttcttcgtgatgcatccggagagaaacggatcaaaggggagaaagacagcaggatgttgttcaatgttggcatgaacgcacagataaaggacaacatgcgctttggtctggagtttgagaaatccgcctttggtaaatacaacgtggataacgcaataaacgcgaatttccggtatatgttctga

SEQ ID NO: 32705 - DNA, 762 bp, Escherichia coli
atgcagcgcctgcgcgatccggaaaacggctgcccgtgggataaagagcagacatttgccaccattgcgccttacacccttgaagaaacctacgaggtgctggacgccatcgcccgtgaagattttgacgatcttcgcggtgaactgggcgatctgctgttccaggtggtgttttacgcacaaatggctcaggaagaagggcgctttgactttaatgatatatgcgccgcgatcagcgataaattagaacgtcgccatccgcatgtttttgctgacagttctgccgaaaatagtagtgaagtgcttgcccgttgggagcaaatcaaaaccgaagagcgcgcgcagaaagcgcagcattcggcgctggacgatattcctcgtagtttaccggctttaatgcgtgcgcaaaaaatccagaaacgttgcgccaacgttggttttgactggacgacgcttggtccggtagtcgataaagtctacgaagagatcgacgaggtgatgtacgaggcacggcaggctgttatcgaccaggctaaactggaggaggaaatgggcgacctgctgtttgccacggtcaatctggctcgtcatttagggacaaaagcggaaatcgcattgcaaaaagcgaacgaaaaattcgagcgtcgttttcgcgaagtggagcgtattgttgccgcgcgtggactggaaatgacaggtgttgacctcgaaacaatggaagaagtctggcaacaggtaaaacggcaggaaattgatctctaa

SEQ ID NO: 32706 - DNA, 1638 bp, Escherichia coli
atgacaacgaactatatttttgtgaccggcggggtcgtatcctctctgggtaaaggtattgccgcagcctccctcgcagccattcttgaagcccgtggcctcaatgtgaccatcatgaaactggatccgtacatcaacgtcgatccaggtactatgagcccaatccaacacggggaagtgttcgttaccgaagacggcgctgaaaccgacctggacctggggcactacgagcgtttcattcgtaccaaaatgagccgccgcaacaacttcaccacgggtcgtatctactctgacgttctgcgtaaagaacgccgcggtgactacctcggcgcaaccgtacaggttattccgcacatcactaacgctatcaaagagcgcgtgctggaaggcggcgaaggtcatgacgtggtactggtcgaaatcggcggtacagtaggtgatatcgaatccctgccgttcctcgaagcgattcgccagatggctgttgaaattggccgtgagcacaccctgtttatgcacctgacgctggtgccgtacatggcagcgtctggtgaagtcaaaaccaaaccgactcagcactctgtaaaagagctgctctccatcggtatccagcctgacatcctgatttgtcgttcagatcgcgccgttccggcgaacgaacgtgcgaagattgcattgttctgtaatgttccggaaaaagcggttatttctctgaaagacgtcgattccatctataaaattccgggcctgttgaaatcgcaggggctggacgattatatttgtaaacgattcagcttaaactgcccggaagcgaatctgtccgaatgggaacaggttatcttcgaagaagcgaatccggtaagtgaagtcaccattggtatggtcggcaagtacattgaactgccggacgcttacaaatccgtgatcgaagcactgaaacacggtgggctgaagaatcgtgtcagcgtcaacatcaaactgatcgattcacaagatgttgaaacgcgcggcgttgaaatccttaaaggtctggacgcaatcctcgtacctggcggtttcggctatcgtggcgtagaaggcatgattacgaccgcgcgttttgcgcgtgagaacaatattccttatctgggcatttgcctgggtatgcaggtggcgttaattgattacgctcgccatgttgccaacatggagaacgccaactctacggaatttgtgccagactgtaagtacccggttgtggcgctgattaccgagtggcgcgatgaaaacggcaacgttgaagttcgtagcgagaagagcgatctcggcggtaccatgcgtctcggcgcacagcagtgccagttggttgacgatagcttggttcgccagctgtacaatgcgccgacaattgttgagcgtcatcgtcaccgttacgaagtcaacaacatgctgttgaaacagattgaagatgcaggtctgcgcgttgcgggccgttccggggatgatcagttggtcgagatcatcgaagttccgaatcacccgtggttcgtggcttgccagttccatccggagtttacttctactccacgtgatggtcacccgctgtttgcaggctttgtgaaagccgccagcgagttccagaagcgtcaggcgaagtaa

SEQ ID NO: 32707 - DNA, 1299 bp, Escherichia coli
atgtccaaaatcgtaaaaatcatcggtcgtgaaatcatcgactcccgtggtaacccgactgttgaagccgaagtacatctggagggtggtttcgtcggtatggcagctgctccgtcaggtgcttctactggttcccgtgaagctctggaactgcgcgatggcgacaaatcccgtttcctgggtaaaggcgtaaccaaagctgttgctgcggtaaacggcccgatcgctcaggcactgattggtaaagatgccaaagatcaggctggcattgacaagatcatgatcgacctggacggcaccgaaaacaaatccaaattcggcgcgaacgcaatcctggctgtatctctggctaacgccaaagctgctgctgccgctaaaggcatgccgctgtatgagcatatcgctgaactgaacggcactccgggcaaatactccatgccggttccgatgatgaacatcatcaacggtggtgagcacgctgacaacaacgttgatatccaggaattcatgattcagccggttggcgcgaaaactgtgaaagaagccattcgcatgggttctgaagttttccatcacctggcaaaagttctgaaagcgaaaggcatgaacactgctgttggtgacgaaggtggctatgcgccgaacctgggttccaacgctgaagctctggctgttatcgctgaagctgttaaagctgctggttatgaactgggcaaagacatcactctggcgatggactgcgcagcttctgaattctacaaagatggtaaatacgttctggctggcgaaggcaacaaagcgttcacctctgaagaattcactcacttcctggaagaactgaccaaacagtacccgatcgtttctatcgaagacggtctggacgaatctgactgggacggtttcgcataccagaccaaagttctgggcgacaaaatccagctggttggtgacgacctgttcgtaaccaacaccaagatcctgaaagaaggtatcgaaaaaggtatcgctaactccatcctgatcaaattcaaccagatcggttctctgaccgaaactctggctgcaatcaagatggcgaaagacgctggctacactgcagtaatctctcaccgttctggcgaaactgaagatgctaccatcgctgacctggctgttggtactgctgcaggccagatcaaaactggttctatgagccgttctgaccgtgttgctaaatacaaccagctgattcgtatcgaagaagctctgggcgaaaaagcaccgtacaacggtcgtaaagagatcaaaggccaggcataa

SEQ ID NO: 32708 - DNA, 462 bp, Escherichia coli
gtgatactccggcgttgtcgccaggattcgctgctgcccgtcggcatcaaccaccatacgcaacatatcgtggcgtgcgatgagctggttccatgctttctccagtatggcgagatcgaactcatcgtggcgtttatcccactcaaacaggacgtgacaggcgacgccgccatagccaatgaggtgggttcgccccagccagtaggcgtgctgaatgggcgtcaaagggaagggcgcataacgctcgtcggcgtcgtgccgcaacacttccggctgcgaagcggcaggcgtcgcctctggcttagaacagataagctgcgtgagtccatgaggagacagatcctgccacgcccgttccgcattgatgcgtacgcccaggtagtgctgaatatcgctactgagttcaaggaagagcagcgagtccatgccgagttgcaacagatcctggtttggatgcagtga

SEQ ID NO: 32709 - DNA, 534 bp, Escherichia coli
atggctggcgtcgtggagcacattgacggcaacgatcaggtcgtaacccgcctccgggtgggcggtgaaatccagcggctggttgatgtcgaacaaggcataagacacctgcgattcatcatggaaacgggctctggcgtcattgaggaactgcgcggagacgtccgtgaagtggtacgactgtcgcgtgttccgcgtggccttcagcaccggcgcggtagtggctgcggttccggcgccaacctccagaatccgttctgcgctgcacaaggcggcaatctgcgcggtatagcgattcagacaggcgctggcggggttgtcgcgatacagcgcgtcggtaacgcgatgctgctcgttgaacagcaattccagcggagaacactgcccggagaagagggcgtcgtgccgggcgatgcaggtttccagatactgcgccagcgcctggctccattggctttgcgggcacgcttcctgaggctcaggaatctcgctgagcggaatgcggcagcgccagctttcaccttcgcggattaa

SEQ ID NO: 32710 - DNA, 150 bp, Escherichia coli
atgaacatttttaacctgagtacgggcatacagggagccaccgtaagcatagccggcggcctgcccctgccagacgcccggctgggtggtattggaggcgaagcccagcttgttaaagaactgattcatgtcgctgttcacatccgctga

SEQ ID NO: 32711 - DNA, 561 bp, Escherichia coli
  misc_feature (38)..(47): n is a, c, g, or t
atgtcgaccaggaatgacacaggagcaagcgacgatannnnnnnnnntgcctgggtatgtcgaccaggaatgacacaggagcaagcgacgatattaatcacggaagcattctgggctctgaaagaacgcccgaacatcgatgttcaacgcgtcacgtttaatgatggcgaggttgatcaacgggcgctgggcgttaaccgggtgaagatattcgaacgctggaaagctatcgacaccagggataagcggaaaaaattcacggcgctgattccggcaattatggaggctatccgaattagtgatttcaggttgtatcgtgagatcagtgatggaaaaagcattacgtacatgatcgccggattaaacaaagaatatggcgatgtggtggagtccgggctgctttttgcggatccagctgttgtggaacgtgagactgacgagcttatagaaaaagctattgctttcaagcatgcgtatcgtcagcaatatcaatattactttgcagataaacaaatgtctgccaggggtttgtatgagtatcgatgcactacgatgggctaa

SEQ ID NO: 32712 - DNA, 618 bp, Escherichia coli
atggtgcccgtcgctggctggaaagaaactcaggtgagtgatatggatttcgacacaatcatggaaaaggcttacgaagaatacttcgaaggccttgccgaaggcgaagaagctctcagcttcagtgagtttaaacaggcactcagaataagaatgcgctctcacaatgacgcggagcacaaatatgagaagcaaaatcagaccgcagaaaattttgttctggaacccggagaaacgcttttcaaaattcccgttacgtgccccatttgcggttttacatcagaagaacttgacgactcctgtaacaatcaggaaacaaccaagtatgtcgaagatgataccgagtgcgcacgaagaacgattatatccacgagtccaaactccaggaccaataaatctcactttgagagggtgattaatccactcccccaaaccaataaaaaagatgccggaggacaaaaaaaccaatggaacaacgggatatctgtcaaaaaaagacgttccattaaagacaaacaacgcagcgccaacaactgtaagcgctttataccagtaatcaattttcatgttcttaagcggatttattggtggttgcgacattgcttaatgaatccttaa

SEQ ID NO: 32713 - DNA, 699 bp, Escherichia coli
atgcgagctgaaaaattacgccagcgactggttgaaagtaaactgagcaagtacaacctgggggccgatttctctctaccagccgaagccaaagataaaaaaatcatcctggtgccgggtcaggtagaagacgatgcctcaattaaaaccggcaccgtttctattaaaagtaaccttgagttattgcgtaccgtacgtgaacgtaacccgcacgcctacattatttataaaccgcacccggatgtattagtgggaaatcgcaagggcgatattccggcagaactgattgctgaacttgctgattatcaggcactggacgcagatattattcaatgcatccagcgcgcaaatgaagtgcataccatgacatcattgtccgggtttgaagcgttattacatggcaagcaagttcattgttacggcctgcccttctatgccggttggggtttaaccgttgatgaacatcactgcccgcgccgcgagcaaaaattaacgttagcagatttgatctatcaggcgttgattgtttatccaacctatatccacccaacacggctacaacctattacggttgaagaagctgcggaatatttaatcaagacgccgcgcaagccgatagtaattagaaaaaataatattgacagagttattaatatttaccgtaagttaatcatgttctgcagagtcagactgggttaa

SEQ ID NO: 32714 - DNA, 252 bp, Escherichia coli; identical to SEQ ID NO: 5211

SEQ ID NO: 32715 - DNA, 357 bp, Escherichia coli
atggttgaactggcatcacaacccggtgcttgtgtggcccagattgcacgagaaaatggcgtcaatgataatgttattttcaaatggctcagactctggcaaaacgaagggcgtatatcacggcgtattccggtgacaaccacttctgacgcaggcgttgaattattacctgtagagataacgcctgatgagccgaaagaaccgatggctgctcttactccgtccttatccactcagactactgtcagtgccagctcctgcaaggtggagttccgtcacggtaacatgacgctggaaaatccttcaccagagctgctcactgtattgattcgtgaactgaccgggaggggaagatga

SEQ ID NO: 32716 - DNA, 945 bp, Escherichia coli
ttgctttttgaaaacggaagtgttgaagagaaaaacttagcatttgacctttatcacaattatcttgcattacctgaaataaaacaattcgttactgaagaaataaagttgaatttcaatgagcagcaagggttgttagataaagataataaatgttatatcctgttatcatccgataactctgggcgagtaatgcgcttatcgcaccaggcgttaatctcaatgcttgagccagaggttaagaaaaagactatctggaataattactctatatatccatctttgcaggatacccatgaagatgtcagagatgatccagaaacgatttgtacgcgtgcatttcctttatttgcaaaaggatgggaatatgcgcagaaaaataagaaacatcaattgattctcaatgctcttggattgaaaggttatattcgtgatatatttatgtcagcaataatgcgaaaaacagattttgtgcccgaatgcaataatcagccaacagaacttaattcatcattttcctctttgatgaccgattcagaccaatggcaacagcattctctcgaagatgaacattacgctaatctattaacgatgctggatctcaaagaggccagtgaaagtgataaatctaaaatatttttctgcctgtctgccgtatttgcaaatatttctcacagtaatgtctttaacggtattcctgatgcgtcaaaaactttaaaacgttatgcattttctttattggcgaaagctcattctttagatgaaagtatgataagcagtcaaacttttaatacatacaaagcggtgttgcttgatttcaataatctgtctaatgaagaggccaaccagctgcgtataagttcgttatatcgtgatatggtccgctacgcacaatatcgtttttctaaagttttatccgagtggacgccagacgcatggctgtaa

SEQ ID NO: 32717 - DNA, 1083 bp, Escherichia coli
atggattgttcaaaatgcaatggttatgcgacgatgttattaaatatggtgcagggttctgacccggttaatttactggaattacatggtttccttgaacatttcgcatattatgtttcatttggcaaatttaatgctggccaccagcgctataatgcatttaaaaaattcgtcagtgagatttcggagatcagcgcaaacgatatcaatatgacgattaaaaccgggcaatccagacatgaaaatgtgatctctataaatatgaatgatgcaattcctcgtgatgaaaaagggatcaccgtccgaatagataatattaatggaaagaaaagcaactctaatttgtcagatgtttttattccctatgtaaatacattttccgacctcaaaaataaaatactcaggatgaaaattgaactgactgaaggtagtggtttttctaaaagtctttctgacagtcagattgagatgcatattctgaggaatgttaattcgctaaacgttggcgagaaattgaatgatgataatcttgcatatcattctatattctctaacgaattctctgttattattccgccatcctattatgatgcgacttctgtagtaaacgccaataatggtgtgagagaaaaactatttgaaagtgatagtaaagttaaagatatcgtcgatgaaatgtctaatcatgatgtggagagcgaaaaagatatatttgttatcggaggaatgatagaaaaactggattctctggtagacgaatctttcaatgaaaatactgataacatacaaacagtaaaagatttgttaacgcaattaactgatggcatggaactcttcgcgctgcgggacatagtggcattcccatcgtccataatagcaaaactattaaaatccccacttaatagcgatcatgaacttgttatgcgcgtactggatacgtatctgtgctacttcagaaataaaaatctgagtaacgattcggaaataattaactttttccatgctctgtttctgaaaattatagatttattcaatttattgatttgctttttgaaaacggaagtgttgaagagaaaaacttag

SEQ ID NO: 32718 - DNA, 732 bp, Escherichia coli
atgacatttatgaaaggacttccccttttgttgttgattgccagtctgtgcagctacgctgcgctacaacccgatcgcactcgcattgtgtttaacgctaatgataaagccaccagcctacgagtggataatcgtagcgataaactcccctacctcgcttattcctggctcgaaaatgaaaaaggggagaaaagcgacgatcttctggtcgccctgccaccgatacaacgtctggaaccgaaagcaacaacgcaggtgcggatagtcaagcaagcctcgaccgcgaaattaccgggcgatcgcgaaacgctatttttctacaatatgcgtgaaattcctccctccccagaaaaaaacagcggccatgccgttctgcaggtcgccatccagagtcgtatcaaggtgttctggagaccgtccgcgttacgcaagaaagcaggagaaaaagtcgagctacagttacaagtcagccagcagggcaatcaacttaacttaaaaaacccgaccggctattacctgacaatcgcctacctgggacgaaatgagcaaggtgttctcccgggcttcaaaaccgtgatggttgcgccttttagtacagtaattacaaacaccggaagttatagcggcagtcagttttatctcggttatatggatgattacggcgcgttacgcatgacgacgctcaattgcaacggacattgccgtttacaagcagtggaggcgaagaaatga

SEQ ID NO: 32719 - DNA, 1680 bp, Escherichia coli
atgttaccgtgggagctacgcggctacgccccacaaatcagcggcattgcacaaaccaacgccaccgtcaccgtgagtcactcagggcgagttatttaccagaaaaaagtcccaccaggtccgtttatcattgatgaccttaatcagtccgtccagggtacgttggatgtcaaagtgacggaagaagatggtcgggtgaacaatttccaggtttcggcagcatcgacgcctttccttacgcgccaggggcaggttcgctataaacttgctgccggtcagccgcgaacatctatgtctcatcaaactgaaaatgaaaccttttttagcaatgaagtttcctgggggatgctgtcaaatacctcactgtacggcggcctgctgatttcgggtgacaactaccattctgccgcaatgggtatcgggcaaaatatgctctggcttggtgcattgtcgtttgatgtcacctgggccagtagtcagtttgatactcagcaagacgagcggggcttaagttaccgctttaattacagcaaacaagtggatgccactaacagcacgatttcgctcgccgcttatcgcttctcagatcgtcattttcacagctacgccaactatctggatcacaaatacaacgacaacgatgcgcaggacgaaaaacagacgatcagcttatccgtggggcaaccgattaccccactgaacctcaatctgtacgccaacctgctgcatcaaacctggtggaatgcagacgcctccacgaccgccaacatcacggcgggttttaatgttgatattggtaactggagagatatctcgatctcgacgtcattcaatacaacccattacgaagataaagatcgcgacaatcagatttacctgtcgatttcgctccccttcggtaacggggggcgggtcggttatgacatgcaaaacagtaatcacagcaccacgcaccgcatgtcgtggaatgatacgttagatgaacgtaatagctggggcatgtctaccggactgcaatccgaccgtccggataatggagcccaggtgagcggtaactatcagcacctgagttcagcgggtgagtgggatatttctggtacctatgccgccaatgattacagttccgtcagcagcagctggagcggttctttcacggcaactcaatatggtgcggcgttccatcgtcgcagctccaccaatgaaccacgtctgatggtcagtaccgatggcgtggcagatattccggttcagggcaatctcgactacaccaaccattttggcattgcggtggtgcctttgatttccagttaccagccttccaccgtggcggtgaacatgaatgacttacccgacggcgtaacagtggcagataacgttatcaaagaaacgtggattgaaggcgcgataggttacaaatcgctggcttcccgttccggtaaagacgttaacctcatcattcgcaacgccagcggtcagttccctcccctcggtgcggatatccgccaggaggatagcggcattagcgtgggaatggttggcgaggaaggacacgcctggttaagtggagtcgctgaaaatcaacaatttaccgtgatctggggtgatagccagcgttgctcgatccatcttcctgaacatatggaagacaccgcaaatcgcctgattttaccttgtcattaa

SEQ ID NO: 32720 - DNA, 372 bp, Escherichia coli
gtggtgcgcaataaagccgatatcaccggcgaaacgctgggaatgagtgaagtgaacggtcacgcgttaattcgtctgtctgcaaggactggcgaaggcgtggatgtactgcgtaaccatctcaagcagagcatgggctttgacaccaacatggaaggcggcttcctggcgcgtcgtcgtcacctacaggcgctggaacaagcggcggagcatctgcaacagggcaaagcacaactgttgggtgcatgggctggtgaattgctggcggaagagctgcgcctggcgcagcagaacttaagcgagatcaccggggagtttacctctgacgacctgctggggcggattttctccagcttctgtattggtaagtaa

SEQ ID NO: 32721 - DNA, 2172 bp, Escherichia coli
atggttgataacgtaactgttggcagtgtatgtgcacaatctccttctttcatgcctgagttggatggagaaaaaaataaaactcaattgatcattgatgatatagtggcgtatcttaaaaatccttcagtttattcgcttgaaaaagaaggtccgttaaatcatttttttaataattgtagcgagattgaaccatgggttttaatcggtggtggacttattattattgtctccacatctgagcaagaccctgaaagtctgattgtaactgtgggggatattgaaggaaagtgtgctacacagattcccgtaccacctgcgcttacaacatccctcaaagatatttttattcgtcctcatacgaacgcagatgatgagagctttactaaagagcagaaaaaagctaatagtaaatatgatattgtagattataactgtaaggtttattttaatgaaaaaccagaagatttagtcgtgtgcaggcatatttcgctgcagtattgtatagattcaatgaatgaaaatacaggtaaagttccattgaaggaatgctattcaactccagaagggatacagcaacattttccatacgagcttgatcagcaatttgataatctaataaacaatccaccaccaggtacatgcgtcgttgccagtgacaaattcggggagatattatctgtcttctttcacagaatggaaaaagagaagttaacgcatatggcggcaatcgttaaatctcaaaaacacgctatggccgtccgcttgaggataaaacaaacgcctgccggcgaaactgaatatgttgtatccttttatgatcctaatgcaaccaatactgcagtacgctataaagcaaaaaactgtgattcttttgggtcattacaatcatttataaatattgagttggcgaatataaaatgggtaaaaacagagatttgctccgagtgtgtaggcataattccttatctccctcgagagcaggcccatttattaagtggtatagacaatgaattgcaaccaccattatcaccatcagcattatatctattaatgcaaatggggacgtatgaaaatattgttctttttttcgataagttaagaaattcccaagaaatgacagtatcaaaggttcttgagattcttgctgctaaaggaccagggggaacatatgggttatgtatgtcactgcaacacgataatcttaataagattaatgaatatataacaaatttaaaagagttggccagaaaatttaactttagccgggaagacctggaaactctactccttgcgaaagataaccgtggtgtgagcgcgatttctgtagctttatcaaaaaataaaaaagaaagtgtcaaggtattgttcttggcgatagatgactttgagaaagagtttggagtaaataaaaatgaaatacttcatagtgtaggaaaagaaatagactcaatttatgatttaaatagcgctattagaaccaatgattataatgttgttaatatattgctagccaatataaaagccaaaatgtttaaaaatgaaataaataaagaagatatattgaaactgatggctgcaagagaaaaatggacgggggagtcagacaaatggacgaaggcatcaggcttatattctgcgatagtgaaagggtatacggagattgttgctgcctggatggagacagctgatgtgatagccagccattatgaaaatgataaagatgtggtgagagaactactgtcgctgagcagaaataatgctgtctgctctttgcatattgcaagctttaagaaaatgagtaaagaggtcattgacgtatatctgaatgcggcgattcgcctggcgttgaaacacgggttctctttcgatgaaattgtggagcagtttacccgtgactttgatggcaagtcattctctcatgtggtaaataacggggatgatatacatatggggctctggctgaaaatattcaaaattgtggttggtgaaaatgaaaattaccttaaagatgtgatgatgcagctggaagaaaagaataatgaaggtaaatctgtaataagtctggcaaatggcaatcctgtacttaaagaactattctggaaagcagtagacgaatttaactttccgcaagaggagcttaataggttaaagcaatatcgttctctgtaa

SEQ ID NO: 32722 - DNA, 690 bp, Escherichia coli
atgcgcctgcgccaccaggtgaccggcgataccaatgatgaccgcctggcacacagccccggtgaccggatgtacatgctgggcggaatgagtgacaccgccagcaaccgcatcacgtttgagcgcgacagtcagtaccggatcacgggtgtcagtcacaccgacgggatccggcttaaactgacgtaccacgccagcggctacctgaaagccattcaccgcacggataacggcatacagacgctggcgacctacgaacaggacgaacggggacggctgacagaagcggatgcgcggctggactaccacctgttttatgagtacgacgctgcggaccggatcatccgctggtccgataacgaccagacgtggagccgtttcacctacgatgcacagggccggtgcgtgaccgtcaccggggcggaaggctattacaacgccacgctggactatggggacggctgcaccaccgtgacggacggcaagggcactcaccgttattactatgatcctgacggcaatattctgcgggaagaagcgccggacggcagcaccatcacgtatgaatgggatgaattccatcacctgctggcccgccactcccctgccggacgggtggagaaatttgaatacgccgccgcacacggtcagttaagccgttacacggcggcagacggcgtggagtggtag

SEQ ID NO: 32723 - DNA, 753 bp, Escherichia coli
atgaaccttgaagccttaccaaaatattactccccaaaatctccaaaattgagcgatgacgctccagcgacaggcaccggttgtttaacaattacggatgtaatggcagcgcaggggatggtgcagtcgaaagcaccacttgggttggccttatttctggcaaaagttggtgttcaggaccctcagtttgcgattgaaggcctgctaaattacgcgatggcactggataacccgacattgaacaaattgagtgaagaaatccggttacagattattccttaccttgtgaattttgcctttgctgattactccaggtctgcggcaagtaaggctcgctgtgagcattgttcaggtacgggattttataatgtattgcgcgaagtggtgaaacactacagacgcggggaatctgtaatcaaggaagaatgggtgaaggaactatgtcagcattgccatggtaagggcgaagtcagcacagcgtgcagagggtgtaagggtaaagggattgttctggatgaaaaaagaacccggtttcatggcgtaccggtatataagatttgtgggcgttgtaatggaaaccgatttagtcgtttaccgaccacgctggcacgacgtcatgtccagaagctggtaccagacctgaccgattatcagtggtataaggggtatgcggacgtcattgataaactggtaacaaagtgctggcaggaagaagcatacgcggaagcgcaattgaggaaggtgacgagataa

SEQ ID NO: 32724 - DNA, 1050 bp, Escherichia coli
gtgcgggtattacttagacctgttctggtgcctgagcttgggctggtggtccttaagccgggccgtgaatccatacagatatttcataatcctcgagtgctggtggaaccggaaccaaaaagcatgcgaaatctgccatccggagtcgttcctgccgttcgccagccgctggcagaagacaaaacattgctgccgttttttagtaacgaacgggtgattcgtgctactggcggcgttggcgcattgtctgactggctattacgtcatgttacatcctgccagtggcctaatggcgattaccatcacactgaaacagtcattcaccgttatggtaccggcgcaatggtgttgtgctggcactgcgacaaccaactgcgtgaccagacatcggaatcactggagctgcttgctcaacaaaatctgacagcatgggtgattgacgtcatccgtcacgcaataagcggtacgcaggagcgggaattatctttggctgaattatcctggtgggcggtctgcaatcaggtggtggatgcactacctgaggctgtatcgcgtcgttcgctgggattaccagcggaaaaaatctgctcggtgtaccgcgaaagcgacatcgtacagggagagcagaccgccaccagcatattgaaacaacgcacagaaaatcttgcaccgttgccttacgcccaccagcaacaaaaaccaccacaggaaaagacggtggtaagcatcaccgttgatccagagtctccggaatctttcatgaagctgcctaaacgtcgccgctgggttaaggagaaatacactcgttgggttaagacacagccgtgtgcttgctgcggtatgccagccgacgatccgcatcatctgattggtcacgggcagggcggaatgggaacaaaagcacatgatctctttgtgttgcctttgtgcagaaagcatcacaacgagctgcatacggatacagtggcatttgaagagaagtatggctcccaactggagctgatatttcgttttatcgatcgcgcgctggcaactggcgtactggcgtaa

SEQ ID NO: 32725 - DNA, 1290 bp, Escherichia coli
  misc_feature (1102)..(1111): n is a, c, g, or t
atgcttggcgttgttcttgcaattattgtaaccggactggttatttttatgctggcgaaaggatataaacctcagccagtattattattgggtgggttattactgatggggctcacggtggtatttgatctgggaacgttattaccggagaagactactacccactttcaattttttgatatattcaaagtattcagtgatattatgagtacccggttggctgggctcgggttgacgttaatggccatagcgggtttctctcgttacatggatcatgtcggggccagcaaggcactatttgctgtatttgaaaaaccgttgagatcggttcggtcgccttatatgttgctggttgtcgcttttctagtgactcaaatattggttattttcattccaagtcatgctggtttaggtatgttgttgatggtaaccatgtatcctattctgattcgtacaggagttagtcctttatcatctctggctgtaattggaacctgtcaatttatcgatcacggtcccggctctggtaatgtcatcatggcagccaagacggcaggtattgatcctgcaacgtattttgtttatcaccaattacctgtcactgttcccgtaattattgcagttgctatcgcacatttcatcgttcagcgctggtgggataagcgcgaaggctttgtattcacaaaggatacgctggataaaatcgacgataatgatcatgcccgccccccgctgatttatgcattattaccggtggtaccactcgtacttatcattgggtttagcccaatattcaaatcattcattaaaatagatgttaccaccgcaatgattatcagtactatcgtagccttaatatttgaatatttccgcctgaaaagtgcaaaagcagtaatggatagttttatgttgttctttgagggaatgggcaaacaatttgtactggtggtatcgctgattgtatgcggtgaagtctttgctaatggtctgctctatatcggggccgtggacacaatgataactgctgcacaaaatgcaggattcggtgtcggatctatgatcgttgtgatgagttttatcctggcacttgctgctttcttgnnnnnnnnnngcatttttctctttcgcagccctcaccccaaaaatagcggcctttctaaaagtggatgtagtcacgctcattttaccaatgcaaatcatgacgagttttggccgaacagtttcacctataacagctgctattgtcgctatctccggcattgcaggcgtgtctccatttcaggtagttaa

SEQ ID NO: 32726 - DNA, 660 bp, Escherichia coli
atgacggcgatcgtaaatggaagcgtgattgtgaagaaaaagcacagcggtaagcgggtgatttttgcttcggcgtttggcaatgcgctcgaattttttgattttggcgtttacaacttttttgtggtctatatcagtacactatttttcccgcccagcgcagacaaaaacgtcgcgctactactggcatttgcaacgtttggcgtgagtttttttatgcgcccgcttggtggaattatcgtcggggcctgggccgatcgctttggacgtaagcccgcgatggtgttcaccattgccctgatgagcctcggcacgttgatgattggcatcgcgccgacatatgcaacggcgggctattggggaaccgcgacgctggtgctggcgcgtctaattcagggcgttgcagcaggaggtgaagtcggtgcctcaatgtctttgttggttgaatcagctccggcaaatcgtcgcggcttttacagtagctggtcgctggcgacccaggggctggcaacgacctttggtggtgttgttgctttaggtctgagcgcatggctaccgttcgccacaggttcagaaaccgtaatggcagaatggggctggcgtgtgccgttctttattagcacctatcggttgctggttgcgtctgagcctggaaaatga

SEQ ID NO: 32727 - DNA, 2538 bp, Escherichia coli
ttgaaaggttcattagaaaaatccttattattgttaaggatcaccatcatatgtccggtattcagttgcgctgccgtatctccctcacctgacaatagtcataggttctcatttaaccccgattttttgcaattatctgatggtgataatgccaaaaatatcgatctcaattattttgcaagcgcaagcggtgcagctccaggggaatataatgttgatgtagttatgaatggggaattagttgaccgtcagattaagatagattttttcgcgcaggacaataagctgaacgccagactgacacctcaacagctggatcgctggggcgttgataccggtaagctctccacatcaaataatactacaacccaacaaaatattcttcagcttattgagggggcctccgaaaattttgacacgaacaaccaaaagctaatattgaatataccacaaagctacctcaaacctcaggattggttaagtactccgccccatctctgggatgaaggtgtgccagcgctaatggttaactatctatttaacggaattaagcaaaataataatggctacggtagccgtagtcagtttttatctctggacagttctctgaaccttggtggatggcgccttcgccataacggtaactggtcaacaaactcatataataaagagagccactggcaacccgttagtgtttatctacagcatgattattctttcctgcagggagggcaatttactgtagggcaaacctcaacggatggtgcgatatttgacagttttccttttgaaggagcacagttttcatctgatgatggcatgattgccccagaactcagccaatatagccctgttgtccgtggcattgcttattctcaagcacaggtatccgtcaagcaaaacggtgttgtcatttatcaaaagaacgtccctcctggaccgtttgaattacgtgattttaaccaaatattcaccggtgacctggaggtggaaatccgtgaggcagatggtactattcgccattttactcaggcgacggccgttttaccgattctgcaacgtcaggggcgcttacgctataacctggcatttgggaaatatcgctcaagttctactttgaataatagtgtgtctgagcctcaatttgttcaatcttcagcagcaatcggattacctgatgaatatacattttatggtggtggtatcaaagcagacaactatgcagcagttctgcttggcctgggtaaatactcagatttttttggagcgttctccctggatgtcactcatgctcgctcacaattttcgcagaattataagtctttcggaaaacagcaaggacagtcttaccgttttatgtattcgcgtggttttggtgagacgaatacgacattgaatattaccggctatcgttatgccacacgcggttactacgattttgatgagttacaacaaattcagagtggattcgttgatgagaaaaatataaacagttatcatcaacgttcgcgtatatcaacaacgataagtcaagatcttcaggattggggacaactctacctctcagcaagtaaagatcagtactgggataccgctgatggatataacttatctgcgagttactcgctgccattccgctatatctcggcaatgctatcgctcgggtataataaaagcccgtattaccacgaggctgataaatcgctgtttttatctgtgtctgtaccgctcaactcattgctgaatggaaataacctgttcttaaccacgaataccattacgaataatggtcaggtgcaacagcaggttggattaaacggctcctcacaggatggtgagtttaactatgccgtggcgcaaggctggcagaatcaaaacagaggagagtcaggtaacattaaccttaactatcgtggaccttatgcacaaatgaacggcggttatgcctggcaaaaagagtcccgccaatggacatacggaattagcggtggtgttacgttgcatccacatggattaaccttatcccagccattaagcctggacagtgccagtgctctggttcaggctcgtgatgccgccagcgtaagagtattgaacggttcaggtatttatacggactcgcgtggatatgccgttgtcccatatttaaatccctataaccgaaatcaaatttcgcttgatgtaaatagtgtgaaggataatgtcgagctgctaaatacagatgttactgtaatccctgctcgaggagctttagtttccgccccgtttaaagtcaatgtcggtaataaggcaatcattaccttgatacagaagaatggtgagcccgtaccatttggtagtgtggtgacattagattctgaaaacagcattaacagtagtattgttgctgatcaaggacaggtgtatatgtcagggttacctgaagaggatacacttatcgtacaatggggggaggagccttctcaaaagtgtaaagtaaattacaaattgcaaaataaaacagcaaaattcaatgaattaactttacagtgccaatag

SEQ ID NO: 32728 - DNA, 300 bp, Escherichia coli
atggcgggtggcgtgaatcacgttcgctgccacgataagatcgtaagactgtgcctggaaaccctgagactgcgcctctttttcgagatccagctcgctatacttcacaaaatcatagtcggcgaatttctgctgggcgcgacgggtgaacagcgccgagatatcggtgaaatggtactccagtgccggaacgccgttgagttccggcagcagccacgcggtggtgccgccggttccgccgccaacttcaagaatacgcaacggctggcggggctgacgcgtctggacaatgccgcgtaa

SEQ ID NO: 32729 - DNA, 150 bp, Escherichia coli
atgactgcgagaattaaccgtggtgaggcgatccctgaaccagtaaaacaacttcctgtcatgggcggtagacctctaaatcgtgcacaggctctggcgaagatcgcagaaatcaaagctaagttcggactgaaaggagcaagtgtatga

SEQ ID NO: 32730 - DNA, 519 bp, Escherichia coli
atgccaacaccgtgttatatctccatcacaggtcagacccagggaaatattactgcaggtgcatttaccgctgattctgtcggcaacatctatgtgcaggggcacgaagacgagatgctggtgcaggaattcctgcataacgttactgtcccgaccgatcctcagtccggccagcctgcgggtcagcgtgctcacaagccgttcatttttaccgtggcgctgaacaaagctgttccgctgatgtacaacgcactggcctccggcgaaatgctgccaaccactgaacttcactggtggcgtacctctgtggaaggcaaacaggagcattatttcaccacccgcctgaccgattcgacgattgtcgatatgaaactgcatatgccgcattgccaggatccggcgaaacgcgagttcacccagttgctcgaagtttcactggcctaccgcaaaatagagtgggaacacgtcaagtctggcacctccggtgccgacgactggcgcgcaccgctggaagcataa

SEQ ID NO: 32731 - DNA, 876 bp, Escherichia coli
gtgttcggtgatgtccacactcactggcttaccgctgccgttaatcaggttcaccgtggcggcaccggtctccggaagtgtcacttcacggtccagcgtcagggtgcgggtggcagcatcaatggacaggacacgtccgccggtcagggtcccggcatagtcgttatcacagatttcaatgatgtcaccgggtgtgtgccgcagcccctgagacccgagcgtgaaatccaccgtctgcgtttccagcagttcggtctttatcacccacagtccggcacggtgggcctgaccgcggctggtacagccgaacgcgtccatcttcagcaggttgcgtccgtagcgcagtatggcttccgggtcttccaccagttccgtggaggtctgccagccgttctgcgggtcggtgtaattcacctccaccgccgtgtgccggtccttcagggcactgaagctgtagcggaatcccacgccgttatcatccaccaccacatcgctgttggtgtacggccacaccacatccgacgggcggtcctgaacgaacgtcagcgtctgaccgttccataccggcatacagcgcatcgcagagcagaaatcactgagaacgtcccacgccttacgctgttgtgccaggtacgcattaaaggtcatccgcggctcggtccccccgaaaccatccgggaccgtctgatcgcagtactgcccgatggcatacagcgcccacttgtccacatccgccgcccccagacgttttcccatgccgtagcgcgggtgagtcagcatgtcccacaggcaccaggccgggttgttgctgtatgccggtttcagactgccgtcccagataccactgtacgtgcgtttttccgggtcatagtttga

SEQ ID NO: 32732 - DNA, 1878 bp, Escherichia coli
atgtctgcatcttcggttaagccgttaaatgttcaattacccgcaataactcttatcctttttgcgctttgtgttgggttattttgttatctcgcacaatggatgagttatgaagaagtcgatcaatccgcactcatccatcttggtgctaacgttgcttctctcacgttgtcgggtgaatcctggcgcttattgagcagtgtctttctgcacagtagttttccccatttgctgatcaatatgtttgcactcctggtggtgggggcagtggcggaacggatactggggaaatggcgactcctgattgtctggctattctctggcgtctttggtgggctaatcagtgcctgttatgcgttacgcgaaagtgagcagatagtcatcagcgttggggcatccggggcgattatgggaatagctggcgctgcgatagcaacacagcttgcttcaggtgcgggcacacaccataaaaaccagcggcgagtatttcctctgttgggtatggtggcgctgacactgttgtacggtgcccggcaaacaggaatagataacgcttgccacattggcggcctgattgcgggtggcgcgttgggttggctgagcgcgcgtttagttgggcagaaccgattcgttacggaaggcgggattattgttgcggtcactcttcttccgaccggggctatctggcttgtgcagcagcagattgatgaatcagttttacaggtcaggcaaagcctgcgtgaagagttttatccgcaggagattgaacaagagcgacgacaaaaaaagcagcagttagtggaggagcgcaacgccctcagggaaacattatccgctccggtaagtcgtgagcaggccagtggtgatttactcgctgagattgccgatatccatgatatggcgatcagtcgggatggtaatacgttgtatgccgcaattgaaaacaccaacagcattgttgttttcgacctcggacaaaagaaaatcctgcatacctttacagcgcctatagcgaaagaaaagtcactcaaacattgtggtggctgtaaagatcagggtgtcagagcgctggcgttaagcccggatgaaacgttactttatgcgacgtcatttgaagcgaatgcgttatcggtcattaacgtggcgacgggggagattattcagtcgattaccaccggcgcacatcctgacagccttatcctctcgcgcgatggcacaaaagcctgggtgattaatcgcaccagtaatagtgtgtcagccattgatctggtgacttatcagcatgtggcggatatcccgatggagaaatacgacgggacggggacgagcggtaaaccaggtgcctgggttatggcactttccccggatgaaaaaacattgttgatacccggtatggtcagaggtgacattgtacggatcaataccatcacgcatcagaaagaaagctatccggctagtgatgcgcgtggaacgatatcggcgatgcgttttcgacctgaaaacggggatgtaatttttgccgatagccaggggatttcacgtataagagctgaggatcaacaagccagcattatgacgcaatggtgtagcaggagcgtttattccgttgagggtattagcccggacggtcagtatttagcgttggtgtcatatggcctgcaaggttatgtcatcctgctcaatattaatgccgggcagattgttggcgtttatcctgccagctacgttaatcatcttcgtttttcagcggatagtagaaagatatttgttatggcgaagaacgggttaatccaaatggacaggacgcgctcgcttgatccgcaggcaattattcggcatccccaatatggcgatgtggcttgtatccctgaaccgtaa

SEQ ID NO: 32733 - DNA, 2025 bp, Escherichia coli
atgacggcaagcgtcactgacgctaacggcaacccggtagaaggcataaaagttaatttccgcggaacctccgtcacgctaagcagcaccagcgttgaaacggatagtcagggattcgctgaaattcttgtgacaagcaccgaggtcggactgaaaacagtttcagcctctctggcagataaacctactgaagtcatctcgcgattactgaatgccagtgcagatgttaattctgcgacgtttaccagtctggagatacctgaaggtcaggtaatggtcgcacaagacgtagcagttaaagctcacgttaacgaccagtttggcaacccggttgcgcatcaacccgtgacattcagtgcagagccatcctcgcaaatgatcatcagccagaatacggtgtctactaatacgcagggtatagccgaggtcaccatgacgcccgaaagaaacggttcgtatatggtgaaagcatccctggcgaatggagcctcaattgagaaacaactggaggctattgatgaaaaactgacactcacggcgtccagcccgcttatcggtgtcaattccccaacaggtgcaactctgacggcaacgctaacttctgcaaatggcactccagtggaaggtcaggtcatcaactttagcgtaacgccagaaggtgcaacgttaagtggcggaaaagtgagaaccaactcttcaggtcaggcaccagtcgttctgaccagcaataaagtcggtacatatacggtgactgcatcgttccataacggcgtaacaatacagacacagacaaccgtgaaagtcactggcaactcaagcaccgcacatgttgctagctttatcgctgatccatcgactatcgccgccaccaacagtgatttaagtaccttaaaggcaacggttgaggatggcagtggtaacctgatcgaaggtctcactgtgtacttcgccttaaaaagcggctctgccacattaacgacattaacagcggtgaccgatcaaaacggaatcgcgacaacaagcgtgaaaggagcgatgacaggtagcgtcacggtaagcgcagtcacgaccgctggtggaatgcaaacagtagatataacgctggtggcaggcccggctgacgcctcgcagtccgtccttaagaacaatcggtcatcactgaaaggggactataccgatagtgctgagctacatcttgttttgtacgatatatcaggcaatccgatcaaagtttctgaagggatggaatttgtgcaatcaggtactaacgtgccctatgtgaaaattagcgcaattgattacagtcaaaatatcaacggtgattacaaagccactgttacaggcggcggagagggtatcgcaacgctgatccctgtattgaatggtgttcatcaagcgggtctgagtaccacaatacaattcactcgcgcagaagacaaaataatgagcggtacagtgttggtcaatggtgctaacctaccaacaactacattcccttcgcagggattcaccggggcgtattatcagttgaataatgacaactttgctccaggaaaaacggcggctgattatgagttttcaagctctggctcctgggtcgatgttgatgctaccggtaaagtgacatttaaaaatgtcggcagcaaatgggagaggattacggcgacgccaaaaacaggcggccctagctatatatacgaaatccgagtgaagagttggtgggtgaacgccggcgatgctttcatgatatacagccttgctgaaaatttttgcagtagcaatggctacacacttccccttggagaccatttaaaccatagtcgttcccgaggcatcgggtcactgtacagtgaatggggagatatggggcattacacgactgaagctggttttcaatcaaatatgtattggtcatctagtcccgcaaactcaagcgaacaatacgtaatttctctggcaacaggtgagcaaagtgtatatgaaaagcttgggtttgctcatgcgacatgttataaaaacctctga

SEQ ID NO: 32734 - DNA, 2058 bp, Escherichia coli
atgcttgatgagcgtaccggactgactcacgactacacccgcaaaagcggtgtggctgaggctgtgattctgacccccgccaccgcccctgcctggtgtacgaaccgtgccgaactctggaatgccgttgagaaggccgaacgccggaagaactcacaacttgcgcgggaaattgaactcgccatcccccacgaactgccgcaggatgccgcacgggaaaccgttctcgcctttgtcagagaaaactttgtcagtcagggcatgattgctgatgtggcgttccatcacatggataaaacaaatccccatgcgcacatcatgctgaccacgagggctatcggacctgctgggttcagcggaaaggtcagggactggaacgaccggacacatgccgagacgtggcgggcatcatgggctgaccatgcaaacagggcactggcgaacgccggttatcaggaagagatagaccatcgttcatacgagcgacaggggcttgagaaaacgcctggtattcacctcggaaagtctgcctgtgcgatggaaacacgcggtatcgaaacagaacgcggcgaacagaatcgtctgattaataggcttaacctggaaatacagatttcccgcaccgaactcaggaacggagggctgacagagcctgcccgccgtgtggctgaccttctgaatatcgggcttcctgacaacgcaacttcgtacacactacgtgacattatcgaagcgttgccgaaggacagtaactcggcatggaaactcaccagtaatgccatgtcgatgatggcagatatgcaggcgacgcgcagacgctgggaagagctgaacaccgaacgaaaggaagcgatgagccatgctgccagcctgaaaaaatcatcgccgttttcgtccggtttttcccgtattcccctgatgcaatgggcggcaccggaataccgtagtgagcagggaaaaatccagtctctgagccagcaaatggaaaaattacgacagcattaccggaaggtggagaaacaggacattcccgcgagtcagatggcatttgaaaaacagtggcagcagtggggggaatccggccttgcagctctcagagcccagttgcttaaacgtgaagaggaattgcgccggaaggaacaggaagatactgaacgtagtcgcgcggagcagctcaggaaaaatgacaatgccgttatggattcaggggtgctgagagcagtcgttacggggtatggcgaggctcccatgcctggtaacggggaaatgacctgttaccttctgcttcacaaccggaacggagaatatacgctctgggggaacgagctggagaaataccgcaccagaatctttgagagtgttgatttaatgcgtgacaggagtggttatatctgtgaccgaagcgaaatcggccaacgtccgccactgcaacgtgtttattcctctgcaacctttgagcaactgctgacgcaggtttgccagacatggccgcaacatacccgcaatctccgccagccgaagacatggccggagtctttctgtcttggagaagaccgccagccagccatgccatcaccagcggcaaggaaggtggattttatgcagggacgtctgccaccgacgctgatgccggtcatgagttctgtcgaccgggaaacccgccagcttcagcttttgctggtcatgggcgtggatgactctctgggcggtgttatccggcttaatggtacgctgtatcccgcgtttgccgttccctcagccgataacaggcatctggtcatcagtgcgctgaccgataaggggttacggtatgcagggtatggtgttgccgtaaatcacgatgcagacagccacatatcacctgcaccagaactgatgcagtttcatctgaaaacccgtgaggcaccgctttttgctgccgtcaacacaccagaaaaacagccggatcatctgttccgctcgctgggttttaatcgtacctgggaggaatggcagcgcgaggaagatgcacgaacacacaccaccgagaggagacatgatcgcggttggtcacagtga

SEQ ID NO: 32735 - DNA, 960 bp, Escherichia coli; identical to SEQ ID NO: 30813

SEQ ID NO: 32736 - DNA, 960 bp, Escherichia coli
atggcaagcgacattaacagtatgaacctcagctcctgtcaggtggcgcaggggattgtcggaggattatttcctcagactcaggtgtcacagcagaaggtctgtcaggacattgccggtgagagcaatatttttgctgactgggccgcgtcccgtcagggctgcacggtcggaggacagtcatcgtctgttcgtgacaaggccagtgacaaagataaggaacgggtgctgaagaacatcaatatcatctgggactcgctgtccaaaaacaggatgcttgatggtaacaaagaactgaaagaatttattatgacgctcaccggtacgctgatttttggggaagacagcgagattacccccctgccggcgcgtaccactgaccgcgatatcctccgggcgattatggaggggggaacggcaaaagtttatcactgcaacgattcggacaagtgtctgaaggtggtggcggatgcaaatgtgaccatcgcccgggataaagccctgaaatcacagattacaaaactgctcaccagtattcagaataaagcggtgagtgatactccactggatgacagggaaaaaggcttcatttccagcaccaccgtccccgtctttaaatatcttattgacccgcagatgctcggtgtatccagcagcgtggtttaccagctgacggactatatcggctacgacatcatgctccagtacattcaggaactgcttcagcaggcccgggccatgattgccaccgggaactatccacagaccgtgctggacagtgtgctggagaatctgaatcaggcacagcaacagattgcggttttccaggggcaggtaaaggtccagcaggatgcattgctggttgttgaccgtcagatgagctatatgcgccagcagctttccgcccgcatgctcagccgttaccagaacaactatcacttcggagggagcacgctgtga

SEQ ID NO: 32737 - DNA, 783 bp, Escherichia coli
atgttggaatcaagcaaagttcccgccctgacacgggctattgatattctcaatttgattgcccgcattggcccctgtagtgctgcgacgatcattgacacattggggatccctaaaagcacggcctatttgctgcttaatgaactcaggcgtcagcgttttcttagccttgatcaccaggaaaatttttgtttgtggaccaagctggtggagctttccggtcatgcgttaagcaagatggatctccgggaactggctcgaccgcgtttgacgcaactgatggataccaccgggctgttatgtcacctggggattattgataacggcagcgcttattacattttgaaagtggagtcatcagccactatcagcgtgcgttcccatgaaggaaaaagcctttcgctttatcgctccggaataggtaaatgcctgcttgcctggcaacctgcagctgtacagcaaagtattatcgaagggctggtctgggagcaggcgacacccacaacgattactcatccacagcaacttcacgaagaactggcgcgtattcgccgtcagggctggagttatgacaacggcgaagattatgccgatgtccgttgtgtcgctgccccggtgtttaacgccaataacgagcttaccgctgcgatttcggtggtcggtacccgcttacaaatcaatgaagaataccgtgattatctggcgggcaaggccattgcctgcgccagggatatttcacgtctgttgggatggaaaagtccctttgacttacaggcctcataa

SEQ ID NO: 32738 - DNA, 1221 bp, Escherichia coli
  misc_feature (614)..(623): n is a, c, g, or t
atgaccctaccaaaaatcaaacaggttcgcgcctggtttactggcggtgcgacagcagaaaaaggcgctggcggcggtgattatcacgaccagggggcaaatcactggattgatgatcatattgccaccccgatgagtaaataccgcgaatacgagcagtcccgccagtcatttggcattaacgttcttggcacgttgattgttgaagttgaagcagaaaacggccagaccggattcgctgtttcgacagccggtgaaatgggctgttttattgtcgaaaaacatcttaaccgtttcattgagggtaaatgcgtcagtgatatcaaactgatccacgatcaaatgctcaatgccaccctgtattactccggctctggtggcctggtgatgaatacgatttcctgtgtcgatctggctctgtgggatctgttcggcaaagtggtcgggcttccggtttataaacttttaggcggcgcagttcgtgatgagattcagttctacgctacaggcgcgcgcccggatctggcaaaagagatgggctttatcggtggcaaaatgccgacgcactgggggccacatgatggcgatgctgggatccgcaaagatgccgctannnnnnnnnncgctatggtcgcggatatgcgtgaaaaatgcggtgaggatttctggttaatgctcgactgctggatgagtcaggacgtgaactatgccaccaagctggcccacgcttgcgcgccctataacctgaaatggatcgaagagtgcctgccgccacagcagtatgaaggttatcgcgaactgaaacgcaacgcgccagtcggaatgatggtcaccagcggtgagcatcacggcacactgcaatctttccgtacgctttcagaaaccggtatcgacattatgcagccggatgttggctggtgcggtggcttaaccacgctggtggaaattgccgcaatcgccaaatccagagggcaactggtggtgccgcacggttcgtctgtttactctcaccatgcggtgatcaccttcaccaatacgccattcaacgaattcctgatgaccagcccggattgttcaacgatgcgtccgcaatttgatccgattctgcttaatgagccggttccggtgaatggtcgtattcataaatcagtgcttgataaacctggtttcggcgtcgaactcaatcgtgactgcaaattgaaacgcccctacagccactaa

SEQ ID NO: 32739 - DNA, 171 bp, Escherichia coli
atgcgccaggcgctgcgggctgctaatgcgaaagcagagattatcgtctacccggatgccgggcatgcattcaacgccgattatcgcccgagctatcatgccgaatctgcaaaagatggctggcagcgtatgctggaatggtttaagcagtatggtgggaagcggagttag

SEQ ID NO: 32740 - DNA, 252 bp, Escherichia coli
atgcgtatgttgcaggaagagaatatctggatcgtcggtacggcaggcgaggcggatcatacactctatcagagcaaaatgaccggacgcctggcgctggtgatgggcgcggaaggtgaaggtatgcgtcgcctgacccgtgaacattgcgatgagttgatcagcatcccaatggcaggaagtgtttcttccctgaacgtttcggttgcgaccggaatttgcttatttgaagcggtgcgccagcgcagctag

SEQ ID NO: 32741 - DNA, 1554 bp, Escherichia coli
atgcaaatgattacctcgcgacaaaacagattattacgattccttttaccacgaagggaatatacgactattgttacgattgccggctatttaaatgtttcggaaaaaaccattcaacgtgatttacgtttacttgagcaatggctggaacaatggcgaataaccgttgagaagcgtgctggcgcaggtgtgatgttagactcgaagaatattactgatttgctgcatcttgatcatttgttgggagcagaatgtgaagagattgatggtgtaatgaataatgccaggcgcgttaaaatagcgtcgcagttattaagtgaaacaccgaatgaaacgtcgatcagtaaattgtcagagcgctattttatcagtggagcctctattgttaatgacctgagagtgattgagtcctggcttgcgccgttggggttatcattgatccgcagcccaagtggtacgcatattgaaggtagtgaagggcaagtccgacaggcaatggcattactgattaacggcattattaaccataatgagccgcaaggtgtcgtgtattcacgtctggatcccggaagttataaagcattagtccattattttggagaagaagaggtgttatttgtccagtcattgttactggatatggaaaatgaattaagttggtctttgggagagccttattacgttaacatttttactcacatccttattatgatgtatcgcaacacgcacgggaatgcgttatccagagaagaagatcaaaccaggcaatatgatgaaaatatctttaatgttgccagtcagatgattcataagatagaacaacgaattgcacatacattgcccgatgatgaagtctggtttatttatcaatatatcatttcatcaggtgtggcgattgatggacaaaaagatgttagcattatttcacatatgcaggccagcaatgaagcgcgtctgattacctggcgtttaattacggtattcagtgacatcgtggactgcgattttagtgaagacagcgcattatatgatggcttgttggttcatattaagccgctgattaaccgactaaattatcgcattcatatccgtaatccattgctggaagatattaaagcagaattagcggatgtctggcggttgacgcaatatgtggtgaatcaggtatttaaaacctggggtgagaatgcagtgagcgaggatgaagtaggttacctgaccgttcattttcaggctgcgatggagcggcaaattgcccgtaaacgtgtattactggtctgttcaaccggaatcggaacttcgcatctactgaaaagccgtattctgcgagcatttcctgaatggacgattgttgatgttatttcagcagcgaatttatcacaggttttgcctgacaatatcgaactgattatttcgaccattaatttgcctacagtcactatgccggtcgcttatgttaccgctttttttaatgatgccgatattaagcgagtcactgaaatggtgattacggaaaaattacatcatgcgacatctcgggtcgttgaaatttaa

SEQ ID NO: 32742 - DNA, 621 bp, Escherichia coli
gtggcgcaactttccggtgggcagaaaaaacgtgcaaaggaatctggtgtcactttgctgtacaccccctttgcccgtgaagcattcgttttcatcgtcaatgcggataatccggttaattccctgactgaacaacaggtgcgtgacattttcagtggtgcaattaccaactggcgtactgttggcggtaacgatcaggagatccagacctggcagcgcccggaagactctggcagccagacagtgatgcaatcacaggtcatgaaaaatgtccgcatgatctcgccgcaggaaacggaagtggcaagcgtgatggagggaatgattaaagtcgttgccgaataccgtaatacaaacaacgcaataggctataccttccgctattacgcgacgcaaatgaatgctgataaaaatataaaattgctagcgattaacggtattacaccgacggcggaaaacattcgcaacggcaaatatgcgtacatcgtcgatgcatttatggtgacgagagaaaatacaacgtcagaaacacaaaaactggtcgaatggtttttaacgccgcaggggcagagtccggtagaagatgtgggatatgtgccgctgtataaaacgttgcattaa

SEQ ID NO: 32743 - DNA, 762 bp, Escherichia coli; identical to SEQ ID NO: 25643

SEQ ID NO: 32744 - DNA, 486 bp, Escherichia coli
atggccagctgctggcgagtatgccccttagccaatagtcgcccaatctggtctcgctcatgcggctttaatgcgttgggccttccacctatgcgtccttgtgctctggctgctgctaacccggcaagtgttcgttcgacgatcagctcacgttccatctccgccagtgccgacatcacatggaaaaagaaacgccccatggcagtgctggtatcaatactgtctgttaaagagcgaaagtgggcaccgcgttcatgtaactctgatatcagtgcgatcaggttcttaacgctgcgtcccaacctgtccagtttccacacgacaagggtgtctccgctattaacgcactttaaagcgcgtttaaggccgggtcggctggcaacttttccgctcatgcggtcttcaaaaatgtggtcacagtttgcacttgttagtgcgttacgctgtaaatcgcagttctggtcaattgttgatacgcggatataa

SEQ ID NO: 32745 - DNA, 624 bp, Escherichia coli
atgatggccaccaattttcctcctctacatcgtggtgcgaggattcttgcagatttcgctatgtgtaactgcttttccaaaaaccttggtttaggggaaggctctgctttgccggttggcgtccccattccgtggccgtcagcaacgccaccaacagggtggctcaaatgcaatggggctgcgtttaccgcctcccagtaccctaagttggcactggcttatccggcgctcagactgcctgatctacgcggggagtttatccggggatgggatgatgggcgtggggttgatagtggtcgtcagttgttcagtctgcagggtgaagatttcaaagcccaccgacatgagtcctatttttatgcaggaatatcacgtaatgaaattcctctgacaagcctgctgagttccgatgaaatgctgacgttaagctcgacgactaactcactatcacctgtggatattgatgcaaacggtacccttctcggtaatgacgattataactgcgttcaggagggtaacaaaaacaacaagcggactgcgaccgggttgagtaccaatattataggtggttcagagacgcgtccgcgcaacgttgcatttaactatattgtgagggctgcataa

SEQ ID NO: 32746 - DNA, 600 bp, Escherichia coli
atggtcaaagccgaattaaatcaggacatgatcgccacggtggccggtgaaatccccgtctacaactacgatggcgagacgcgcgaatatctgtcttcatccgttgagtaccttgccgtaggggttggcatcccggctaattcctgcgttgatgctccgggtgaaaaaaaggagggatttgctatttgccgtacagcagacctttcatcctgggaatatgtcaccgaccacagaggtcaaaccgtttatagcacagagacaatgcaacaagtcgacgtgactacactgggggattatcccgaaggtacaacgccaaatgcccctgcatcaccgtatgataaatgggacggagagaaatgggtcacggattctgacgcaaaacatcaaggtgatattgctgatgcagaacaacaccgacaaatgctcctcgctcaggtagatgaactatcctccgactggcgagtggagctgatgctcggtgatatcagcgaagaaaacaaaaagaaattatcgtcatggatggcttataaaacggcggttaaagccgtcgatgtttcgacggctcctgatattaactggcctgttcaaccggaggcgtag

SEQ ID NO: 32747 - DNA, 249 bp, Escherichia coli
gtgacggataccgccgcgcagcacgcggcaaaagtggaggcagcagaacagcaaaaatcagcgttactgattgaggcgcaggcaatgatcagtctatggcagacagaactacaattaggcattatcagtgataaagataaggccagcctgatactctggctgacctacataaaggaattgcaggcggtcgttcctgacgctgcaccaggtatcaaatggcctacgcctccggttgaacaggccagttaa

SEQ ID NO: 32748 - DNA, 1359 bp, Escherichia coli
gtgcgcgaaaaactggcgcatcaggtactcaaccccgaagtgtggccggtattcgatctccaggtcggatacgtggacgggatgcctgcccgcctgtggctgtgtctggataacctgttgcttgacggtctgagcatgcagatcctgctggcggagctggagcacggctaccgctacccgcaacagctgcttccgccgctgcccgtcaccttcagggattatctgcaacaaccctcgctacagtcgcccaatccagattctctggcatggtggcaggcgcagcttgatgatattcctccggcgcctgcgttgccgctgcgctgcttgcctcaggaggttgaaacaccgcgcttcgcccgcctgaacggcgcactggacagcacgcgctggcatcggctgaaaaaacgggcggctgacgcccatctcaccccgtcggccgtactgttgtcggtgtggtcaacggttctctctgcatggagtgcacagcctgacttcacgcttaaccttacgcttttcgacaggcgaccgctgcacccgcaaatcaaccagattctgggcgatttcacctcgctgatgctgctgagctggcatcccggcgaaagctggctgcacagcgcgcagtcactacagcagcggctgagccagaacctcaaccaccgcgatgtgtcagccatccgcgtgatgcgtcaactggcgcaacggcaaaacgtgccagccgttccgatgcccgtcgtctttaccagcgcgctgggctttgagcaggataacttcctcgcccggcgtaatctgctcaaaccggtctggggcatctcccagacgccgcaggtctggctcgatcaccagatttatgaatccgaaggcgaactgcgctttaactgggattttgtcgccgcgctgttacctgccgggcaggtggagcgccagtttgaacagtattgcgcattgctaaaccgaatggccgaggatgaaagcggctggcaactgccgctcgccgcgctggtgcctcccgttaaacacgcagggcaatgcgcagagcgctcaccgcgcgtatgccctgagcactctcagccacacattgcggcggacgagagcaccgtcagcctgatttgcgacgccttccgcgaggtggttggcgagtctgtcacgcccgcagaaaacttctttgaggcgggcgcaacgtcgctgaatctggtgcaactgcacgttttgttacaacgtcacgaattttccaccctgacgttgcttgacctcttcacccacccttctcctgctgccctggccgattatctggccggcgtcgccacggtggagaaaacacaacgacctcgccctgttcgccgtcgtcagcggcggatatag

SEQ ID NO: 32749 - DNA, 477 bp, Escherichia coli
atgaggatcgtcaatgatggcggcatccagaccgacggccagaagctcttcgcgcgtaaagcgtcggctgcattcacgaccttccagcagattttgccagaacgtttcgccatccggcgattcaggaaaatggcaggcgtagccgataaccgcgacaggttcgcagtccgggtagtgttgagcgatcgatgcatcaatggaatctgctgtcggcgcagaagagaagcgcaagttatccataatcggtcccgtttcctaagattcacaaagtcaatggaacgccatgcgttcgcgatggcgttccggggaaaatcagtttgcttcgcgctatatccgccgctgacgacggcgaacagggcgaggtcgttgtgttttctccaccgtggcgacgccggccagataatcggccagggcagcaggagaagggtgggtgaagaggtcaagcaacgtcagggtggaaaattcgtgacgttgtaa

SEQ ID NO: 32750 - DNA, 615 bp, Escherichia coli
ttgcgcgacgtattatcgatcatcgctaacgacattgcctatgtacgggaaacgtatcaggacagcggcctgacttttacgatcgaacagcatgaagatttaaaaagccatgagctggtgtcgctggtcaaagaaagtgagatggaatctctttccttactgtttgattttgcgaacatgatcaatgcaaatgagcatcccatcgacgctttaaaaacgatggcaccgcatattacccaggtccatatcaaagatgccttgatcgttaaagaagagggtggcctgggtcataaagcctgtatttcaggtcagggtgatatgccgttcaaagcgttattaacgcaccttatatgcctgggtgatgatgagccgcaggtgacggcatatggcctggaagaagaggttgattactatgcgccggcgttccgctttgaagacgaagatgataatccgtggatcccttatcgccagatgagtgaaacaccattgccagaaaatcatttactggatgcgcggttacgtaaagaaaaagaagatgcaattaatcagataaatcatgtccgtaacgtactacaacaaatcaaacaagaggcaaaccatcttctgaaccactaa

SEQ ID NO: 32751 - DNA, 510 bp, Escherichia coli
atgaaaaaatggatgttaaccatctgcctgatgtttataaatgagatctgccaggccactgattgctttgatcttgcaggccgggattacaaaatagatcctgatttactgagagcaatatcatggcaagaatcccgttaccgggttaatgccatcggtattaatccggtaacgggatatggcagcggactgatgcaggtagattcccagcattttaacgaactggcccgctacggaattaagccagaacatctgacaacagatccctgcatgaacatttataccggtgcttattatctggcaatagcctttaaaaaatggggcgtctcctgggaggccgttggtgcatacaatgccggattcaggaagaccgaacgccagaaccagagacgtcttgcctacgcatcagaggtttaccggatttatacctggataaagagcagtaaaggcatccgggttccgaccacgaagaaatcactttcccaaattaacagtgtgcagaaaaattaa

SEQ ID NO: 32752 - DNA, 189 bp, Escherichia coli
atgacgattgcagagcgaattcataatgatggatatataaaaggggaacagcgcattcttcgattgtttttgcagaatggggtagatcctgaatggatacaaaagattaccggactttcggcagagcaaatacaggcattagagcagcccttgcctgagcgtgagccttattcatggctcaagagctaa

SEQ ID NO: 32753 - DNA, 456 bp, Escherichia coli
atgaccgggtgtacaaattttgcgttcagcggaaaacctggtaccgggaagaaccacttagcggcagctatcgggaatcgcctgctgaaagacggtcagacagtgattgtggttaccgtggctgatgttatgagtgccctgcacgccagctatgacgacgggcagtcaggcgaaaaatttttgcgggaactgtgcgaagtggatctgctggttcttgatgaaattggcattcagcgcgagacgaaaaacgagcaggtggtactgcaccagattgttgatcgccggacagcgtcgatgcgcagcgtggggatgctgacaaacctgaactatgaggccatgaaaacattgcttggcgagcggattatggatcgcatgaccatgaacggcgggcgatgggtgaatttcaactgggagagctggcgtccgaatgtcgtccagccaggaattgcgaagtaa

SEQ ID NO: 32754 - DNA, 597 bp, Escherichia coli; identical to SEQ ID NO: 8274

SEQ ID NO: 32755 - DNA, 264 bp, Escherichia coli
atgagagttgagcagaataatttcagggacatgttgtccgtttatctctccggcccgccgcagacgcagcatgtgttttgtgtatccccggcggcccgggtcgcgcacgcgggtctggcaggcaaagaagggctgaaagccttcccgctgcaggctttccagcacggtgatggtggggatccaggtatagttctcgcttctggatgtgtgtttttcttccccgaatacgctggggacgacctgcatcagttcttcacgagttaa

SEQ ID NO: 32756 - DNA, 600 bp, Escherichia coli
atgcgtaaattatgtgctgttattctgtccacagtagtctggctggtcgccgctggtacgccagcgagcgcagcagagcatcagtccacactaagcgccgggtatcttcagacccatactgatatgcccggcaacgatgacctgaagggcattaacgtgaaataccgttatgaatttacggacacgctggggctggtgacgtcattcagttatgccaatgccaaagatgagcaaaaaacgcattacagcgatacccgctggcatgaagattcagtgcgtaaccgctggttcagcatgatggcggggccgtctgtacgcgtgaatgaatggttcagtgcttatgcgatggcgggtatggcttacagccgtgtgtcgaccttctccggggattatctccgcgtaactgacaacaaggggaaaacgcacgatgtgctgaccggaagtgatgacggtcgccacagcaacacgtctctggcgtggggggctggcgtgcagtttaacccgaccgaatccgtggccattgatattgcttatgaaggctccggcagtggcgactggcgcactgacggtttcatcgtgggtgtcggttataagttctga

SEQ ID NO: 32757 - DNA, 1605 bp, Escherichia coli
atgaatttccagccttattctgatcaatgggcttttcttgcatcggtgatcccgatgaatgtgcagaatattgaaccgacgatattacgggctacaggaagtatccatcctctggatgtgaactttatcaacgaagaagacctgggtacgccatgggaagggaaaaaatcatcaggaaacagactgaatatttctattgcagaaccgctgaaaatcacgctggcaaaccagatctatttcgaaaaagcgcaattacctcaggtgctgattaaccgacttattcggctggcagcatttccgaaccctgagttttataaggctcaggcaatgcgtatgtcagtctggaataagccccgtgttataggttgtgcggagaattacccgcaacacattgcgttgccccagggatgtctggacagcgtattatctttccttagggacaacaatattgctgcagaattaatcgataaacgatttgtcgggacggaatgtaatgccgtttttatgggaaacctcagagcggagcaggaagaggccgtttcggcattactccgttatgacactggtgtgctttgtgcgccaacggcttttggtaagacagttaccgcagcggcagtgattgccagacggaaagtgaatacactgatactggtacaccggactgaattgctgaagcagtggcaggagcgtctcgaggtgtttctgcaggttggtgacaatattggtattatcgggggaggtaaacataaaccctgtggcaatattgatattgcggtggtgcagtccatatccagacacggagaagttgaacctctggtcaggaattatgggcaaatcattgtggatgagtgccatcatattggcgcggtttcattttctgcgattctgaaggaaacgaatgccagatatctgcttggcctgacggcaacaccaatccgacgggatggtctgcatcccattatttttatgtactgtggtgccattcgccatacagcggtccgcccgaaggaaagcccacataatctggaggtactgacccgttcccgttttacatctggtcatttaccatcggatgcgagaatccaggatattttcagagaaattgctctggatcatgacagaacggtggcgatagctgaagaagccatgaaagctttcgggcagtggcgaaaagttctggtactgactgaacgtacagatcatctggatgagatagcatcagtgatgaattcactgaaattgtccccctttattctccatggacgactatcgaaaaaaaagcgtgcgatgctgatatccgggctgaatgctcttcctcctgattctccccgtattttgttgtcaacaggcagacttattggtgagggatttgaccaccctccgctggatacgctgattcttgccatgcctgtgtcatggaaagggacattacagcagtatgcgggacgtctacacagagagcataccggtaaaagcgatgtcaggatcattgattttgtggataccgcgtatccagtgctgctcagaatgtgggataaacgccagcggggttataaggcgatggggtacaggattgtggctgatggtgaagggctttcattttaa

SEQ ID NO: 32758 - DNA, 1722 bp, Escherichia coli
atgcctgtaacgaagtgtgaaccagaaaccacccgcaaagcaagccgtaaatctgtaaaaacgcaggaaactgcactgtctgccctgctggcgcagacggaggaagtgagcgtgccgctggattcactgattaaatcaccgctgaatgtgcgcacggtgccgtattctgcggagtccgtcagtgaactggctgattccattaagggagtcggcctgctgcagaatctggttgttcatgccctgcccggtgaccgttacggtgtcgccgcaggtggtcgccgactggcagcactcaacatgctggcagagcgtgacatcattcaggctgactggcctgtccgtgtgaaggtcattccgcaggagctggcgactgccgcatcgatgaccgagaacggtcatcgtcgggatatgcaccctgccgaacagattgccggattccgcgcaatggcgcaggaaggcaaaacgccagcacaaatcggtgatttgctgggctattcaccccgccatgtccagcgaatactgaaactggctgaccttgcgcctgtcatcctcgatgcgctggcagaagaccgcatcaccaccgaacactgtcaggcgctggcgctggagaacgacaccgcgcgtcaggtgcaggtgtttgaagccgcctgtcagtcgggatggggcggtaaaccggaagtacagaccattcgtcgtctggtgaccgaaagtgaagtggcggtggcggggaacagtaaattccgcttcgtgggggctgatgccttctcgccagacgaactgcgcaccgatttgttcagcgatgacggggacggttatgtcgaccgcgtggcgctcgatgctgccctgctggaaaaactccaggctgtcgcagagttccttcgggaagccgagggctggggatggtgcgccggacgcatggagcctgtcggtgaatgccgtgaagatgcccgggcataccgcaacctgccggagccggaagcggtgctgacggaggcggaagacgaacgcctgaacgaactgatggcacgttacgacgcgctggaaaaccagtgtgaggaatctgacctgctggcagcagaaatgaagctgattgactgcatggcgaaggtcagggcgtggacgccggagatgcgtgccggaagtggcgtggtggtgtcctggcgttacggtaatgtgtgtatccagcgtggtgtgcagttgcgcagtgaggatgatgtggctgacgacgctgaccgcacggaacaggggctggagagcgcgtcagtggaggaaatcagtctgccgttgctgactaaactgacctcagagcgcacgctggcagtccaggcagcactgatgcagcaaccggacaaatccctggcactgctggcatggacgctctgcctgaatgtgtttgacagcaaagcgcacagtagtcccgccagaattcgcctggcatgtgagcattatgcgctgaccagcgatgcaccgtcggggaaggaaggtgccgcattcatggcgctgatggcagaacactctcgttttgctgccctgctgccggaaggatgggaacgggatatgacgacgttcctgtcactcagccaggaggtgctgttatccctgctcagcttctgtaccgcgtgcagtcttaacggtgtccagacccgcgagtgtggtcacacgtcacgcagtccgcttgactcgctggaaagtggaaagcgccatcggctttcacatgcgtga

SEQ ID NO: 32759 - DNA, 153 bp, Escherichia coli
atgccgcagaaatatagattactttctttaatagtgatttgtttcacgcttttatttttcacctggatgataagagattcactgtgtgaattgcatattaaacaggagagttatgagctggcggcgtttttagcctgcaaattgaaagagtaa

SEQ ID NO: 32760 - DNA, 213 bp, Escherichia coli
atgtccggtaaaatgactggtatcgtaaaatggttcaacgctgacaaaggcttcggcttcatcactcctgacgatggctctaaagacgtgttcgtacacttctctgctatccagaacgatggttacaaatctctggacgaaggtcagaaagtgtccttcaccatcgaaagcggcgctaaaggcccggcagctggcaacgtaaccagcctgtaa

SEQ ID NO: 32761 - DNA, 291 bp, Escherichia coli
atggaatataaagatccaatgcatgagctgttgagcagcctggaacagattgtttttaaagatgaaacgcagaaaattaccctgacgcacagaacaacgtcctgtaccgaaattgagcagttacgaaaagggacagggttaaaaatcgatgatttcgcccgggttttgggcgtatcagtcgccatggtaaaggaatgggaatccagacgcgtgaagccttcaagtgccgaactaaaattgatgcgtttgattcaagccaacccggcattaagtaagcagttgatggaatag

SEQ ID NO: 32762 - DNA, 255 bp, Escherichia coli; identical to SEQ ID NO: 8418

SEQ ID NO: 32763 - DNA, 414 bp, Escherichia coli
atgcagggctacaaccgtgcgcccctttttgatcgtctcaacagttacaaccagatcgcttttttcgttcagttcggcgatggctggcttgattatcatcttattcaagtctttgaattgttgatatttatcttcaacggcaagcatggttcggaaatcatcgatagctatcgttctgtcaccggtgctgcggaactgctggagcagctcgtaaatgcggatgctgtaggtgctggaaaggctggagacgttcttcacgactacccgcgtaaactgccccttgagctgtgtcagatacggcatgatggcatcggagaaggtgatatctactttcgcctcacctttgaaatactgcgcccggtactgcacccagcggaactcttctcgtttttcctcgttcttgatgattactga

SEQ ID NO: 32764 - DNA, 843 bp, Escherichia coli
gtgttttggcacctgtgcaggcgtattgcctttataggtagtgtcggtggtgtattccgcatcggtgtaagtataagaaccgactacgttaacactcgccgacagcgccgctttcgcttcgatttctacgccacgagcgcggatctcgccaccttcaaccgagaagaaggaaccctcagggtccgccatcaggttgttggttttagtgagattatacacggcaccagtaaccacaattggacgatcttccggtacatatttcacgccgacttcatactgcttacctttagacggtgcgaaaatattaccatccttcccaacttgcgaagaaggttcaaacgattcgctatagctgaagtaaggtgttacaccattatcaaacaggtagttaacaccaccacgccaggtaaactgtttgtcatcacgtttatcggtcgttcccgctacgcggttaagagattcttgatctgcccagtcgtaacgaccgcccagggtgaccagcactttatcccactgcgcctgatcctgaacataaacgcccgtttgcttctgcttattcagaatgcggtacggaccggagttatccgggtctttcgcattgaagtcgaaatcggtattcaccggattgtacagatcgagcagcggtacggagtcgtcgtaaccaaaccaggcgttgatgtcattacgcatacgcataaagtcgacaccggtcagcagggtgtggtcgatatcgccagtggcaaacttgctctgcaactgggtatcaacggagaagttttgcagcttctcatcatcaacgacgtatttacgtgccagataatggcctttatccgctggcgctaa

SEQ ID NO: 32765 - DNA, 1158 bp, Escherichia coli
atgcacgttacagccaagccctccagttttcaatgtaatctcaaatgtgattactgtttttatcttgaaaaagagtcgcagtttactcatgaaaaatggatggatgacagcactctgaaagagttcatcaaacaatatatcgcagcgtctggcaatcaggtctattttacctggcaaggcggtgaacccactctggctggcctggattttttccgtaaagttattcactatcaacaacgctatgcaggccaaaaacgtatttttaatgcattacaaacgaatggcattttattgagtaatgaatggtgtgcctttctcaaagaacatgagtttctggttggtatctcgatcgatggaccccaggagctacatgaccgttacagacgcagtaattcaggtaacggtacttttgcaaaagtgatagcagccatcgagcgtctgaaatcatatcaagtagagtttaatacgttaaccgtcattaataacgttaatgtccattaccctcttgaggtttatcattttttaaaatctatcggcagtaaacatatgcaatttatcgaattgctcgaaaccgggacgccgaatattgatttcagtggtcatagtgagaacacattccgtatcattgatttttctgtgcctcctacggcttatggcaagtttatgtcaaccatttttatgcaatgggttaaaaacgatgtgggtgaaattttcatccgtcagtttgaaagctttgtcagccgttttttggggaatgggcataccagttgtattttccaggagtcctgcaaggataatctggttgttgaaagtaatggagacatttacgaatgcgaccattttgtctatccacagtacaaaattggaaacattaataaatctgaactcaaaacgatgaacagtgtacaactgacagcgcaaaaaaaacggatttccgcgaaatgtcagcaatgtgcatataaacctatctgcaatggcggttgtcctaagcatcgtattactaaagtaaacaatgagactgtttcctatttttgtgaaggttataaaatccttttttcaaccatggtgccttatatgaacgccatggtggagttagctaagaacagagtaccgctttaccacatcatgaatgttgcaagacaaatggagaataattaa

SEQ ID NO: 32766 - DNA, 435 bp, Escherichia coli
atgtacggaacatgcgaaacgctatgccgggagctggcagcaaagtatccgggaaacacgccgctgatgctgcttatctggtccccggaagagattcaggccctcgctgacggaatggatatttctctgtccgatcatgaaatcagaaccgtcctggcgcgcctggaggacatcccggaagaccagcggactgaatccggtatttcttccggtgcggcgatggagattatcaataacgtgagagaaaaccgccaggtgaccgtccctgctgaactgctggcgtccctgattcagaccgccgaacaggcactgtggaaacgtgagtgggccgcccgtgataacggcctcgccgtcccggaatgcgtcacccgccgacaggcggtggttaatcaggcccgcgccctgctgaaaaacaacacacgcgaaaacgactga

SEQ ID NO: 32767 - DNA, 1293 bp, Escherichia coli
atgattaaatcaaaaatcgtgctgttatcagcactggtttcctgcgccctgatttcaggctgtaaagaagaaaataaaacccatgtatccatcgaatttatgcattcttcggtggagcaggagcgtcaagccgttatcagtaaattgattgcccgttttgaaaaagaaaactcgggcatcaccgttaaacaagtgccagtggaagaagatgcctataacaccaaagtcataaccctgtcacgtagcggctcgctgccggaagtgatcgaaaccagccatgactacgccaaagttatggacaaagagcagcttatcgatcgcaaagcggttgccacagtcatcagcaacgtgggtgaaggcgcgttttacgatggcgtactgcgtattgtgcgcaccgaagatggtagcgcatggaccggtgttcctgtgagtgcctggattggcggcatctggtatcgcaaagatgtgctggcaaaagcggggctggaggagccgaaaaactggcaacagctactggacgttgcacagaaactgaatgacccggcgaataaaaaatacggcattgcactgccgacggcagaaagcgtactgacggaacaatccttctcccagtttgcgttatccaaccaggccaacgtctttaacgcagaaggcaaaatcacccttgataccccagagatgatgcaggcgctgacctattaccgcgaccttgccgccaacacgatgccgggttctaacgacatcatggaagtgaaagacgcctttatgaacggcaccgcgccgctggcgatttactccacctatatccttccggctgtaattaaagaaggcgatccgaaaaacgtcggtttcgtggtgccaaccgagaaaaactctgcggtctacggcatgttgacctcgctgaccattaccgccgggcaaaagaccgaagagacggaagcagcagaaaaatttgtcacctttatggagcaggcagacaacattgccgactgggtgatgatgtcgccaggcgcggcgctgccggtgaacaaagcggttgtcactaccgccacctggaaagacaacgacgttattaaggcgctgggtgagctgccaaatcagttaatcagcgaactgccaaatattcaggtctttggcgcagtaggggataaaaattttacccgcatgggtgatgtgacgggttctggcgtggtgagctccatggtgcataacgtcaccgtgggtaaagccgatctccctggcacgctgcaagcgagccagaaaaagctggatgaactgatcgaacagcactaa

SEQ ID NO: 32768 - DNA, 1359 bp, Escherichia coli; identical to SEQ ID NO: 31542

SEQ ID NO: 32769 - DNA, 186 bp, Escherichia coli
atgcagccgctggtggggacgctgcatcagctaattgatcaagccaaacgtacgccggtgcggcagtttcgcggcatagtggctccgggcagtggcagtgctgataagaaaaaggcggctccgcgtaaacgtagtgcgaaaaaaagtccgccagcagatgaagccggaagcggggcgatagcgtaa

SEQ ID NO: 32770 - DNA, 756 bp, Escherichia coli
atgagtggatatcaccatccggctgctgatttgcataaaggggaatatggttgtgtcggacagggattgcatatagctaaaaagttactgccatacatacctgagcaagcagggatattactggttccttgttgcagaggaggtgccgcctttactgttggagctgaaggtatgtatgtacctgatacaggggcaacagctgatgcaatgcggtggggcaccggaacagcactctatgaggacttagtagcccgggttaaggtagctctggaatataacagaaagaataaactgctatctgtctgctggatgcagggggagtttgatcttatgtcaccagattatgaaaagcatcctgacttgttttatcagatggtaacttctttcaggtctgagttatctgaatactcatctcagtgtgttggtaattcgtcagaaagagttccatggttgtgtggtgatacaacctggtactggaaggaatcttatcaaaaagaatatgattttatatatggacattacagacaacggactgatgatgaaatacattttctcagctttcaggatagtaaccgacatgaattaactaatgagccagaagaagatgccgatgatttatctgtcgggtatctggggtcatcatggaggacagaattaagctggacaacgtcacagagaagtacacattttaattcaatggccagaaggggagttattgctgaatgttatgcgcaaaaaataagaaattatttgtag

SEQ ID NO: 32771 - DNA, 213 bp, Escherichia coli
atgtatcatcatgattttaatgaaaaaataggtttctggtatgtgatagccctcgcaggacagtctaatggtatggcctacggtgaaggtattcccctgccagatacactcgacaaacccgagtcccgtgtaaaacaactggctcgtcgaaaaacaatcacaccaggaggaaaagagtgtaaattcaatgagattattccggcagatcactga

SEQ ID NO: 32772 - DNA, 1209 bp, Escherichia coli; identical to SEQ ID NO: 9963

SEQ ID NO: 32773 - DNA, 177 bp, Escherichia coli
atggtgataagcaccgcgcccggattgacttccacgttacgatcgatggaaaccgggttcccggcggggtccgttgcgctggcattaaccactatcgtacccggcgtcagcgcctgtaaatctgccgcaggcacgcctatctgccagttgccgttgctgtcggtcaccccctggtag

SEQ ID NO: 32774 - DNA, 216 bp, Escherichia coli
atggagtataatattgaggttgtccctgcgatacatagcaatttaaaattactttttatagaatgttatcctattaaagaggagtttttaatgccgtggactttgacagacattacctatgaaatatcgcagcgaaaatatattgttacgaattccgctgattatgataaatattctgacatagtcaaaaggggcgtaatagatggtaagaattaa

SEQ ID NO: 32775 - DNA, 762 bp, Escherichia coli
  misc_feature (732)..(741): n is a, c, g, or t
ttgatagagaaacagcatcaacaggcgcaggttatttgtgtcgataatgtgctggcattgctgcaaagggtgccgggcattgcgtcattgaatattattgatacgcaactggttgagaatattaccgggcatttattacgttgccttgccgcgccggtgtggataggtgagcaccgccaaagcagcatgaataacctgaaagccgcctggcctgcggcctttgatatgagtctgcactttattacgctactgcgtgaacaactcgatattccccttttcgacagcgatctgatcggtttgtattttgcctgtgcgctggaacggcatcaaaacgaacgccagccgatcattttgctctcggaccagaacgcgattgccaccattaatcagctcgccattgagcgcgatgttttacattgtcgggtgattattgcccgtagcttaagcgaacttgttgccattcgcgaagagattgagccgttattgatcattaataacagccattatttactggatgatgcggtcaataattgcatcatcgtaaaaaatatcattacggctgccggtatcgaacaaataaaacattttctggcgacggcatttattcgccagcaaccggagcgttttttttctgcccccggaagttttcattattcgaatgtacgtggtgaaagctggcaacatattacccggcaaatttgtgcgcaattagtcgcacaacaccatattacnnnnnnnnnnacaccacattaccgccgatga

SEQ ID NO: 32776 - DNA, 366 bp, Escherichia coli
atgaaacgcaaggtcaatctgcgcctgagcaaaacatgtctggtattccagttcccgtcgttctgcctcacgttcccgctggcggctgtatttctgctctgtcagcgtggttttctgacgacgacgctcaccttcacgaaaaggcacggacgggaacagacggtgccccgcatcggatggcaggggaagaacacagacttccccaaaactttcaatcagtttatccacggcagccagccacaggagacggttgccatgaaattcctccttcgtcagcgcaggggcaaaaaagcggagatcggtcagcgaaatccggcgactgccattcaggcagcgaaagaaagcggtggcataaggccatgctga

SEQ ID NO: 32777 - DNA, 327 bp, Escherichia coli
  misc_feature (197)..(206): n is a, c, g, or t
atgatgccgtccgcctccccaaaacaacgcgtactgattgtgggcgccaaatttggcgaaatgtacctgaatgcctttatgcagcccccggaggggctggaactggtcggcctgctggcgcagggaagcgcccgttcaagagagctggctcatgcgtttggcattccgctgtatacctcgccggaacagataaccannnnnnnnnncggatatcgcctgtattgtcgtgcgttcgaccgtcgccggaggaaccggtacgcagcttgccagacactttctgacgcgcggcgtacacgtcattcaggagcatcccctccacccggatga

SEQ ID NO: 32778 - DNA, 435 bp, Escherichia coli
atgctgaaggaaatcggctacctgttctgcggagatctctggcgagatggcgcaacagggcaacgttcccgcaagcgtgtgccacgcctgcggcagtaccgggttccgatgatcggtaacgcaaaaagcctcgccctgaggaacaacgtatgccgccagcgttttttctttttcgccgatcgccagaacggttgcttgtttcacccccaccagctggctgagcgcgctttcgatttcgcccagctcgatgcgatatcctccgactttgacctgcttgtcgcgacgaccgaggaactcgattgtgccatctggccagtagcagccgagatcgccggtgcgataccagcgctcgtccgggagcgtcaaaaattgctgctcgctacgcaggggatcgttgaaatagccttccgcgaccccaatgccgccaatccataa

SEQ ID NO: 32779 - DNA, 1101 bp, Escherichia coli
gtgggtggcttcaaacagggcgcattcgtcaccgatgtttgcgcctggggcgataccgataccgccgacctgtgcagccagagcgtcagaaatgtagtcaccgttcaggttcatacaggcgataacatcatattcagccggacgcagcaggatctgttgcaggaatgcatcagcaatcacatctttaatgacgatctctttgccggtattcgggtttttaactttcagccacgggccgccgtcgatcagttcaccgccaaactcttcacgcgccagctggtagccccagtctttaaacgcgccttcggtgaacttcatgatgttgcctttgtgcaccagggtcacagagtcacgatcgttagcaattgcgtattcgatcgctgcacgaaccagacgtttggtaccttcttcagaacacggcttaataccgatgccgcaatgttccgggaagcgaattttcttcacgcccatctcttcacgcaggaatttaatcactttctcagcgtcggcagagtctgctttccattcgatacccgcataaatgtcttccgagttttcacggaagataaccatatcggtcagttcagggtgtttaaccgggcttggggtgccctgatagtaacgtaccggacgcaggcagatgtagagatccagttcctggcgcagggcaacgttcagagaacgaataccgccaccaaccggagtggtcagagggcctttaatggcaacgcgatattcacgaatcagatcaagggtttcagcaggcagccagacatcctgaccgtaaacctgtgtggatttttcaccggtgtaaatttccatccaggagattttacgctcgcctttataggctttctcgactgcagcgtcgaccactttcagcatggctggggttacatctacaccgattccatcaccttcaatgtaagggataatcggattttcaggaacgttgagtttgccgttttgcagggtgatcttcttgccttgtgccggaacaactactttactttccattcacctctccttcgagcgctactggtttgctcgtctgccaccacgttgcatatgcgtttgcgtcctgcgatacggatgcattag

SEQ ID NO: 32780 - DNA, 435 bp, Escherichia coli; identical to SEQ ID NO: 19248

SEQ ID NO: 32781 - DNA, 711 bp, Escherichia coli
atggcggagaatcaatccaccgtagaaaatgcaaaagagaaactggatcggtggttgaaagatggcatcaccacgccgggtggaaaactcccttcagaaagagagctgggagaactgctgggcattaaacgtatgacgctgcgccaggcgttgttgaacctcgaggcagaatccaaaatcttccgtaaggatcgtaaggggtggttcgtgacccagccgcgatttaattacagtccggagctgtcagcgagctttcagcgggccgcaattgagcaaggacgagagccttcctgggggtttaccgagaaaaaccgtaccagcgatattcccgagacgctcgcgccactgattgcagtgacaccatcaactgaactctatcgcatcaccggctggggggcgctggaaggacataaagttttctatcacgaaacatatattaatcctgaagttgctccgggttttattgaacaacttgaaaaccactcattttctgcagtctgggaaaagtgctaccaaaaagagacggtagtaaaaaaattgattttcaaacccgtcagaatgccgggcgatatcagcaagtatcttggcggttctgtgggtatgccagcgatcttaattgaaaagcatcgcgccgaccagcaaggcaatattgtccagatagatattgaatattggcgatttgaggccgtagacctcatcattaatctgtag

SEQ ID NO: 32782 - DNA, 294 bp, Escherichia coli; identical to SEQ ID NO: 8158

SEQ ID NO: 32783 - DNA, 798 bp, Escherichia coli
gtgggtaaaaccgaaaccgtcctgcaactggcagagctgctctacggcggtcgccagtacctgaccaccatcaatatgtccgagttccaggagaagcacaccgtctcgcggctgattggttcccctccgggctatgtcggctatggcgaaggcggcgtgctgactgaggccatccgccagaaaccctactcggtggtacttctcgatgaagtggaaaaagcgcacccggatgtgctcaacctgttctaccaggcgtttgacaagggcgagatggcggacggcgagggccgcctgattgactgtaaaaacatcgtcttcttcctcacctccaacctcggctatcaggtgattgtcgaacacgccgatgacccggaaaccatgcaggaagccctgtatccggtgctggcagacttctttaaacccgccctgctggcgcgtatggaagtggtgccatacctgccgctgtcgaaagagacgctcgctaccattattgccgggaaactggcccgcctggataacgtgctgcgcagccgctttggtgcggacgtgattattgaaccggaagtgacggacgaaatcatgagccgcgtcacccgcgcggaaaacggcgcgaggatgctcgaatcggtcattgacggcgacatgctgccgccgctctcgctgctgctgttgcagaaaatggcggctaacacggcgattgcccggattcgcctgtcggtggcagacggtgcattcacagcagacgtggaagatgttctgaacgacgagtccgtcacagaggatgaaacggttttatga

SEQ ID NO: 32784 - DNA, 966 bp, Escherichia coli
  misc_feature (582)..(591): n is a, c, g, or t
atgtatcccattgctctgctaagtgtatgtggcatgatgctagggctaggaagtggtttagccagtgatgatatggcaaagttaattccatttctggctattccaataattaaaaccatacttgatttcattgttagccttggtttgtttgcctttgttaatttacctgtattgtttgcgatagcaattcccttaggattattaaaagagaaagaggataaagcctatggcgctttttctggcttaattggttttatggcgatgcatctgggaacgaacttttatcttaaacagcacgacttattggtcgctgctgaccaaatgtcgacacatgggcaaaccatcattctggggatccagtcctacaataccagcgtgttagggggaattgttgctgggttattagtcgccagcatgtataaaaagatcgttaatttacgcattccagaatcattaggtttttatagcggcccacgtctggtgcctatcattacactgattgtgatgagtggatttggtctgatcattccttttatctggccgccgtttttcaatctcttcatgctcattggccactggatnnnnnnnnnnctggatatcaacttccggtcctgttggttatttcttctatgcagttgccgaacgtgtgacgattccttttggcttaaaccatctggtgacgtcagtgttccgctttacgccaatcggcggttcggctgtgattggcggcgaagagtattacggcaccctgaacatgtttatggcgtacgtcaaagagaatgcggtcattccgctggatttggcggggaaaatggagcagggcaaactgatgattcagtacggtctggctggtgctgcactggccatgtatcgcactgctcatgctcaaaacagaaaggctatcaaagcattgcttatttccggtgtgcttacggttattattggtggcgtcagcgaaccgattga

SEQ ID NO: 32785 - DNA, 534 bp, Escherichia coli; identical to SEQ ID NO: 5124

SEQ ID NO: 32786 - DNA, 309 bp, Escherichia coli
atgcaggctggcaatcgccaggtcttggcctttgatggtgtcgcccagccatttcggcaggtcggtgatgaccgacatttcattctgcgacaggcggttgagcggcacgccggtccattcggcaatcaccgccgcaatctgttttttatcgacgtgcggggagaccagcaaccggtcgttatgcagggcgtccagttcggcagtgagctgggccagccgctgtaccggggaaactgtttcagcggtctcttccggctgttctctgtcggcctcatcagccggtacggcaccggtattatcctgttctga

SEQ ID NO: 32787 - DNA, 252 bp, Escherichia coli; identical to SEQ ID NO: 5211

SEQ ID NO: 32788 - DNA, 252 bp, Escherichia coli; identical to SEQ ID NO: 5211

SEQ ID NO: 32789 - DNA, 786 bp, Escherichia coli
atggtcagctataatgtgactaatgtgtgggggctaatcgtttttttcctttgtagctttgcagtattagcattttttagctttggtaaaagtaaccttatgaggcttattgcacattatttcaattttggatattcagacaaaaaattaaaaagacttgaccgcgagtggcgcgacattcaactatttaaaataattaacggaatcaatgtatcaggcattgaaaatgtgagaatgatacagcagggactgattgatggaaaactaaaaacatcgtattttttccttactcgcatctggggtgacataacaaaaccaccacacgtaattaaaacaataattgtaattctggccagtattttttacattctcctcgcatgttacatacacaacgaacaatccgttatagtaagggatgccataggcataccatataaaaacatgatgtactatgtttatagtgacaaagttcttttatccttcaaaaataaagcggttgaatttaataaaacttatagccttgccgattgcaagagactgcaaaacgtatttataaaagacacacttcctgagatcgcctgcaataagctcttacagttaaacgaggaggactccgaatggttaagccaggagattaaagacaataacagtcacaaaaaagcattattaatactatccctcgtctatttcacttcaggtctggttatattcctgtcatatacaaaattcttttacgccaataagaaggttttagaatacaaagcatcaaataaaaatcactcataa

SEQ ID NO: 32790 - DNA, 327 bp, Escherichia coli
atggcctgcaccatcggcaccgatataggtaacgcatggctcaccgtcttcagccactgcggcgattttggtcaggatcggtgcaaccagttcataggcttctttctgcccaccaggcataatggaaggacctttcagcgcgccttcttcaccaccggaaacaccggtaccaatgaagttaaagccttcggcagaaagctcacggttacgacgaatggtgtcctggaagaaggtattaccaccatcaatgatgatgtcacctttatcgaggtatggtttgagggaatcaatagcagcatccgtgccagcacctgctttcaccattaa

SEQ ID NO: 32791 - DNA, 897 bp, Escherichia coli
atgtattcaattgctaaggcaatagagttattaacattgaatggagataacattctcatttttacgcctgtttataacgcattttttgatgtaattaaacaaagtggtcgaaatatgctaacaacctctttgaataaagaaaatgagagaggctacgctatcaactggcaagattttgagctaaaaattaaaagcgcgaagatggtgttattgtgtaatcctcataacccgacaggaaccgtctggtcggaagaagatctcttcaaaatcgctgcaagctgcgcaaaacaaaaaatctggctatgttcagatgaaattcacagtgattttgtttttaaccatggtttcacgtccgcgttaaaaataaaaaatgacaaagtagtggtgttaaattcgatttcgaaaacatttaatgttcctgcactaacaggatcatatatgatatccgctgaccaggattttaatgataagtttagaacgatatcaagatatcgcgattttgtaaactcaccatctatattgaatgtgattgctaccattgttgcttataacgaatgtgaagaatggttaaagtcgttaaaggatcatattgcctctaacattcaatttacccagcagtatttgaatgaaaatattccagaattgatcgtgaggtccgctgagggttgctatttttcgtggatagattgctcggccattggctatccctttgataaattttaccgacgattaattgatgaagggaaagtgggtattatggcggggtatgtttatggtacggaaggtgagggctatctgcgtctgaatctggcctgcggtcgagaaaaattatatatggggcttgtgcgccttgcgagtgtaattaaaaatattaatcaggaaaaagaaaatgaataa

SEQ ID NO: 32792 - DNA, 426 bp, Escherichia coli
atgcaatatgcgaaacctgtcactctgaacgttgaagagtgcgaccgtctctcctttctgccttacctgtttggcaacgattttctgtatgccgaggcgtatgtgtacgcgctggcgcaaaaaatgatgccggaatatcagggaggcttctggcacttcatccgcctgccggacggtggcggttacatgatgccggatggcgaccgttttcatctggtcaacggtgaaaactggtttgaccgcacggtcagcgccgatgccgcaggcatcattctgacttcccttgtgattaaccgccagttgtggctgtaccacgacagcggggatgtaggactgacccagctttaccggatgcgcgatgcgcagttgtggcgtcacatcgaatttcaccccgaatgcaacgcgatttacgcggcactggactga

SEQ ID NO: 32793 - DNA, 669 bp, Escherichia coli
atggggtatcaggtgatcgacagcgccagcgtgattgccacccatgtgaacaagattgtccgcagctatattcctgatttgtttaactatgacgatattactcagctgcataaccgtttgtcgtcgatggcaccgcgactggcggaagatttgagcgcggcgctcaattacagccagttgctgaaagtgtaccgcgcgctgctgaccgaaggcgtttccctgcgcgatatcgtcactatcgccaccgtgctggtcgccagtagcacagtgaccaaagatcatatcctgctggcggccgatgtgcgcctggcattgcggcgcagcattacccatccgttcgttcgcaagcaggagctggcggtgtatacgctgaataatgaactggaaaatctgctgaccaacgtggtgaatcaggcgcaacagggcgggaaagtgatgctcgacagcgtgccggtcgatccgaatatgctcaaccagttccagagtacgatgccgcaggtaaaagagcagatgaaagcggcggggaaagacccggtgctgctggtgccgccgcagttgcgtcctttgctggcgcgttatgcaaggttgtttgcgccggggttgcatgtgctgtcgtataacgaagtgccggacgagctggagttgaagattatgggggcgttgagttga

SEQ ID NO: 32794 - DNA, 342 bp, Escherichia coli
atgcgaatatttgtctacggcagtttacgccacaaacaaggcaacagtcactggatgaccaatgcccagttactgggcgatttcagtatcgataactaccagttgtatagcctgggccactatccaggcgcagttccggggaacggaacagtacacggtgaagtttatcgtattgacaacgccacgctggccgaacttgatgccttgcgcaccaggggcggtgaatacgcgcgccagttgattcagacgccgtacgggagtgcatggatgtacgtttatcaacgacccgtcgatggattaaagctaattgaaagcggcgactggttagacagggataagtaa

SEQ ID NO: 32795 - DNA, 669 bp, Escherichia coli
gtgcgcattgacgcctttggcctgaaagcgcggctgacgggcgatcttaacgtcgtacaggacaaacaagggctgggcctgaacgggcagatcaacatccctgaagggcgcttccatgcctatggtcaggatctgattgtgcgtaagggtgagttactgttctctggtccgccagatcaaccgtatcttaatattgaagctattcgtaacccggatgctacagaagacgacgtaatcgccggagttcgcgtcactggtctggcggacgaaccgaaagcggagatcttctctgacccggcgatgtcgcaacaagctgcattgtcttatttgctacgtggacaagggctggagagcgatcagagcgacagtgcggcaatgacctcgatgctgattggtctgggggttgcgcaaagtggccagattgtgggtaaaatcggcgagacgtttggcgtaagcaatttagcgctcgacacccagggagtaggcgactcctcccaggtagtggtcagcggctatgtattgccaggtctgcaagtgaaatacggcgtgggtatatttgactctatagcaacactcacgttacgttatcgcctgatgcctaagctatatctggaagccgtgtctggtgtagaccaggcactggatttgctctatcagttcgagttttag

SEQ ID NO: 32796 - DNA, 588 bp, Escherichia coli
atgatcgtagatgttgaagagaaaacagttaatgatttctttaaaagcaacacactctcacctttttctgtaagaaggttttatccggcatacttgatggtggaatgtgaagatttttcattgttaaagaacttgattgcatgcttgaattgtgatggcagaactgtggattttgttagaaatcaaatatcacttgcatgtcttgctatcttatcttcagagaaaatagtgcaaagttttttatttggatgtcttaatagtttaggaagtaaagttaaggctattattcacacggatatatctgcagcatggagactttgtgatatatcttcaagactgtatctgagtgaaagtctgttaaaaagaaaattaaagcacgaaggcttatcatttagtaagttaattcttgaagagcgaatggtgatggcggaaaggttattaagctacaatttatattctgttggaaaagttgctgagatatgcggttatgaaaacacgtcatattttgtaagtgttttcagaagatattttggtgttcctccccatcaatattcatcaagactttttttagaaaaagacatgatgtaa

SEQ ID NO: 32797 - DNA, 267 bp, Escherichia coli
atggccgttggtcgctatgtgctttctgcggatatttggccggaacttgaacgcactcaacctggtgcatgggggcgtattcagctgactgatgccattgctgaactggcgaaaaaacagtccgttgatgcaatgctgatgaccggtgacagttacgattgtggcaagaaaatgggctatatgcaggcgtttgtgaagtatggactgcgcaacctgaaagaaggggcgaagttccgtaaaggtattgaaaagctgttaagcgaataa

SEQ ID NO: 32798 - DNA, 690 bp, Escherichia coli; identical to SEQ ID NO: 15495

SEQ ID NO: 32799 - DNA, 390 bp, Escherichia coli
atgcgcttccccattggcctgagtgatggcaataccgttattttcgagggtaaagtttgccgcaacgtcctgtggcatggtgaagttcaccgttattcccgccaccggatgattcgacggatctttcaccgttgccgtcagctgcacgctgtcgctgttattcgtcaccacctgttgagcagggatgttcagggtgacctgcgcgttgctggtatcgggcgcaatattgactgtcttcgtatctctattgccgttaagcagtatggcttcggctgtatgaacacccaaaaccgtgcccttaagggtaacttcagcaataccgttctcattagtattacgcgtgttcagactcagttgcgtgtctgcgggggaggtgcggaagactactga

SEQ ID NO: 32800 - DNA, 594 bp, Escherichia coli
atgacagcgatatcacaatcatcttgtccggggcttgcagagtatgacagccgtgcgcaaaggacgatgtggacttgttatgaaatacgaatggaagtctggaaggaagactccagcgttcatggctgcccgtggctggtatcgacacatgcagatagcattgatcttattgatcctgctccgggaacctattccggacgcacagtcagtaactcttcttgtccacctataccgttagggccttatgatgtctcctggaatgaaagtcgggttgtgcatgataagacgttagcgctccagtctaccggcgggataattgaaaaaacgctctccacctacctgatgaaagacggcaaactgtgtgacggcagcaaatttggtgatactgacgatcgtggtgcttattgtcgttgggtgtcgcagatgctcaccttcacctcatcgggctgtgacaatgccaaagtgacggtaacaccaaatcgtcaccccattaccgacaaagagcttcatgatatggtgcttcgcgtggataccacctcgcggcaacctattgattctacctgtcgattccagtacgtactgaatatgctgtag

SEQ ID NO: 32801 - DNA, 522 bp, Escherichia coli
atggcagcacttactgcaagctgtattgacctgaatattcagggcaatggcacttattccgttctgaagcagttggcgacaatggcgttacaaaacggttttatcaccgactcacatcaattcctgcaaaccctgctgctgcgcgaaaaaatgcactccacgggatttggttccggtgtcgccgtgccgcacggtaaaagcgcctgcgttaaacaaccgttcgtgttattcgcccgcaaagcgcaggccattgactggaaagccagcgatggcgaagacgtcaattgctggatctgcctcggtgtgccgcaaagtggcgaagaggatcaggtcaaaatcatcggcacgctacgccgaccaggtgcttgctttgttaaatcaaaccctcagctcataaggacgtggcgatggagtcatccttacgtattgtcgcgatcaccaactgccccgccgggatcgctcacacctacatggtggcggaagccctggaacagaaagcccgttctctcggccataccataa

SEQ ID NO: 32802 - DNA, 651 bp, Escherichia coli
atgggctggcagaacaaaatatgttcgggtgaccccgctaatattcacatgtcgcgaacctttctcgctcgtatgcggttatacgttaagattcgcgaaatgccgccgcatgattatcaaagtacgcttagcgactacatcgtcgtgcaatttgatggtgccggtagcgttaacgaagaccctaccgcccaaaacctgaaataccatattactggtctggaaaacattcgtgtactggattgcagcgtcaatttttctatttcaccagaaacacaggtgattgattttggtaaatttaacctgctggatattcgccgccacacaatgtcgaaaacattcagtattaagacgacaaaatcacaaaatgaccagtgcaccgacggatttaaggtcagctcttcgttttataccgaagaaacattgattgaagaggataaagcactgctgattggtaatggactgaagctacgtttgctggatgaaaattcttcaccctatactttcaacaaatacagcgaatatgctgatttcaccagcgatatgttgatctacgaaaaaacctatacggctgaactttcgtccattcccggcacccccatcgaagcgggtcccttcgatacagtggtgctttttaagattaactataactaa

SEQ ID NO: 32803 - DNA, 486 bp, Escherichia coli
gtgattgataatattgaaatgattaatagcgccgggatgttaatcggttatggggtaattaaaggcaaatatctctcgataccgcaaaatttccgagtgaataatattcagctggataacacccaccttgcttacaaattgcgcggtatccaaatctctgccgggaatgctgtctcctttgtggcactgactaacattgagatgaagcgtgcctcgttggagttacacaacaaaccgcaacatctttttatacgaaatatcaaagtgatgcaggaatcctctgttgcacccgcattgagcatgaacttcgacatgcgcaaagacgttcgcggcgtctttatggcgaaaaaagaaacactgctgtctcttgcaaatgttcatgcggtgaatgaaagagggcaaagctccgtcgatatcgacagggttaatcaccatattgttaatgtggaaaagattaactttagattgccagaacggagagagtag

SEQ ID NO: 32804 - DNA, 480 bp, Escherichia coli
atgtgcctggacagacttctgcgccagactttgcatttgtttatcgtattgagccctttctttttgctgttgtgctgccacatcggttgtcagtgcattcattttctgcccttgttccgtggtagtgcgctgattagcctcattttgagccgccagcctggcattaatcatctcctgataatgcgcggtattttgcgtatctccagtcgcggcgagcgttttttgtgtggctacgatctgcgcctgttgctctgtaatttgcgtttgctgggcatcagttaccgcagactgtcgggcgttgatcatgctctgataacgggcggttgtctgtacatcacctgtagcggcaacggttttttgtcctgcgtcaggatctgtctggacagggggagtctgagtggtatcaggtgtttcagaagggatgtagtgatgttcagtcaaataggtatacgcagcggggctgttgtctgtgcgttctaa

SEQ ID NO: 32805 - DNA, 741 bp, Escherichia coli
gtgtcgttaatcagcagaataaatgaactcaaactgtgggtcgataagtgtattgatgactgctctcaagagcaattaggcgatcgtgattatatcgctttatatgtagacagggcgatttttcattatgcgattagttttgtctgtaataaagtagaacatcagacagtaagtctcatagacagatgtacttttgatgtagcaagcccgaatggactcccatcaactattcaactattttatgaaaaatctattgatgatgaatctatagcttcgttacatctacaaactttaggtgatggttttataaatttagaaaatgcatatcatcaatatgacgatattcgcttaaaacccttggcttcccttttaatttcatgttcatatggtagtgcattagcagatctggtagctgcagtggatattgatgagtattgcgaaaaatacataacagatcaggtgaaaacgttatctcaacaagagatgaaaaaaaatctgaaggagatgaaaaatctggcagtcgcagggaaactggatttcaatgacattgtaactgatatgaaacgtcaggaagacgaaggaaaacgagtcctaaaagacgttacaaaaatgcatggtgcggcgcagaaattaaatgacttcgtacaatcgtgtgacccagattcaacggaattgattcaaattccaaacgatatctctaattcaatttatgatctatttggtattgaactagtaaaataa

SEQ ID NO: 32806 - DNA, 252 bp, Escherichia coli; identical to SEQ ID NO: 5211

SEQ ID NO: 32807 - DNA, 267 bp, Escherichia coli
atggccgttggtcgctatgtgctttctgccgatatttggccggaacttgaacgcacgcaacctggtgcatgggggcgtattcagctgactgatgctattgccgaactggcgaaaaaacagtccgttgatgccatgctgatgaccggcgacagctacgactgcggtaaaaaaatgggctatatgcaggcgtttgtgaagtatggactgcgcaacctgaaggaagggccaaagttccgtaagagcattgagaagttgctcggggaatag

SEQ ID NO: 32808 - DNA, 357 bp, Escherichia coli
gtgctcatttgtcagcacgacgccagcgccgggtcagacgatattcccgcccttgcctggcagcaggccattgaggcggagccgatcgccaacccggtagtacgcgcccccacgcaaccggcctacattatctacacctccggctctaccggtacgccgaaaggggtagtcatttctcaccggggagcgcttaacacctgttgcgatatcaatacccgctatcaggttggcccgcatgacagggtgctggccctctccgccctacattttgatttatcggtttacgacatttttggcgtactgcgcgctggtgatggtgatggaaaatcaacggcgcgatcctcacgcatggtgtga

SEQ ID NO: 32809 - DNA, 441 bp, Escherichia coli
atgagcactaccgtttttaccctgatactgaacagcaaaatcaagaccgtcaaccagaccgaagaagtcggtgttacggtaggtcgcgaaaccgttaccacgctgctgcatgaagttatcagaatcgtaggtatcaccaccgaattctggcagtacgtcggtccaggaagtaacatcgtaaacaacgccgtagttacgaccatagtcaaaagaaccaacgtcctggaatttcagaccagcgaatgccacacgggtccaggaactattgtcactttcaggttcgttaccttgaatctgatattcccactgaccataaccggtcagttgatcagtaacctgagtttcacctttgaagccaagacgcatgtaggtcttatcgccatctttagagtcgttatcggagaaatagtgcaggccgtcaactttaccgtacagatctaa

SEQ ID NO: 32810 - DNA, 558 bp, Escherichia coli
atgcgtaacgaacataaggccgttgaagaggttattgattccccactttctgaagtcgctaatttaattaaagtattacaatcttgtcagggtaaagttgtttttattggtgttggtaagtccggtattattgccagaaaactcgcagcaacatttgccagtaccggaactccctcgttttttgttcacggtacggaagcggtacacggcgaccttggaatggtggcgaaagacgatgttgttattcttatttcaaacagtggtgagacggcggaaatcctggcgacactgcctagtctgaaaagaatgggtaattatttgatctcttttacccgcagtcatcactcatcgcttgcgataagttgtgatttatctgttgaaatccccgtcaaaagtgaggcggataatttaggtttagcaccgtcatgctcgtctactgttgttctggttgttggtgatgcggtggcgcttgcactctccgaattgaaaaaatttactcgtgccgatttcggcttatatcatccaggaggtgcactcggcattaaagcaaattcataa

SEQ ID NO: 32811 - DNA, 225 bp, Escherichia coli
atgacgattgcagagcgaattcataatgatggatggctgttgggaagggagagggggaggaaagaagggaaagtagaaggggaacggagcctcctccgattgttgttgcagaatggggcagatcctgaatggatacaacgatataccggactctcggcagagcaaatgcaggcattagagcagcccttgcctgaaagcaagcgcgatccttggatcgagtactaa

SEQ ID NO: 32812 - DNA, 255 bp, Escherichia coli
atgaagtctatcgacggcatcaagattattcaggtcgatggtctgaatcgtggcagcgctgcgggtgatgcaaacacgggtaatgtagggggcggaaacctggcggaacaagcgttatcagccgcactctcttaccgcacacaggcaccgctgattgactccttactcaatgaaattggcgtttcaggcggctcgctggcggcattgacttcccccttaaccttaacaactcccgtcgcagaaaacgtagaataa

SEQ ID NO: 32813 - DNA, 528 bp, Escherichia coli
atgtacgcgatggggatcgccgcggcgacagcaatcgaccttggtggcccaatcaacaaagcagctggtttcgttgccttcagctttaccacggaccacgtattaccggtcaccgcacgttccatcgctattgttattccgccgattggtctgggtctggcgaccattattgaccgtcgtttaaccggcaaacgcctgttcaacgctcagctttatccgcagggtaaaaccgccatgttcctggcctttatggggatcagtgaaggtgcgattccgtttgcactggaaagccccatcaccgccattccgtcctatatggtcggcgcgattgtcggctcaaccgctgcagtctggctgggcgcagtgcaatggttcccggaatccgctatctgggcatggccactggtcactaacctgggcgtctatatggcggggatcgcgctgggagcagtcattactgcgctgatggtggtgttcctgcgtctgatgatgttccgcaaaggcaaattgttaatcgatagcctgtaa

SEQ ID NO: 32814 - DNA, 399 bp, Escherichia coli
gtgctgaccgattctgaacaggtcgggcagtggggcgcgccgacactggacgtctgggtggtgcgcaaagattttgccgagaaacatccagaggtcgtgaaagcgttcgctaaaagcgccatcgatgctcaacaaccgtacattgctaatccagacgcgtggctgaaacagccggaaaacatcagcaaactggcacgtttaagcggcgtacctgaaggtgacgttccggggctggtgaaggggaatacctatctgacgccgcagcagcaaacggcagaactgaccggaccggtgaacaaagcgatcatcgacaccgcgcagtttttgaaagagcagggcaaagtcccggctgtagcgaatgattacagccagtacgtgacctcgcgcttcgtgcaataa

SEQ ID NO: 32815 - DNA, 285 bp, Escherichia coli
gtgtcggtccactacggctatgacgataaaggccgcctgacgggcgaacggcagacggtggagaacccggagacgggggagatgctgtgggagcatgagacgaagcacgcgtacagcgaacaggggctggcgacccgtcaggagccggacggtctgccgccggtggagtggctgacgtatggcagcggttatcttgcgggaatgaagctgggtggtacgccactggtcgagtacacgcgggaccggctgcaccgtgaggcggccagctccggagcaggcacctga

SEQ ID NO: 32816 - DNA, 210 bp, Escherichia coli
atgcagatgttgggtggtcgtcagggtggcggcgctccggcaggtggtaatatcggtggtggtcagccacagggcggttggggtcagcctcagcagccgcagggtggcaatcagttcagcggtggcgcgcagtctcgcccgcagcagtccgctccggcagcgccgtctaacgagccgccgatggactttgatgacgacattccgttctaa

SEQ ID NO: 32817 - DNA, 480 bp, Escherichia coli
atgttaaccggcgtacgaacacaagaactgcgttttgcacgctgggaagatatcgattttgagacaaaattgtgggagatcccggcagaagtaatgaagatgaagcgacctcatattgtgccgctctctgagcaggtcattatgctatttaagcagcttgaaccaatctcaaaacatcatcccctagtctttatcggtagaaatgatccccgcaaaccaattagtaaggaaagcattaaccaagtaattgaattacttggatataagggaagactcacagggcatggtttcagacacaccatgagtacaattctgcatgaacaaggctttaattccgcctggattgaaatgcagttagctcatgtggataaaaattccatcaggggtacctataatcatgccctgtatctcgatggccgccgtgaaatgatgcaatggtacgctgattacattgattcactctccagccgggaaagttaa

SEQ ID NO: 32818 - DNA, 216 bp, Escherichia coli
atggaactgcattgtccacaatgtcagcatgtgcttgatcaggataacggccatgcgcgttgcccatcctgcggggaatttattgaaatgaaagctctttgtccagactgccatcaaccgttgcaggtgttaaaagcctgcggtgcggtagattacttctgtcagcacgggcatggcttgatatcgaaaaaacgcgttgaattcgtgctggcttaa

SEQ ID NO: 32819 - DNA, 201 bp, Escherichia coli
atgttcgccgcatcagagataaagtcctgtactctgactgggataaagagcaacttcaggacgcaaactcaagctggatggccgaagactcatttcccgagaacattatgcgagtacaacgaaatggtcgatgaaatatttcagtcaattgtaatcgcggggcgggtttgtgatgagcgcggatatgtcacgaagtcgtga

SEQ ID NO: 32820 - DNA, 222 bp, Escherichia coli
atgcacgatctttgcgctattgcctggctggtgcgcccggacctgttcactctcaaaccgtgttttgtggcagtggaaactcagggcgaatttacctcaggcacgacggttgttgatatcgacggttgcctgggcaaaccttcaaacgtgcaggtggcgctggatctggatgtaagaggcttccagcagtgggtagctgaggtgctggctctggcgctctaa

SEQ ID NO: 32821 - DNA, 273 bp, Escherichia coli
atggaaatacgcgaaggccacaataaattttacattaatgacgaacagggcaagcaaatcgctgaaattgtctttgtgccgaccggagagaatttagcgattatcgaacataccgatgtcgatgaaagcctgaaagggcaagggattggtaaacagctggttgcgaaagtcgtggaaaaaatgcgtcgggaaaaacgaaaaattatcccattatgtccatttgcgaaacacgaatttgataaaacgcgggagtatgatgatattcgcagttga

SEQ ID NO: 32822 - DNA, 168 bp, Escherichia coli
atgctcaccggtgatatggttgaaattattgacgtcgatattgatgttgtcgccgttgtgttgccagtcattaccgtcacgatgaccgccatcgtggtgatgataatcatcatcgtcatgatgatgatggtcatgatcgtcgtcgtcccagtcgatgctgctgaatag

SEQ ID NO: 32823 - DNA, 216 bp, Escherichia coli
atggggccaatcagcgtaatggaaagcgagcacgatgaagcgggtgaactgctggaagtaatcaaacacactaccaataacgtcacaccgccgccggaagcctgcaccacctggaaagcgatgtataacggcattaatgaactgattgatgacctgatggagcacatcagcctggaaaataatgtgctgttcccgcgcgcactggcgggtgagtga

SEQ ID NO: 32824 - DNA, 732 bp, Escherichia coli
gtgctggtctgcgtaaatcgcaccagtgcgttacaacctttgcaaatctatgattttctgtgtgatgcaggcgttgagtttatccagtttattcctgtggtcgaacgcctggctgatgaaacggctgttcatgctggacttaagctacatggtcccggcgatattcagggcgaactgacggaatggtcggtacaccccgaggagttcggtgaatttttggtggcgatattcgaccactggatcaaacgcgacgtcggcaagattttcgtgatgaatatcgaatgggcgtttgccaattttgtcggtgcgccaggagcggtttgccatcatcagccaacctgtgggcgctcggtgattgttgaacacaacggcgacgtttacgcctgcgatcactatgtttatccgcaatatcgactggggaatatgcttcagcagacaattgcagaaatggtagattccccgcaacagcaggtgtttggtgaagataaatttaagcagttaccggcgcagtgtcgcagttgtaatgtgttaaaagcgtgctggggaggctgtccgaaacaccgctttatgctcgatgccagcggcaaaccgggactgaattatttgtgtgccgggtatcagcgttatttccgccatctaccgccatatctaaaagcaatggctgatttgctggcgcacggtcgtccggccagcgacattatgcaggcgcatttgatggtggtgaataagtaa

SEQ ID NO: 32825 - DNA, 1899 bp, Escherichia coli
atgagtaacaatgtaaaattacaggtattgctcagggctgttgaccaggcatcccgcccgtttaaatccatccgcacagcgagtaagtcgctgtcgggggatatccgggaaacacaaaaatcactgcgcgagctgaacggtcacgcatcccgtattgagggatttcgcaagaccagcgcacagcttgccgtgactggtcatgcacttgaaaaggcacggcaggaagccgaagcccttgccacacagtttaaaaacactgaacgtccgacccgtgctcaggcgaaagtgctggaatccgcaaagcgtgcggcggaggacttacaggcgaaatataaccgcctgacagattccattaaacgccagcagcgggaactggccgctgtgggaattaatacccgcaatcttgcacatgatgagcagggactgaaaaaccgtatcagtgaaaccaccgcacagcttaaccgtcagcgtgacgcgctggcgcgtgtcagtgcacaacaggcaaaacttaacgcagtaaaacagcgttatcaggccggaaaggaactggccggaaatatggcctcggtgggcgctgccggtgtggggattgctgctgcgggaacgatggccggagttaagttgctgatgcccggttatgagtttgcgcagaaaaactcagaattgcaggctgtgctcggtgtggcaaaagactccgccgaaatggctgcactacgcaagcaggcgcgccagctcggcaacaataccgcagcctcggcagatgatgcagccggtgcgcagattattattgcgaaagccggtggggatgttgatgccattcaggcggcaacgccggtcacgctgaatatggcgctggcgaaccgtcgcacgatggaagaaaacgccgccctgctgatggggatgaaatccgcctttcagctttcaaacgataaggtcgctcatatcggggatgttctctccatgacgatgaacaaaaccgccgccgattttgatggcatgagcgatgcgctgacctatgccgcacctgtggcaaaaaatgctggtgtcagcattgaagaaaccgccgcaatggtcggggcgctgcatgatgcaaaaattaccggttcaatggcggggacgggaagccgtgccgtgttaagccgcctgcaggcaccgacgggaaaaacatgggatgcactgaaagagcttggcgtgaaaacctcagacagtaaagggaatactcgaccagtatttaccattctgaaagaaatgcaggccagttttgagaaaaaccggctcggtactgcccagcaggctgaatacatgaaaactattttcggggaggaggccagctcagccgccgccgtgctgatgactgccgcctcaactggaaagctggacaaactgaccgctgcgtttaaagcctcagacgggaagaccgccgagctggtaaatatcatgcaggacaacctcggcggtgactttaaggagtttcagtccgcttatgaggcggtggggactgacctgtttgaccagcaggaaggcgcactgcgtaagctcacgcagacggccacaaagtatgtgttaaaactcgacggctggatacagaaaaacaaatcactggcgttaaccatcggcatcattgtcggtggtgcactggcactgattggtgtcatcggtgccattggcctcgtagcctggccggttatcaccggcatcaatgccatcatcgcggcagcaggcgcaatgggagcaatcttcacgacggttggcagtgctgttatgacggccatcggggcgattagctggccggttgtggccgtggtggccgccattgtcgccggggcgttacttatccgtaaatactgggagcctgtcagcgcattctttggcggtgtggttgaatgcgtattttcatga

SEQ ID NO: 32826 - DNA, 234 bp, Escherichia coli
atgcttaacgtcattcgtttaataaacacatttgaaatgcatgcgaccatagtgaaaaataaaatcacgcaaagagacaactataaaaggatcatgtctgtaattgtggttgtcttattactgacccttacattgatagccattttttcggcaattgatcagctgggtatttcagaaatgggtcgcattgcaagggatcttacacatttcattatcaatagtttgcaagactga

SEQ ID NO: 32827 - DNA, 1338 bp, Escherichia coli
atgaatagaatctatcgcgtgatatggaattgcaccctacaggtatttcaggtctgctcggaattaactcgcagagtaggtaaaacatcgacggttaatttgcgtaaatcctctggactgacaacgaaattcagtagattgtcgctgggtgttttgctggcactaagcggttcagcgtctggtgcgagtctggaagttgataatgatcagattaccaatattaatactgatattgcttatgatgcctacctggttgggtggtatggcactggagtgcttaatattttggctggcggtaatgcctccttaaccactattactaccagcgtcattggtggtaatgagaactcgaagggcaccgttaatgttttgggtggcacctggcgattgtatgatagcggaaataatgcaaggcctttaaatgtgggccaatccggaacggggatgctgaatattaaacagaaggggcacgttgacggaggatatttaaggataggttcttcgacaggaggcgtcgggacggtcaatgttgagggagaggactcggttctgatgaccgaattattcgaaatagggagttacggtacaggctcattaaatattacggataagggttacgtcacgagttcaatcgtcgccattgtaggatatcaggcgaacagtaatggtaaggttgtcgttgaaaagggtggcgagtggctaataaaaaataatgattcctcaattgaatttcaaattggcaatcaaggaactggggaagcgactattcgcgagggtgggctgattacggctgaaaatacgattatcggtggcaatgccaccggtatcggaaccctgaatgtgcaggatcaagactctgtcatcacggtacgcagactctataatggatatttcggtaatggcaaagtcaatatttccaataatggactgattaataacaaagaatattcattggtgggcgttcaggacggttcccacggtgtcgtcaacgtgactgataaagggcattggaatttcctcggaacgggcgaagctttccgctatatctatatcggtgatgctggcgacggtgaacttaatgtctcgagtgaaggaaaagtagattcgggaattatcactgcggggatgaaagaaacaggcacaggcaacattactattaaggataagaactccgttatcactaatctcggaactaatcttggttatgacggccacggcgaaatgaatatcagtaatgaggggcttgttgtcagcaacggaggaagctcactcggttatggagaaaccggcgtcgggaatgtcagcatcaccacggggggggatgtgggaggtcaataa

SEQ ID NO: 32828 - DNA, 798 bp, Escherichia coli; identical to SEQ ID NO: 8888

SEQ ID NO: 32829 - DNA, 948 bp, Escherichia coli
atgtctgaggcaaacattattcacagcagatatggactgcgctgtgaaaaactcgacaagcccctgaatcttggctggggactggacaatagcgcggtgttgcactgtcccggggagctgccgacagggtggctgtgcgatgcgctggatcagatatttatcgccgcaccacaactgtcagcagtggctctcccctgggccgaatggcgtgaggagccacaggcgctgacgctttttgggcaggtaaaaagcgacattatccatcgtactgccttctggcagttaccgttatggttgagttcaccggcaaaccgggcctccggtgaaatggtttttgatgcagagcgtgagatttatttcccgcagcgcccaccccgtccacagggtgaggtttaccgccgttacgatccacgtattcgcaggatgctgagtttccgcattgccgatcccgtttctgatgcagaacgtttcacccgctggatgaatgatccgcgcgttgagtatttctgggagcaaagtggctcactggaggtacagaccgcctatctggagcgccagctcaccggtaaacatgcattcccgctgattgggtgcttcgacgatcggccattcagctattttgaaatctactgggcggcggaagaccgcattggtcgtcactattcgtggcagccctttgaccgtggcctgcatctgctggttggtgaacagcaatggcgcggggcccactatgtgcaaagctggctgcgcgggctgacacattacctgctgctggatgagccccgtacgcagcgcacagtactggagccacgcaccgataaccagcgcctgttccgccatcttgagcctgcgggataccggacaattaaagagttcgacttcccacataagcgctcgcgcatggtgatggcggatcgtcatcacttcttcacggaggtcggtctgtaa

SEQ ID NO: 32830 - DNA, 1164 bp, Escherichia coli
atgggtggaaaaccggcggcgcggcagggtgacatgacccgcaagggactggatattgtgcagggttcagcaggggtgctgataggtgcgccaaccggtgtggcctgctcggtgtgtcccacaggggaagccacgccgaaatatggcaatccggtaaacccgctgctgggagcgaaggtgctgccgggcgagacggaccttgcgctgcccggcccgttgccgtttattctttcccgcgcctacagcagctaccggaccaggacgtccgcgccggtgggggtgtttggtcccggctggaaagcccccttcgatatccgcttacaggttcatgagcgggaactgatactcaacgacaacggcggcaggagcattcactttgagccgctgtttcccggcgagataagctacagccgcagcgagtcactctggctggcgcggggcggggtggcggcgcagcacagttcgcagccgctaagcgcgctctggcaggtgctgccggaagatgttcgcctgagtccgcatgtgtacctggcgacaaacagccttcaggggccgtggtggatactcggctggccggagcgggtgccggaagtggacgaggtgctgccgccggagccgcccgcataccgggtgctgacgggcgtggtggacggcttcgggcggacgctggccttccaccgggcggcggagggtgacgtggcgggcgcggtgacgggggtgacggacggtgcgggccgtcgttttcacctggcgctgagcacgcaggcgcagcgggcggaagccttccgtaaacagcgcgagtcttccttatcttcccctgccggtccccgttctgtttcctcttctcaggttttccccgatacgctgcccgccggtacagaatacggtgccgataacggtatccggctggaggcggtgtggctgacacacgacccggcatacccggatgaacagccgactgcgccgctggcgcgctacacgtacacggccagcggagaactgcgggcggtgtatgaccgcagcgggtgcgggcggtgtatgaccgcagcgggacgcaggtgcgcgggtttacttatgatgtggcgcacgccgggcggatggtggcgcaccattatgcggggaggccggagagccgctaccggtatgatgataccggccgggtga

SEQ ID NO: 32831 - DNA, 261 bp, Escherichia coli; identical to SEQ ID NO: 30420

SEQ ID NO: 32832 - DNA, 270 bp, Escherichia coli
gtgcgtgatgacttcactctggaatggagtggcccgaaagaaaataacatctttgcggtcaacgccagcatgcaaactcatggcatcgccgaaccccagctcagcctgatggcctggagatctgcacgtattcttaatcgcgtactggggcgtgatttattcgatctcagtatgccgcccgcactgattcagtggcgcagcggcagccggaaaaaaccgcagccggaggctgctgctttaactcactatacaacaaatattcaggaataa

SEQ ID NO: 32833 - DNA, 1152 bp, Escherichia coli; identical to SEQ ID NO: 28871

SEQ ID NO: 32834 - DNA, 1020 bp, Escherichia coli
atgaaacagtttgttcaggcaaacaatcaaggtggagtaacatttgacggcatgaaagcatggagagcgaaatttgctgatgcggagcaaaaatataagcgtagcggagaggcaaatgcggcaaggagagcaggggaaatacgccgggcaattactgatgatatgcgcacaatggcggaaaacggcggatttcttgatgactggcaaaaagctaatgatctgtctaaagcgaggttatcagcacaagagagtgcagagtctgttttcgggcgtgatttggcaacagatgcactgattacgaatggagtaaaatcccttcaatcatcgtcagctaaaggtcttaatggtcctgctggattccattctatgatccgcgcgctgccagaatcagagcgtgttcctgctatatcatcaatgttgcaagatgctatctcgcatggtgtacgtggtggtaaagctgatgcagcaggaattaaccatatcgcagagatactcactccacaaaatgtaaaagccattagccgatattcctcagagcttggaagaattgcagatgcatatggcactcttgcaagagcagcagtgaaacctcagcagtatattgaaagaacagggagaactgccaatgtactacgcgatctggatgccggtttatccaacgtcacatcaacagtgttaaatgcaattgccaattcaacatcaggtgccattgttggtggagcaggagggggcattgcaggcgctgccgcaggtgctttagttggcgccgggctaaaaggtgctgtatctaaaattgccaccacacgtagtggtcggtatgcgatagagaaagcagttcaggaagccacgaaagcagtaagagctggcggaagtaaagaagcattagcggcggcggaacgcagatttatggcaaataaagccgccgtaaaagcaatacgcgatgcagttggaaacgaagagttcaatcgcttagcgagggctggcattgtagcgtcgctaagcggaatggcacaggagtaa

SEQ ID NO: 32835 - DNA, 567 bp, Escherichia coli
atggatattcgcacacgaaagacaaaatttttagagtcgttagattcaactgaagtgatacgcaaagcagtaagtctcgctatagattgcattattgataatcataatagtaatgaagatacccccttagttattaccagctatgatgatctctgtagaatccaggtgctaaattatgtacaggagttttgcgaagctgcattccctgatatggatgaatattactttagtcctaacatacttcgcatcaacggcaagactagtgaagaagcttgtattaacttaattaaactcttaagaagtacaaaaggcatgctattctggtccgatgccccatcgtggttcgctagcctccccgacggattattccatgttgttaacattgatcaaaaaatcgttactcgcggccttaataagaaaaactctaagccgacaataatcaataaagattacagtgtagatacactactatcagagctatttttgaatggcgcacacatggagcaacccaacgtacacaacgtttctgagggaaacatgaagttctatgatgaatgccatgggtaa

SEQ ID NO: 32836 - DNA, 2652 bp, Escherichia coli
atgacagcctttcgtgccgcatttaaggcatatcgtatgcatcaggtgttaatactgcctcgctttgcacggcttacctttgcccttggcttagcaactgcggtttttcccgttgacgcagagtattattttaatccacggtttttaagcaatgaccttgctgaatctgtcgatttatctgcctttactaagggacgcgaggccccacctggtacatatcgggtcgacatttatttgaacgacgaatttatggctagtcgggatattacttttattgcagatgataataacgcagatctcatcccatgcctgagtacagaccttcttgtcagtcttggcataaaaaaatcagcattattagacaacaaggaacattcggcagataaacatgtgccggacaacagcgcatgcacaccacttcaggatcgtttggctgatgcatcatctgagtttgatgttggtcagcaacatctgtcactctccgttccgcaaatatatgtcggcagaatggctcacggctatgtttctcctgatctgtgggaagaaggaataaatgcagggctactaaactatagttttaatggtaattctattaataaccgtagtaaccataatgcaggaaaatccaactatgcatatttgaatttacagagtggcatcaacattggtagttggcgactgcgcgataactcaacgtggagttataacagtgggagtagcaattcatctgacagcaataaatggcagcatatcaatacgtcggctgaacgtgacattattccgttacgctcacggttaacagtgggtgatagttataccgatggcgatatttttgacagtgtgaactttcgtggccttaaaataaattcaacagaagcgatgttgcccgatagccaacatggtttcgctccggtgattcatggtattgctcgtggcaccgcacaagtgagtgtaaaacagaatggatacgatgtttatcagactactgtcccacccggcccttttactattgatgatatcaactctgcggccaatggtggtaatctgcaagtaaccataaaagaggcagacggcagtattcagacattatatgttccttattcgtctgttccggttctccaacgtgctggatatacgcgttatgcacttgccatgggggaatatcgtagtggaaataacctgcaaagcacccccaagttcgtacaagcaagcttgatgcatggtctgaaaggaaactggacaccttatggcggaatgcaaattgcagaagattatcaggccttcaaccttggtattggtaaagatttaggactttttggtgccttttctttcgatattacgcaggccaatacgacacttgcagatgacacccgtcacagcggacaatcggttaaattcgtctacagcaaatccttctaccagacgggaaccaatatccaggtcgcaggatatcgctattctacgcaaggtttttataacttatccgacagtgcatacagtcgaatgagtggttacaccgtcaagcctcctaccggagacaccagtgagcagacactatttattgattattttaatctgttctacagtaagcgtggtcaggaacaaataagcatctctcagcagcttggaaattatggtacgacatttttcagtgccagtcgccaaagttactggaacacgtcacgcagcgaccagcaaatatcatttggattaaatgtgccgtttggtgatattacgacttcgctgaattacagctattccaataatatatggcaaaacgatcgggatcatttactcgcttttacgcttaatgttccctttagtcattggatgcgtacagacagtcagtcggcatttcataattcaaacgccagttacagtatgtcaaacgatttgaaaggcggcatgaccaacctatcaggggtttatggcactctgctaccggataataacctgaattatagtgttcaggtcggtaacacccaagggggtaatacatcgtctggcaccagtggttacagttctcttaattatcgtggtgcttacggtaatacgaatgtcggttacagtcggagtggtgacagcagccagatttattacggaatgagtggtgggattattgctcatgctgatggcatcacctttggacagccgctgggcgacacaatggttctggttaaggctcctggcgctgataatgtcaaaatagagaaccagaccggaattcataccgactggcgtggctatgccatattaccatttgcgacagaatatagagaaaatcgtgtcgctcttaacgcgaattcccttgcagataatgttgaactggatgaaaccgtagtcactgtcatcccaactcacggtgctattgccagagcaacatttaatgcacaaatcggcgggaaagtattaatgacgttgaagtacggtaataaaagcgttccattcggtgcaattgtcactcacggagagaataaaaatggcagcattgtcgcggaaaatggtcaggtttatctgactggacttccacagtcagggaaattacaggtttcatggggcaaagataaaaactcaaactgtattgtcgattacaagcttcctgtagtctctcctggaaccttgctgaaccagcagacagcaatctgtcgctaa

SEQ ID NO: 32837 - DNA, 477 bp, Escherichia coli; identical to SEQ ID NO: 4554

SEQ ID NO: 32838 - DNA, 696 bp, Escherichia coli
atggacttacaacactggcaggcacagttcgaaaactggttaaaaaaccatcaccagcaccaggacgcggcccatgacgtatgtcattttcgccgcgtctgggctacggcacagaagctggcggcagatgacgatgtcgatatgctggtgattttaaccgcctgttattttcacgatattgtgagcctggcgaaagatcatccacaacggcagcgttcttcaatcctggcggcagaagagacgcgtcgcctgctccgtgaagagttcgtgcaatttccggcggagaaaatcgaggccgtttgtcatgccattgccgctcacagtttcagcgcgcaaatcgcccccttaacaacggaagctaaaatcgtccaggatgcggatcggctggaagccctgggggcgattggcctggcgcgcgtgtttgccgtttcaggggcattgggcgtggcgctgtttgatggtgaagatccgttcgcacagcatcgtccgcttgatgataaacgctacgcgctggatcatttccagactaagttgctgaagctaccgcaaaccatgcaaaccgcaagaggcaagcagctggcgcagcacaacgcgcaatttttagtcgagtttatggcgaagctcagtgccgaactggcgggggagaatgaaggtgtcgatcacaaggtgatagatgcgttttcacccgcgggctga

SEQ ID NO: 32839 - DNA, 270 bp, Escherichia coli
ttgcaggttggtacggtcagcggcgccataagcaccaacgataccaaagccttcgtattcgtagctgatagaaccgccaacaccgtcgccgttagagcggcgtgcagtgtcacgctcgtttttacccaggtactgaacagcgaagttcaggccatcaaccagaccaaagaagttggagttacgataggtagcaacgccgccaacacgaccaacgaagaagtcatcgctgtatgcagtatcaccaccaattctggcagcatatcggtgtaa

SEQ ID NO: 32840 - DNA, 1008 bp, Escherichia coli
atggcaatttatacccgaacaggtgattcaggaagtacgtctttatttaccggacagcgcgtcagcaaaactcatctacgtgtcgaaacctatggcacgctggatgaactgaacgcgacactcagtctgtgttattgcgccaccgccatcgaaagccatcgcatcttactggaagccattcaacaacagatattttggtttagcgccgaactcgccagtgaaagcgaacagccgtcagcgcagcagcgttacatcggtacggaagaaattgctgcgctggaaaacgcgatcgatagcgcaatgaacgccgtccccccagttcacagcttcattctgcctggtcgatgtgaagccgcgagccgcatgcatttcgcccgcacagtggctcgacgggctgaaagacgtctggttgaactgacaacggaaaccaccgtccggaatgttttgctgcactatatcaaccgactttccgattgtctgtatgccctcgcccgcgtggaagacaacgttgctcatcaaaacctgatgattcaggaaatcacaaaacgttatcacgaagccaaccacaccccagcattgaaggaacgcacaatgccgctctcttttcaggatcttcaccagctcattcgtagtgcggcactgcgcgcagatgaactgcatattcccgttgtcatcagcattgttgatgccaacggaacagaaagtgttacctggcggatgcctgatgcactgttggtcagcagtgaactggcaccgaaaaaagcctggaccgccgtggcgatgaaaacggcaacccacaagcttgctgataccgtgcaacccggcgcgccgctttacgggctcgaaagccatatgcaaggcaaagtcgtcacttttggtggcggcttccccctctggcgtgacggaaaattgcttggcgggcttggtatcagtggcggtagcgttgaacaagacatggatattgcccaaagcgcaatggcggcaattaacgtgggagtaaaccaatga

SEQ ID NO: 32841 - DNA, 216 bp, Escherichia coli
atggttgataaaataatatttacagttactcctattttttcaattcctccccgcggagcggccgctgttgaaacgtggatgatccaggatactcaaattacacctttgttaatgataattgtagtattcatagggttggattcagtcgcatatataagcggttatttcaaaaatggacaagacttgatcctctaccatattcacagagaatattga

SEQ ID NO: 32842 - DNA, 819 bp, Escherichia coli
atgacttatcgtgaaatgcttagtcagcatgttattgcaatatctacatcagatagcccagatatgcctgtattggggttaagtcaacagcatttatatgacgcgatgacagaaattgcgcgtcatttattagccttgggagcccggattgtttatggaggagatttacgtgctaacggttttactgaactgttatttgagttagtagcacgccatagaagagatgcggatgagggggatgaacgttccagtatattgaactatcttgcatggccggtgcatatgcaaaaagattccagtgacttggaaaggctcagtgcggacctgaaaggaatggcaaggcttgttttattcaatcgggatggcgagtcgttgccaatggcagaacgagcccattacatagcaactattccttctgatgaagattgggaaaaaggtttgacagcaatgcgacatgctatgttacaagacacacatgcccgtattattcttggcgggcaggtagataagtataagggggcaatgcctggtatagcagaagaggctatattatcacttcgcgctaaacaaccccttttcattatggggggctttggtggatgtgcaaaagatatcaccgagtctctgaatattgtggcatctgacggaatgcagaaacgcaactggagaggtcgggaagaattttctggtttctctttccaggatcttaataacggactcactgaggaagaaaatactgtgctagcacagactccgcatgtggaccaagctatcgccatgattttgagaggacttttccgattagtaaaacgttgctga

SEQ ID NO: 32843 - DNA, 1626 bp, Escherichia coli; identical to SEQ ID NO: 32385

SEQ ID NO: 32844 - DNA, 366 bp, Escherichia coli; identical to SEQ ID NO: 6173

SEQ ID NO: 32845 - DNA, 303 bp, Escherichia coli
atgacggtcagatattatatcagttgtgctgatttaaccgcagagaagttcgccacagcaatccgaaaccgctggcacgtggagaataagctgcactggcgtctggacgtggtaatgaatgaagacgactgcaaaataagaagaggaaacgccgcagaattattttcagggatacggcacatcgctattaatattttgacgaatgataaggtattcaaggcagggttaagacgtaagatgcgaaaagcagccatggacagaaactatctggcgtcagtccttgctgggagcgggctttcgtaa

SEQ ID NO: 32846 - DNA, 1350 bp, Escherichia coli
atgattaataaagataataatttaaatatagatattctacgtcagcagaatgcaaacattcctctcaaagaggcatcctcgcaaagtgaggagcctcatcaactgggaaacagcgaaagcgagggtaattttcataacagcgccagtaaggataataatattggcgctatgctcaagaaagatgttgagaaactatcaactttagtcagtgaatgtagcccgcgaaatgaagactggaaatgccagcacgacatacaacttaacttcgttaaaaacatgctcagaaattttccaactgagaacctgtcagagaaaggatccgcgctcttacacgaaagttatttgctgataaaaaacgttctgcagcttacagaaaatgttaatactattgacggaaagttaaaggatcccgctaaaatattgaccctgcataactctgtgagaaaaaccctggctaacgttgctgacaacacaaccgggtcaattgcaatggcaacgaccaaaggaaccttaactcacgctatcgcttctttagagagttctgcacctgaagtgagaagttcagaaaccagcagtactttaactgccagtagttcaagcgaatttaaaagtgataaatatatatgcagtgatattgctgatttgatgagtgtgctcggtagcgactacctcgaaatctatgcaaatagcgttgagataatgagcgcatactggcaggacttcagtgaacatatccaaagcaatatgggaaagtggactcactctaataaaaaaggcgatgcgatagtttttgatgtcaatgcatttcaaaaggccttgatgcatttttattatatcgataaatatcctaatggtgatttccactatcattacaatccagactatgttttataccctccggcaccagctgacaaaattggtgttccactggaagaagcagaaaaatggtgcgccgctttagatcttccggtaattccacccgatcccaaacaccgcacaccttctccgattgtcgaagttgaaccgcaaggtagcggtctgtatgttattattcccaaccctcagattattgacagtatgagtcagtcttcagactcaatggtacacagggacgataaagggaaggaaaaaaatatatctaaagaattcaccggctacgaaataagcacggctgaataccaggcatggctggcgggttataacggccaggcagaaaacatgaaaaccgacgtgcaggttatcacgactaaatacagtacagccaactccacctacgatacgattatcaaattattatcgtcaaccattactgcattgtttgattcagcgaaggattatttacgtttctga

SEQ ID NO: 32847 - DNA, 369 bp, Escherichia coli
atgaaacctgaaaaccagcgacgagttgaggaaaaaaaacttagtgaccgaacgattgcacgtttacttagaatgaaaatgaggtgggctagtcaagttatagttgttatcgggaaagagacacatactagaccttgggtaaactgggaaattcaagtagctcatcaacttggaaaaccaatcataggtgtatatgaaaatgggttaaaaggcgatgtaaaactaccagagaatctcgaaaagtatgcaacctctatagtggcctggagaagtgatgccattatcaacgcactagaaggtaaaacttcctttgaaaaacctgatggtacggatcgtgataaagttcaaggtggaaatgtcgtatgctaa

SEQ ID NO: 32848 - DNA, 162 bp, Escherichia coli
atgaaactaccgggaaacgcccttatctggtgcgtattaatcgtgtgctgcacgttgttgatattcacactcctgacccggaatcgcctgtgcgaagtccggctgaaggacggatacagggaagttacggcaacaatggcttacgaatccggcggtaagtag

SEQ ID NO: 32849 - DNA, 408 bp, Escherichia coli
atggcaggagaaaatgggccagcacgccctgatatagcgacaaaaccgccgttaccggcggatgtgcgcaactgcaatttctatgtgctgatggaggcgctgtaccgtcggtatggcacgccgggccaggacatttccctgcgtaccgagcctgcctgggagatcgtgcgtttcagctctgacgccagtatcggttttccgggtacggacctgagtgcgctttcccgtagccagaacggacagtatgtactgcaaacccggttcctgggtttttccggcagccagtcgccgctaccgggctattatctggatcagatggcgcaggagtctgcacagaacgaagacggcctgaaagaatttctcgatctattcagccaccgctggacacagtttgcctatcatgcctag

SEQ ID NO: 32850 - DNA, 372 bp, Escherichia coli; identical to SEQ ID NO: 11381

SEQ ID NO: 32851 - DNA, 129 bp, Escherichia coli
atgggtcatattgttttgatgttgatcagattgtatctgccgcccgagttttcggaaaaacaggcaatggagatttcgcagcattctgctgggacaatggcttcaccactacgctcgcaaaagaagtaa

SEQ ID NO: 32852 - DNA, 1491 bp, Escherichia coli
atgctgcggggactgaaggctcgctatgcacagcaccacggcgtgcatatgctggacagcgccattcagaccgccgtgcgcctgtcgcgccgctatctgaccggacgccagctgccggacaaggcggttgatttgctggataccgccggggcaagagtccgcatgagccttgacaccctgccggaaccgttgacgcagcttcatgcgcgactggcggcactggatattgagcgggaagcgattgagcaggacagcgtattttatcccgaagccagcccggagcggctggcggaactgaccgatttgcgtgatgagctacaggcagaagccgggcatctggaagcgcagtatcagcaagaaaaggcactggcgcagcagattatgacgttgcgtcaggaaggaacagacagctctgaactgcaacagcaactgcggacgcatcagagctttgcaccgctgctggcgctggatgtggacgcccgcgccgtcgccacggtggtggcggactggaccggcatcccgctctcttccttgctcaaggacgagcagagcgacctgctcagtatggaacagagccttgaaaaccgcgttgtcgggcaaagcccggcgctctgcgccatcgcacagcggctacgggcggctaaaaccggcctcacgccggagaacggcccacagggggtattcctgctgaccggccccagcggcactggcaaaaccgaaactgcgctcacactggccgacaccctgtttggtggtgaaaaatcccttatcaccattaatctttcggaataccaggaaccgcataccgtttcccagttgaaaggttcgcctccgggctatgttggctacggtcagtgcggcgtactcaccgaagccgttcgcaaacgcccttacagcgtggtgctgctcgacgaagtggaaaaggcgcaccgcgacgtgatgaacctgttctatcaggtgtttgaccggggatttatgcgcgacggcgaagggcgggaaattgacttccgcaacaccgtgattctgatgaccgccaatctgggcagcgaccacatcatgcagctgctggaggaaaaaccggacgccacggacgcagacctgcatgaactgctgtatccccttctgcgagaccattttcagcctgcactgatggcgcgttttcagacggtgatttaccgccccctgggacaggaagcgatgcgtaccattgtggaaatgaaactggcgcaggtggttcgtcgtcttcgtcagcactatgggctggaaacggaaatcaacgacagcctgtatgacgcgcttaccgccgcctgcctgctgcctgacaccggagcgcgtaatatcgacagcctgctgaaccagcagattttaccggtcttaagccagcagttgctggcgcagcaggccgcgcaccataagccaacccaactacggcttggctgggatgaggaagacgggattgtactggagttcgctacggaagagatgcaataa

SEQ ID NO: 32853 - DNA, 1536 bp, Escherichia coli; identical to SEQ ID NO: 5172

SEQ ID NO: 32854 - DNA, 150 bp, Escherichia coli
atgttccaaaccataatgggaaggacactattctttatccatccgtacttttccctgcatggtatgttgagcaaaaaaaaggatggtcgtcaattatggcgactgtaccaacacaatttggaattaaagagccaaagaaaagagccctag

SEQ ID NO: 32855 - DNA, 204 bp, Escherichia coli
atggcaaccaacaatcgtaaagccaagatgctaatttcccgtgtatacagactttgctaccccagccagtggttgagagttagcaatcgccgtgtggtgttgttctcattttctggaattgccagagagggaatcaaagataagcgcagcgcggcgcaaaaccgctggaaaaaccactgttatctgcgcactaaaggagagtga

SEQ ID NO: 32856 - DNA, 558 bp, Escherichia coli
atgacaactttaaccgacaaagaaatgattaaagaaatcaaagagcgcataggcagcttggacgtgcgagacaatattgagcgtcgggcttatgaaatagcgttagcctcgctggaagcagaaccagttgcttatattttcaaacatccggccgggaaattattctgggctttaacggatgaaagcaataaagagcaaccggacgttattcctgtttatgctgactcacctgcgccgatagcgtcggaggccattgaaaacgctattgaatacatccgcagtatcgcttttcacatcgatgaagacgattaccacggcaaacatattgcgtatttcatgcgacaagcattggcctggctggaagggcattcatgcagtgatgacagtcagggcaaatccgataattcaccattgccgcgctaccaggtgatcgaattaacaatgctggttaaacaattggtcagccaactgaaaaaagcaaaacctgattgcaaattacctgatagggcgatggattatcttttgcgaaacggactggtaagtgcggagggggtttaa

SEQ ID NO: 32857 - DNA, 372 bp, Escherichia coli
atgatggactattcacagttaagtgattttgaaattaacagaatggtaggagacataatttttaaaggcctttgggcgtgtaaaccggaaacatcagggaataacaccaacaaatggtattacggaaatactgatacaacttttgagccattaaaccctttacctgactactgcaatgatccgagagctgcatggcctgtaatcgcaaaacatcagatcagcatatgtgcatacgaaagaaataatcctggaatgaagaatgaatattggtgggaggcggatagattttgtaaatttattaccatagacaacaacccactccgcgccgccatgattgtctttctcatgatgcaggaaaatcagaatggctaa

SEQ ID NO: 32858 - DNA, 708 bp, Escherichia coli
atgtactatttaaaaaacacaaacttttggatgttcggtttattctttttcttttacttttttatcatgggggcctacttcccgtttttcccgatttggctacatgacatcaaccatatcagcaaaagtgatacgggtattatttttgccgctatttctctgttctcgctattattccaaccgctgtttggtctgctttctgacaaactcgggctgcgcaaatacctgctgtggattattaccggcatgttagtgatgtttgcgccgttctttatttttatcttcggaccactgttacaatacaacattttagtaggatcgattgttggtggtatttatcttggcttttgttttaacgccggtgcgccagcagtagaggcatttatcgagaaagtcagccgtcgcagtaatttcgaatttggtcgcgcgcggatgtttggctgtgttggctgggcgctgtgtgcctcgattgtcggcatcatgttcaccatcaataatcagtttgttttctggctgggttctggctgtgcactcatcctcgccgttttactctttttcgccaaaacggatgcgccctcttcagccacggttgccaatgcggtaggtgccaaccattcggcatttagccttaagctggcgctggaactgttcagacagccaaaactgtggtttttgtcactgggtgatgctgccaacttactgatttag

SEQ ID NO: 32859 - DNA, 405 bp, Escherichia coli
atgagtgaagctctcaaggcactgaacaatattcgtacacttcgcgcacatgctcgtgaaacagatctgacaactctggaagagatgctggaaaagctctctgctgtcgttgaagatcgtcgtgaggaagaaagtgctgtccgtaaagaacaagaagaacgtcaggctaaactggaagccttccgccagaaactgttagaagatggtattgatccagcagaactccttgctgctgttagttcatcccagcctaaagccaaatcgacacgcactccacgccctgctaaatacaaatatacagatgaaaatggcaatgagcagacttggacgggtcagggccgtactcctaaagcgatagctgctgccatcgaagctggtaaaacgctggaagactttgcgatctaa

SEQ ID NO: 32860 - DNA, 1149 bp, Escherichia coli
atgaataatataaataaaatttttataacatttttatgtattgaactgattattggtggtggtggaagattactggagccattgggaatattccctttgcgatatttattatttgtatttagttttatacttttaatttttaatttagttacattcaatttttcaatcacccaaaaatgtgtcagtctttttatatggttgcttttattccctttttatggcttctttgtcggcttattagctggtaataaaataaatgacatactgtttgatgtgcaaccatacctttttatgctgtcacttatatatctatttacactaagatatactttaaaagtatttttatgtgagatttttattaaaatagttaatgcatttgcattatatggatcactgttatatatttcatacataattttgttgaatttcggtttgttaaattttaatttaatttatgaacacttatcattgactagcgagttcttttttcgtcccgatggggcttttttttccaaatccttctacttttttggtgtcggtgcgattatcagttttgtcgacaaaaaatatttaaaatgtctcataatagtgcttgcgatattattgacagaatcaagaggtgtattactttttacaacattatcactgttattagccagttttaaattacataagctatatttaaatactattataataatattgggcagcgttctatttataattatgctttacatggtcggatcacgcagtgaagattctgactctgttagatttaatgatttatatttttattataaaaatgttgatttagcgacgttcttgtttggaagaggatttggttcatttatattagatcgattaaggattgaaatagtacctcttgagatacttcagaaaacaggcgttattggtgtatttatatcattagttcctatgttgcttatctttgtgaaaggctattttttaaatagtacaaaaacatcattaatgatgtcgttaatactttttttcagtattaccgtttctataactaatccatttctttttacacccatgggaatttttattataggcgttgtagttttatgggtattttctatagaaaatatccaaattagtaataacctcacttctggagcaaaataa

SEQ ID NO: 32861 - DNA, 399 bp, Escherichia coli
atggctaagcatataaatggttatcatgagaagaagattgtagatgttattaacacatggtctatagatgaaaaactaacttgggatgctttgtgcgacaggctagtaaggattattgggaaaagaccatcaagacaatccttaagtagtcatgtaaggattgcagaaagcttcagtgtgaaaaaagccactatcaaatctggtgcaatacacactgtaaaacctgctaatttaaaagtggcttctcaacgaattagaagacttgaagcagaaaatgaagctttgaaggcattaaatgaacgctatttagaacagttcaaagtatggctttataatgctcaccttaaacaaataacgattgaagaacttaataatccgttacctgcaaaatacctttaa

SEQ ID NO: 32862 - DNA, 1068 bp, Escherichia coli
atgggttaccgttatataggttcaaaagtaaaagttattgataacgttattggaaaaatttctgaattatgcccctcaaaaggtcgggttgctgatcttatgtcaggcacaggtgtgatttcaacagaattgagaaaacgcgattacaaagtaaccgccaatgatctaatgacttattcatatcatcattctatcgttaacctaaaattctctagcgcacctaattttgagaagttaatagcatttatatcagattttcatgaagtaaaacctgagctttcaccatacgagaatgttattaattttttgaataatgttaaaccaaaatgtggctacttttggaacgaattttcttgtgaaggaaatcctcaaaatagtgagagaccaaggaattattttagtccagaaaacgctagaaaactagatggcattagagaagtcataaacaatttatcttgtgataatattctgactgatttggaaagaagtttattgctacatgatttaataatggcggctaatgatatcgctaatattgctggtacatatggacattacatgtccaggctaaatggcagggctttgactcagttaaatcttaaatgcacagatttattacttaaatctgatgttgaaaatcacatcgtaatgcaaggttatgcagaggagaatgcaagcaagattcaatgcgacctatgttatattgatcctccatatatgaaaagacaatatgcagccaattatcatatattagaaacgttagcccgtggagatgaaccagaggctataggtattagtggattaagaccttggcgagaccagtattctaatttttgtacgaaaactaaaattagagattcatttaaggaaattattacaaacatgggatgtaatgaatttcttataagttatagtgaagatggattacttacaatagaagattttaataaattactagctgattttggtgatgttaaaatagaggcgttcacccataaaagatttagaagtaataaaagtgaattacaaaatgaacttacagagtacttaatacatcttcaccgttga

SEQ ID NO: 32863 - DNA, 240 bp, Escherichia coli
atgaactttaaattaataatgtttgttagcatttttatacttttaaatttaataagtgtgatgtatgtttcacaggcccctgatatgtttttagtaatgttaggttcagctccgcaacttaagtctccttctttattttatgccatttcagttttaactatattattggatgttatttttcttatgttttggactttcataggatgcctccatctaactaatataaagcgagaaaggtga

SEQ ID NO: 32864 - DNA, 579 bp, Escherichia coli
atgttaattgataaagaaattacgtttaaaagagattttattatatttacattcacatgcatattcgccgtaactatatcaacaggttttatactatacttaccgaacctatttaaaaagtatgttttcttaaatgaacttgcaaactcaaacgttgcattaaaaattttatatttattgccattcttaggcggcgcgataatttttaaaatatacttaaaaagcagaaagtcaatcaaagcatttaacgacctcttattattaggaatcggcttctgtgggctttattcaattctattttttggtattgatgctcttgttaaaaatgaatatttttttaacgttaatagcgtaggaacttttagtattaagctgctctttatgatgtgtagtgtagcaaaagtagccataacatttagtgaattttgtgatgagcggaaaagagaaatcgaggataaaaagccaactataaaaaacttaaaagtagaaaacagccctatactatctaaagcaaaaatagggatatctctttcagtgctggcgcttgtattttatcatcttatcaaaaagaaaaattaa

SEQ ID NO: 32865 - DNA, 885 bp, Escherichia coli
atgaaatcaatgaatattgccgccagtagtgaactggtatcccgactttctactcatcgccgcgtggtggcgttgggagatactgattttacggacgtcgcggcagtcgtcattaccgctgcggatagtcgcagtggcattcttgcgttgcttaagcgcaccggttttcatctaccggtgtttttgtattccgaacatgctgttgaattacctgcgggcgttacggcggtaatcaacggcaacgagcagcagtggctggagctggaatccgcagcctgtcagtatgaagagaatttgctgccaccgttttatgacacgctgacgcagtacgttgagatgggtaatagcacctttgcttgccctggacatcaacatggtgcgttctttaaaaagcatcctgccggacgccatttttacgatttctttggcgagaacatctttcgcgccgatatgtgtaacgctgacgtaaaattgggcgatctgcttattcatgaaggatcggcgaaagatgcgcagaaattcgcagccaaagtctttcatgccgataaaacctattttgtgctgaacggcacatcggcagcgaataaagtggtgacgaatgcgctgttaacgcgtggcgatctggtgctcttcgaccgtaacaaccataagtcgaatcatcacggcgcgttgattcaggcgggggcgacgccggtctatctggaagcttcacgtaacccgtttggtttcattggcggtattgatgcgcactgttttaatgaagagtatctgcgccagcaaattcgcgacgttgcgccagaaaaagccgacctgccggcccgtttcgcctggcgattattcagctgggaacctatgacggcactgtctataacgcccgtcaggtga

SEQ ID NO: 32866 - DNA, 699 bp, Escherichia coli
atggttatgttagtggatgactgtccacgatgtggatcacaaaaaatagcgtttgatgttaatgggctgaattgcactagggtttacaatgcattgggcgggggtaaaacatacgagtacgaggtctattgtgtttgccgagagtgtcataaaacgacaatgtttctttgcagacctttaacgaaaaataaaactttagatggctataattgggaaagtggaatattcggcttaaaggaagttgcagaggttgttaggcctatatcaccggcagacttagcagtagaggagccaccagagttcttacctgagcatatcaatagtgcatatgaggaaggggcgaaatgtttggctataggttgttataatgcagcagcaaccatgtttaggctttgccttgattatgccacaaaaggacttcttcctgatggggagcaagggcctgcgcaaaaaataaggagaagcctagggttaagaatggagtggttatttgataatcatctactgcctgaagctttaagggaactagctgaatgcgttaaagatgacggaaatgatggagcgcatgaaggtattttggataaagctgctgctgaggatcttgaagattttacctatctttttttagaacggctttacactgaacctcaacgccttatcgaagccaagacaaggcgtgaacaaagaagaaacaaataa

SEQ ID NO: 32867 - DNA, 612 bp, Escherichia coli
atggatttagtctttaaagttctggcttcgttgggtggggtgtcttttgttgcatctggcatatttgtttggatcgggaaagtttatttagaaagatataagtcgcggctaaacaaagatattgctgaatttcaatcacaactgagtgcaactaatgaaagaataaaggctaagttagacaattctgtttatgtaacgaaagcgtattttgataaggagttatcagcatatagtctcatttggaattcgatgtttgaaaccagagaaagcgtgcttaagctgaggcctgcgctggatcatgttgaccccaacgaaccatttgaagagagaaaatttagaaggttgaaagttttttttgatgcatttaacacttttgtcacaagtgttgaatctaacaaaccgttcatctcaccagaggtttatataatcttggaccgtttccggaaggaatgcctttcagagtcaatatcgtttcagcatagcgatccagaatttgacgggcaaaattattggaaagaggcggagttgaaccgtacaaccatcaccaagctttttgatgagacgtgtgatgcaattcgagacaggatgcacacattaactgtggttacgtag

SEQ ID NO: 32868 - DNA, 261 bp, Escherichia coli
atgggtaaaaaagacagtaatcaccagattatttatcggggccaggtgctggaacggtttacccttggcgactgggtcttctttcaacgcccaaaggagtgtggcggaggtttttggttgggccgcatctatgaagactgcttctggcttgagctggaattccccgtttcgctatatgacggcctggggtttttgatggaagtcactagggtagagcagagaagtgatgaggttgacgcgaattatcccctgtttgattaa

SEQ ID NO: 32869 - DNA, 237 bp, Escherichia coli
atgaaaagtaatttttcaatgcgccccagcatcaaccttgtgatatctgagccattcatcacactggatgagttctgtcgtcgtactggttacaagcctagctatgcccgccaaatgatccgggaaaaccgccttcccatcaggaaaaaagccggagttaacagccttatcgaaatcaacatgttcgcgttgacgatggaagcggcccaaggctgcgaagtcgcaatgcaagcctga

SEQ ID NO: 32870 - DNA, 615 bp, Escherichia coli
atgtcaaacacaaaagaaaaccctaatgagatttcaactttcatttttccatctcaaagtgggggaagagaggccataacacgcattcttcaggcttatggattcagcacaagacaagctctatgtgatcatctcggcgtctctcaaagcacaatggctaaccgctggatgcgtgacactttcccacatgactggcttatagcctgccatctggacacaggtgtacccttgctttggctaactactggtaagggcactccaaaaaccacgccaaatgaagatcacggattaactttgcaattaagcgaaatcacaaatgggattctaaacaacacaaccttgattcattatgacctacacctaattcctcaaaacaccacagatccgtttcttgtcaaatttgaatcgacgacgtatctcgtcagtgaatataaaggcgagatcaatgacggcacctggctgattgagatagatggttttgcgagcatcagacaggtttaccgtctgcctggcgggcgagttcgtgttgaaaacggccctgcatcatttgagtgtgcggcctctgatgtaaaagttttagggaaagtggcaagcaaaatagataacgtggactga

SEQ ID NO: 32871 - DNA, 549 bp, Escherichia coli
atgagagttttagtcacaggcgtattaattttgtcatcatttgctgcaattgcagcacctgaacaattcaaaaacattaatgacttgatggaaaactataacgattatccaacttataccgtagacggtaaggattttccatctttcaaaattttatctgaaaagcctttacacatccaaatctcgccgcgcactttatcagggagttcaacgaaagatattaagtacgaatcagacagggcagccatttacgcagcatatcgtactttgtatcaaacgcctgcagacagggttaaagtcacagtattacctatttcaattaccccccagcctcggaaggtagagtatatgacggaatataaatatgattttagcattacaaaaaagcaggcaataaatttactccgcagacacagcaatatattgaatgaagaccagttaatgtccgccaatggtgaatggagcaaagcatttgaaaagtgctgttaccttgaagaaggtaagcccggtttatcaatatttgctaaagagttaatcacgcaaaggtaa

SEQ ID NO: 32872 - DNA, 1014 bp, Escherichia coli
gtggcagtaacaaaactcgctaatggtaagtggcaggctcaggtcttccccaacggtagggatgggcggcgtgtacgccgcctatttgcaactaaaggggaagctctggcatttgagcgatatataaaagaccaaacaattgataagccttggcttggtgaaaaaaaagataagcgacgtgttattgaccttgttgatacgtggtttaatgcacacggtattacgttgtctgatggtcagaaaagaaaagatacgatggagtttgcttgcatagcaatgggtaaccctcttgcgagtgagtttaatgcgaaattgtttgccagctatcgtgagcaacgtttaagcggaaaaattactcgttccaacagagtaaaagcagtcacaccacgaactgtgaatttagaactggcttacttccgcgcaatgtttaatgaattgaagcgtctggatgattggatggctcctaatccactcgaaaatattcgtgaattcaaaattgatgaagcggagttgtcttggttgacagtagaagaggtaaaagtgcttcttgctgagtgcgaaaaaagcagagctaaagacctgtcgatgatcgtacaaatttgtctggccactggtgctcgttggggtgaggcagaatccctgtctggcatgcaaatcagtcccgggaagatcaccttcaccaaaacaaagggaaaaaagaacagaactgttccaataagtgatgaactatacgaaatgcttccacgcatcagaacatcaaaacctctgtttaagccatgctactccgcattcagaactgcaataaaaagggccaaaattgaattacctgatggccagctttcgcatgttcttcgacacactttcgcaagccactttatgatgggggggggcaacattcttgtactccaacgcatccttggacatacagatattaaggtaacgatgcgctacgcacatttttcccctgaccatctgacagaagcagttgagttaaatcctttaaatcatctttaa

SEQ ID NO: 32873 - DNA, 1353 bp, Escherichia coli
atgtcaagtttgagggacatggaagaacttataagtgatattgttgatgtagagcttaaggagtatatgcgcgaagcactaacttgctatatgacaggtgctcatcgcgcatgtgttgttttatcttttatcgctatatttgaagatttattaaaaaaactaaatggaatggcatcgacaaataaagttgcaagggccatatttgcagagataaataaaaaaagggaagagcaaaaggtttttgagaatgatttgctgaatcgcttaaaatctgaaaaaataattactgatatagatgctgattttctaaccgtattgaaaactcttagaaacaaagcagcgcatccttccggtcacaaaccaacagccgaagaagcaagatatgtcttttcagaaacaattggcagattcctttcaaaaccaattctttctacaacacaagttgcagatgaaattatatcaaaattaacaaatgcatatttatttcctacaacaaacatacaagatcatgctacagtagtaaatgaaggtgtaaagaatcttcatcatgatggttactcctatctattaaaaaaactactccaatctcttgataatccgaacgaacagatacaagttaatgctaagagatatcttcttggactgtcgagtaatcctttgaatgatcaagttcttcaacaaataaaaaaacaggttttagaggagtgcagttcagatgaaaataaaactaagtttttaatggagtcaatttcaacaaattcaaatttgataaaggatttagatgatatattttatttaagaattaataaaatgtttgaaagtacaatttcgtctacaagtacagcagatcaacatacatatttgagacatcctgttcaaatagtaagaagtcttctggcattggacaaggctgtattagataagttttttatgaataatattgatgatgtgttgaataagtataaattcagccctgtattgatgaatgttgtgaagcataaagaatgggctagagctaaattaattagtaatattttttcaaaagcaggatcttcaacatttgatgaggcgaactcattcgctagaagtgctagcgtttatgataaagatattgctttattaatgaatgatcttgaatgttttgaattgatagtgaatatctgcgctgcaggtatttggggtgcgtatgggccggatggaatgatgaaaggtaggtttaataatataccaaaaataaaggaaaaagcgtccaaggcacttgatgatcaacctgcggcttgtcaagatgttattgaaaaaataagacctggattatctagtagtagcgatttcaaaaaggatttttttgattga

SEQ ID NO: 32874 - DNA, 360 bp, Escherichia coli
atgcagattaaaccaattaaaactgaacaggactatgaagctgcgttacgcgccgtagagcctatgtttgataacgaacctcctgccgataccccggagggagacttttttgaaatcatgtgtgtgttgattaacgaatacgaaaataaacactttcctatcgaagccccggacccgattgaagctattaagttcaggatggaacagcaggggctgacggtaaaagatcttgagccggcaatcggaaaatctaacagggtctatgaagtgcttaaccgcaaacgtaatctgacattgcccatgatcaggaaattacattcaatgtttggtattcctttaaaaagcctcgttggaggataa

SEQ ID NO: 32875 - DNA, 336 bp, Escherichia coli
atgaaaaggaatttctgctcgctggttctgttcgttgtggcattttcggccagtgcagatatcagcggccggattgtgcgcgtgctggacggggataccgttgagatgcttgagccaggaaaccaacttacgcgaattcgtctggccggtatcgatgccccggaaaagagtcagcccttcggccagcgttcccgtcaggaactctcatcgatggtggcccagcggcatgtaaccatcaccggaagtgatacggatcgctatggacgtctgctcggtaccgtgtggcttggcgtgacggatgtgaatgccgaacagatacgcaaaggcttggcctag

SEQ ID NO: 32876 - DNA, 273 bp, Escherichia coli
gtgtttccgcgttccggaaaaccgtgggcaccggaagacctagatcttattcatccgattattgcagatattccggatgacagaatcgatgatcatatactctggctgtcgaagaaactgcagcgcaccccttatgccatcaccctgaaaattgtcagtgaaggacgtatgaacgaggaatgggctaaagaatggaagcctgccgcaaaatcaattcgtgaagattttgctttggtcagggcaaagacatctgctaacaatacaaataattaa

SEQ ID NO: 32877 - DNA, 393 bp, Escherichia coli
atgaagttgagttataagttggctatctctgctttcttctttactgtcattggctctttcatctggtcagcgaatcactactacagcaaatatcagcatgaaaagaaacgtgctgatgaggctgtacaaaatgctgaatcggcaactgccattaccaataacgtcctgcaatcaatacaaatcgtaaatacagttctggaggctaaccagcatgcaaaacagcagatcgcactggagtcacagagaacccaggaagatatcaaagtggctgttgagaatgatgattgcgcttcccgtcttgttcctgctcgtgcaactgagcggctgcgccggtacgcggacaatttacgtgccagttccggcggtaccactaccggcgaacctgaccgctga

SEQ ID NO: 32878 - DNA, 393 bp, Escherichia coli
atgaaacatagaagaatcgttattagcggagattgcctgtatgaagttattgggctggcaatgcttctcgatgcagagggttatgatgtcagcttgcgccgagaggtagaactgaagtcagaggatgttctgttaattgcattaagcgctgagccgttacttaactggttgagcctattgacagagttctttcgtacagaagatatgcatcgaggccatacccttattcttgtacctagtcttcttagaaatattcagaaaatgttttccaggatacagataatagacggaactctcccggtggctgaattgaaaaagaacattattgaacagataaaagtgaaacgagatgtgctggtctctcgcgcatatgagcgattatgtctttcctga

SEQ ID NO: 32879 - DNA, 504 bp, Escherichia coli
atgcgtaaacttccaatcgctattctggctgcagcagcattttcagctaatgctttcgctgtaaccttaactggaccttctgttgacgtagatgcgtctgtaaatgttactgctccgactagcattaccgcatcatggacaccagttacaggtctggtagctggtgtacagtcagatcgtacggcaattggtaacctgagcgtagctaatcttggcagcaatgatggctgggcagtattcacgaatgctggtggtgattctgtctttgaaggtaatgctagccactatattttccgaaacactgatggcacctccgtcaaagctcacgtaagcatcagtgactatgctggtgttactcatggtcagggcactggcattggtaaaggtccgtctaccttcatccctgctcagcactccaatgtcaacttcctcctgactggtgatcagcagatgaatgccggtacttaccgcgcaactctgtcagtatctgcattcaacaactaa

SEQ ID NO: 32880 - DNA, 2457 bp, Escherichia coli
atgaaacaatcaagtaaaaaaatggtaaaactgacgaggattgttattctatgcttattaggtggctatagtacatatggttttgcaaagggtaagtataatttcaacccatcgctactgaacaccactgatagcgaagttgatttaagttacttttcagaagacaaaccagttcctggagtatacattgtagacatttatgtaaataacatttacataaaaacagaaagtgttgagtttgcagaatctaaagaagaggaaagcacgttaacaccttgcttaacttacaaaacattattatcacttgggataaagccaaaccttcttaaggaaggtaaaaacctatgtgagctaacccagaatgctaaacaatggacattcaaccacaatgtataccagcagtctctttatattaaaatacctgaaacacaactcaacaaaacaatagatgggatcgtgccaaaagaactgtgggatgatggcatttatgcagcttttataaatcataatacgaccgcttctgtgataaagaacaagcatagcggttatgagcaaaagtatgcacatttagatttattgtctggtataaacttaggatcatggagattaaggaacgttacgtaccttgactattcgaactcaacaggctccaagtggagaaacataaataattatgttgaaagaaatttaaaagagattgatagcaaacttatacttggggattttataacaacatctgagatttttgaaggtgtaagtatgagaggggctacattaagcactgatgagtctatgataccttcaagagttaggaagaacacacctgcaatacgtggcgtagcaaatacacaagcgcaagtcgacgtaatgtacaatgactatataatatattcaaccactgtagagccgggggtgtttgagttaacagaggtaccatatgttagtggaaatggagtgtacaaagtaatagtaaaagagtccaacggaacgaagcgagagttttttgttccttttacaatcccacctatatcggttaaggagggcttcggtaaatataatttaagctatggccgcttcagagggagaggttccggtgtagtaggaccatatatttatcagggaacctatacctatggttttaccgataatttgactgtgtattctgggttacaatactctaacatttatgaggcatatgttatgggtgttggcataggtttaggggagttaggtgctttttcagtagatgggacctatgctagtgccgactttagcaaaaagaaagaaaaaaaagaaggaggggcagtaacattcaagtacaacaaaaatattgacaccaccaacactaacttatatttaacatcacatcaatatcgctcaaagaattaccgtacattaagtgaaacgtataattcgctatatcactctacatatgaaaaaaacacaacaaaaaacctaacaagcattggcttaactcaggaccttggggagtatggtggattaaggctttcatataattatgagcagtactgggatagtaagagttataaatacctagatacagcatattataaccattttaaaggcataaattactccataggttacaatgaacaaaagtatcacagtaaaaaagacagcgtctttacagttgctgtcaacataccattcagattttcaagcggagcgtcgatatcttccaattacagattcatggggaataatgataataatgaaacacatgttttaggtctggccgggtcgtcccctgacaactcattatcttggaatatcgatcaaagatacaacaacagagatagttacggtatgtcaggaaatattggcgtaagaaatcaatatggcaggtttggggttggaggaacaactaaccaggccgcgtcgtcatataatgtctatcatggtggaagcttactgcttactaaacatggcattactataggacaagaaattaaccaatcctctgttattttgacagccccaggagccagtaatactggtgttactaccagggctggtgttaaaacaaacagtaacgggaatgctatagtgtcaggattatcaccatacaaagagaacattgtatccttaaacccattagagctacctgatgatgttgaaatagcacaaaccgatataaaagtagtaccaacagcgggggctatagttgaaggtcgctttaaaacaaacatcggtagtaaagggttcttctatttaaggactagttctaacaaaccagttccatttggctctgtagtatcagtgaaaaacagcaatactacagctggtattgtgggtgaggatggtgaggtatttttaagtggtttaccagactcaggtgtgctggaagtcaaatggggaaaaaaccagtcagcttcttgtattgttgggtttgacaaatcaaatgttagcacaaatgaaaagctcatctgtcgataa

SEQ ID NO: 32881 - DNA, 765 bp, Escherichia coli
atgtttatttgtagaaagtatttacttactagtcttttggtggggggggcgttatctgccttcaacacttacgcagataataaaatctcaacgaatgttaaagagttttcactcagacttgatcgttcaagggttattcttgataaagaagcaaagggggcatttctaaccgtaaaaaatcctcatgcctatcctattcttgttcagagcagaataattgaggaggataaacaaacaaaaacaaacaaatttttaacaacaccacctctgtttcgtttgaatgaggggcagaatagcaagctgcgtgtatacagtaaagatatttcatcgttaccacaagatagagaatcattattttggctatgtactaaaggagttcctccaacagaagaagatgcatgggccgcagaaaatagtgaggcattaaaaaaatcaaaaaccacactaggtgtgaacctggctgttgagggttgcatcaaattaatttaccgcccaaaaggcatatcgactgttaattataacagcggcaatgaaatagaatggtctaaagaccatggggtattgaaagcatacaatcccacgcctaactatcaaaacataaagaaactgattatcaacaaaaaagaggttgaaagacctagttacattcccccttttagtgtgaaggaatacaaaattaacgcagttgataaaactgaagttgaatggagtgttgttacagacttaggtggagagggtaaagttcacaatgaaacaatcaagtaa

SEQ ID NO: 32882 - DNA, 123 bp, Escherichia coli
atgaataaaacacctgcaacactgctatttgctgtttcatctgcagcttgtgctgacattaatctgtatggtccgggagggcctcacacggctcttcaggaagctgctgcactgtacacataa

SEQ ID NO: 32883 - DNA, 213 bp, Escherichia coli
atgatgaattatcagatgacgctgaacgaactcgttactgccactgaactggccagagagaactaccgtcggcgtggtacgttgatatccagaatgctttatgaattctggtatgtactgctgggaacggaggctttcgatcaacagacgctgacgctccggtgtccgcttgctctggaggaaatgtaccgcctggcaattgacgcaccgtag

SEQ ID NO: 32884 - DNA, 732 bp, Escherichia coli
gtgaatgatatttgtatttatggtgggttgaagttagtgagcagcctgctggacaaactggaaatgcgacaacacgggaataccaccatgagcacaagtaacgtccatctcatcgtcacctgcacgcgccgcaaaaccgtggttgcaggtgatgcggtttttccggatgagcgcgatgccggcagggcttacggggtctggctggaaagactggcgcaggcccgtcgcggatcgccccccttgaccgccggcgaactgtatacaggccagcactggagcagggcagctgcagctgcagctgcggcgcgtagtggtgctgagatgtggattctatccgcaggcctagggttactgcatgtttctgatcccgtggtcccgtatgaagcgacgttctccacgatgccgttctgccatcgctcttactgggaacggctgacaacgcatccaccttcggaacgacggtgtacctccctgaagacgctgatgcaggcaatgcctgacgatcggtttgtggtggcggcctccccgctttatctgcgtgccgttgaaacagacctgctcgccggcaggaaagctctctgcaatcaggaacaactgacagtagtcacgtcaaaaggctatcagggaagcctgaagggcaataccaagtatacgagtgcagacatgatgaaggccctcaataccaatatgacaggcctcaatatcagttatgccctgcagctcattggctga

SEQ ID NO: 32885 - DNA, 810 bp, Escherichia coli
atgagcactattgaacgtgaacatacttctgatacgccattatctattaacataaaaaacgtcttggcacataaacacttaataatttttctagaccagtgcgatatgaaaatgcacgtaaatggtgagacgctattttttaaaaaaggctcccttgtatctatcgagaggggcttaagatacagctgtagcttaaaaaaatacaatgcagaaggccctccgtttagatacattgccatagaccaaaatacaataaagcttttaaatgatatgttgatgctattatatagatataaacttaatgaatcgatactggaaagaaaagtaaccgataaaataattggggcctggggggataaaggcgcaataagtatattcaatcttataacgaactcattggataacacaaagaaagctattaagattgcgtacatgctatctaaaatggaaaaacttgataagcttatgcattcaataaacatttcggcagctaagacattcacggacaaggtcagtgatattatcggtaaagatttatcaaaaaaatggcgcttgaataacattgccgatgagtttaatatttcagaaataactgtaagaaaaagacttgaatgcgaaaatacctcctttaataatgtactcatggatttaagaatgaacagggctatacaattgctgcacgaaaatgagaagcaaatgcatcagatatcaaggcttataggtgtttccagcccatcatattttattaaactatttaaggattattacggcgtaacacctaaacaatatattatatatttccgaagctaa

SEQ ID NO: 32886 - DNA, 825 bp, Escherichia coli
atgcataaagataaaacagtggaaatggttatagaaaaaattgagagaaggcttgatgaaaagttaagggtgaccgtgtctgatgttgcgagattctctggttatagtatacgtcatgttcaaaaaatgtttaaggaaattacggggttaaaaataagtgactatataaaaaaacgaagattaacacaagccgcactattaataaagctaaccaagaaaagtatagataatatttcttcagagttaaatttttctactcaacaatcatttacaagggccttcaaacgagaatttaacattacccctattaaattccgccaacaaaaatattttgactgttctgcttttacaccaagcttcacaaaatccccttatcaatatgccatgtacactactaatgttggagcgttaaagctaaatggtgaagagttcacaataaaagaaacatttctaaaaaaaacatcctcaagagctaatgatataagattgaaagaaatatcgaaaaagctgcaaaacaatgccagtgtttatatagttactaaatttcaagctaaaagtacatatgcatctgaagtatatctacaaacttttataggatgtaacgacagcaaagcaacttatgatataaacttggggaattgtttggctgtggattttagtgggctatgggatgattacgttatttttggtaggtttatccttttgtatattaatgtcaagtttgagcagtgtattattgaacggataagtctaggggaggttaatgttgataacaagcaaacctatcacataacagcattcctccccttggttttaaatgaataa

SEQ ID NO: 32887 - DNA, 780 bp, Escherichia coli
atgaaagaacatcaaagcattttagacctgaataatattgaagcgaagaagcattttctcaaaatggaaagctactttaactctgatttacccgcatactttgattttaatactttacttgacaaaatagcctatgaactgggtgagaactcaatcaatggaataatgagatctgataaaaaggtgtttgagtgtgatgaggttaactatacattactattgaataaagatggtaagttatcatggcgccccttgcaactcatacatccagtactttatgttaatcttgtaaacatcataacaaaaaaggaaaattgggaaaaaataacttcaagattcataaaatttcggtcaaacaatcagatagaatgcttaagtattccggttattggtaatgatgaaaaggataaagcggctcaagtttctgaatggtggcaaaaggtagaattaaggtcaatcgaactcgctcttaactatgagtatttatatgatactgatattactgattgctacggttcaatttatacgcactctcttgcatgggctatcgagacgagagaagtagccaaagaaaaaaaacgagataagaacctacttggtaatattatagactcagcaattcaaaatatgcaatgtggacaaactaacgggattccacaaggctctgtattaatggatttcattgctgaaatattacttggttatattgatgaatatcttaacagaacaactcaatacggcccatatcgtcaattacaaaatattaagatatcgcgatga

SEQ ID NO: 32888 - DNA, 333 bp, Escherichia coli
atggagtataataaaaagattgaagcacaaaatatttccgtgactcgatttaattctagaatagctgataatataggtctgggattagccagtacacttggaagtagtagtttacttaaaaatattagaccaattaatgcaacatactggactaagttggaacggaataaattaacaattaaaattgataatttactccatacaagatttcgtacctttaatgatgagtatatgatcgtaccgttaagtgctggaaatcacacaatatacatcaatattatatgtgaagaatatgagaaaaccgacactcgcgttatagaattaaatatttaa

SEQ ID NO: 32889 - DNA, 438 bp, Escherichia coli; identical to SEQ ID NO: 31671

SEQ ID NO: 32890 - DNA, 1029 bp, Escherichia coli
atggatttattagctgagagtattactgaagtcgctgtctctggggaaattgctaacaccgatcgtgtgttaaatatcgcttacggtattgaccgcaactttttatttggtgcggcagtatctatgcaatcagttgttatgcataacccggaccttgcggttaagtttcatctctttactgactacattgatgaagattatctacaacgtgttaatgcttttaccagcaaaaatgctaacgttgaagtaagaatttataaagtatccagtgcctttattgatatcttccccagcctgaaacagtggtcttatgcaacattcttccgtttagttgcgttccagtatctgagtgaaactattgaaaatctgttatatatcgatgctgatgtcatctgtaaaggctcattagctggattgcttgatattaattttgatggtgataagttcgcggctgttattaaagatgtgccttttatgcaggaaaaaccagcgaagcgtctggctatagagggacttccagggaattatttcaacgccggtgtagtatatctgcagcttgaagcatgggcgaaaaatgattttatgaataaagccattgctatgctggcaagtgacccgcagcacacgaaatataaatgccttgatcaggatattttaaatattctgttctttagtcattgtatttttattagcggcgattatgattgcttttatggcattgactatgagttaaaaaataaaagcgatgaagattataaaaagaccattaccgatgatactaagctgattcattatgttggcgtaacgaagccctggaacgactggacgaattatccctgccagaagtattttaatgaggcttatcaggtttcttgctggaatgatgtggcgtttattccagccacgaatgaaaagcagtatcaagtgaaataccaacatgcaaagaaaaatggtgatacgtttaacgcttttatttacttcattaaattcaaattaaataagtataaaagaaaactatttaggcaataa

SEQ ID NO: 32891 - DNA, 531 bp, Escherichia coli
atgatttcggggttagacaaaagatctcaaagacggatgagagagatcgatttagagcgcgctaaagaggcccaggaacggcgtgaagaccaaaagaacagtaagttcacccaagtatccccaaagggctgggaacgcattagagagctttctaaggacaaacagggtgtagctgcaatcgcgctgtactcatttttagctgagcacatcgatccaacgtgtggggctgtcgttgctgaacaacagtttttggctgacaaactgaacgttagcaggagcacgatcaagcgttggttaaactaccttgaggccaaaaatgcggtagtaagaatcccagttgccggcaacgtctgcgcctatgcgctagacccccatgaggtttggaagggttacaactccagcaaaggctatgcagcattcgtaagcaaaacgttggttaacgttgacggtgatgtacagcgccgaatcgttgccatgttcaaagggcaggaaggcgacgctaaagaccaatgcgacctgcctttagagtga

SEQ ID NO: 32892 - DNA, 321 bp, Escherichia coli
atgaaagttatatgtgataatcgttatttccttattgggatcaacaaaacaattgaagatgtcatccagaaaaataaaattaatggcgtaaaaaatattattataatatcatcccctaaaacgtcagatgttttttgttttttacagttcaataacattgattttaggtgttcggataccattttttatgctccccctgaaacctttgattttctcagggatattatccacgcccctatttgcaatataaaggatttaactaaaaacaatccacttaataacacctgtctcttatacacatctgacgctgccgacgaatag

SEQ ID NO: 32893 - DNA, 447 bp, Escherichia coli
atgtatgcagaaaaacctattcttctatatcaagctggattggagaacaaaataggtattcaaaaatttgatcttacatctttagagtttaaacatagagatgagataggttatgtttgcactagtctttctgattttgaaccatccataattcactgtctcaataactgtcaagatattgtattaagagcatcaaatcttcgtgaaaaacttttttacgtagataaagaggtaaatgcttcacagctatgtattaactatataaaaaaactatataatgggttaattccgccactaacacaaacgcagttctatgttagagagactgtgcaagagcttcgaacatgtaagccaaagctgaataaacttgaaaaatccattaagaataaaaaactaccattttacagaaaagcgaaaaatttgttttctagaaaattaaaagtataa

SEQ ID NO: 32894 - DNA, 147 bp, Escherichia coli
atgtccagaatcaataaattcgtacttacagtcagtctgctgatttttatcatgatttcagcagttgcctgcgggatctacactcaaatggtaaaggaacgggtgtatggcctgaaacagtccgttattgatactgcttttgggtaa

SEQ ID NO: 32895 - DNA, 1503 bp, Escherichia coli
atgaatatcagaaaactgttttgtccgggcaatacaccccggattttattgtttttattcttttttgttgtttctgtcataaccacaattgcatgcggatacactgagaagaatgccaccgggaatgtgttgctgctgttccttcttctgctccttgcacacagaaataccctcacatccattacagcgctgttatttctgttctgttgtgcactgtatgcgcctgccggtatgacgtacggtaaaatcaacaacagttttattgtcgcgttgttgcagaccacaactgatgaggcagcggagtttaccgggatgattcctgtttatcattttctggtcagtgccgcgattcaggtattcatggtgattttctggcgaacacaccgccgtggtcaccgtaactggctggcactgctgctgttcgtattatgctcagtaaacagctggccgttgcggatggttaaaggaactgttgtggggacaactgacacattgcgtgaaatgcagcgttataaacaactgaatcagcacggggctgacaactggaaaatcctgccgggtgtaccgttgtatgacacgattgttatcgtcactggtgagagtgtgcgcagggattatatgtcggtatatggctatcctgtgccaaccacaccgtggctgaatacagctcccggtttatttattgacggctatacatcgacagcagccagcaccgtgccctccctgagccggacactgatttatgactatgagcagaaccctgactccggcaacaacgtggtggcgctggcagcaaaagcaggatacagcacatggtggatatccaatcagggaaaactgggggagcatgatacacgcatctctgttattgcttctgatgcggagcataccgttttcctcaagaaaggcagctttgcttcccgtaaaacggatgacatgttgttgttacaggaaacagaacgtgcactggcggataaatcctctccgaaggtgatattcctgcacatgatggggtctcatccgaacccgtgtgaccggcttcactcctggccgaataattaccaggagcggttcccccggaagattgcctgttacctcgccagcatcagtaaactggataactttctcgggcagcttgatggtatccttcgccggcattcccgtcattttgccatgctttacttttctgaccatggtctgtcggtcagcgacagtgctaatcctgttcatcatgatggtcatgtgcagggaggctacagcgttcccctgattattaccgccagtgacatcacgtctcatcagtctgtcagcagaaaaatcagtgcccgtcatttcgcaggtatttttcagtggctgaccggcattcgtactgaaaatataccgccattcaatccgctgacagacgaagataatgaactcattatggtttttaacggagacaagaatgtaccgacagacagccttgagtcacagcctctgattcttccgggcaagggaaaataa

SEQ ID NO: 32896 - DNA, 747 bp, Escherichia coli; identical to SEQ ID NO: 9146

SEQ ID NO: 32897 - DNA, 1011 bp, Escherichia coli
atgaaaaaatggttcccagctttgttattttccttgtgtgtgtctggtgagtcctctgcatggaataatattgtcttttactcccttggaaacgttaactcttatcagggagggaatgtggtgattactcaaaggccacaatttataacttcgtggcgcccgggcattgctacggtaacctggaatcagtgtaatggtcctgggtttgctgatggttcctgggcttactacagggagtatattgcgtgggtagtattccccaaaaaggttatgaccaaaaatggatatcccttatttattgaggttcataataaaggtagctggagtgaggagaatactggtgacaatgacagctatttttttctcaaggggtataagtgggatgagcgggcctttgatgcaggtaatttgtgtcagaaaccaggagaaacaacccgtctgactgagaaatttgacgatattatttttaaagtcgccctacctgcagatcttcctttaggggattattctgttacaattccatacacttccggcatgcagcgtcatttcgcgagttacttgggggcccgttttaaaatcccatacaatgtggccaaaactctcccaagagagaatgaaatgttattcttatttaagaatatcggcggatgccgtccttctgcacagtctctggaaataaagcatggtgatctgtctattaatagcgctaataatcattatgcggctcagactctttctgtgtcttgcgatgtgcctgcaaatattcgttttatgctgttaagaaatacaactccgacatacagccatggtaagaaattttcggttggtctggggcatggctgggactccattgtttcagttaacggggtggacacaggagagacaacgatgagatggtacaaagcaggtacacaaaacctgaccatcggcagtcgcctctatggtgaatcttcaaagatacaaccaggagtactatctggttcagcaacgctgctcatgatattgccataa

SEQ ID NO: 32898 - DNA, 528 bp, Escherichia coli; identical to SEQ ID NO: 8015

SEQ ID NO: 32899 - DNA, 222 bp, Escherichia coli; identical to SEQ ID NO: 8358

SEQ ID NO: 32900 - DNA, 426 bp, Escherichia coli
atgcaatatgcgaaacctgtcactctgaatgttgaagagtgcgaccgtctctcctttctgccgtatctgtttggcaacgattttctgtatgccgaggcgtatgtgtacgcgctggcgcaaaaaatgatgccggaatatcagggaggcttctggcacttcatccgcctgccggacggtggcggttacatgatgccggatggcgaccgtttccacatggtgaacggtgcaaactggtttgaccgtaccgtgagtgctgatgccgcaggcatcatcctgacctcccttgtgattaaccgccagttgtggctgtaccacgacagcggggatgcaggactgaccctgctttaccggatgcgcgatgcgcagttgtggcgtcacatcgaatttcaccccgaatgcaacgcgatttacgcggctctggactga

SEQ ID NO: 32901 - DNA, 423 bp, Escherichia coli; identical to SEQ ID NO: 8332

SEQ ID NO: 32902 - DNA, 192 bp, Escherichia coli; identical to SEQ ID NO: 14879

SEQ ID NO: 32903 - DNA, 231 bp, Escherichia coli; identical to SEQ ID NO: 7907

SEQ ID NO: 32904 - DNA, 1362 bp, Escherichia coli; identical to SEQ ID NO: 21162

SEQ ID NO: 32905 - DNA, 165 bp, Escherichia coli
atgacacagggccggcgggaggataaatgcctgtctgcccgcgccgggaaaaaacgcgcgccggtggcgctgaaaggggccgcgctcacgcgccgcccctttcattacgcggacgttctgatgggggcttctgtttcttcatgcctgtcatttgtctgttactga

SEQ ID NO: 32906 - DNA, 177 bp, Escherichia coli
atgatgattatgtctgtagcaatggtaatactttgtattatgttgggaggttttatgatccgtagctgtactggaaaaacaaactcttcaagcgaagcaaagcaagcaatatcagaagttagaaaaatgatagataaaaaagcattgattaaatacaaaaggaataatagaacatga

SEQ ID NO: 32907 - DNA, 375 bp, Escherichia coli
atgaatgatgatttaggttttataaataacatagatgggaaaattttatttgagcattatcaatatttaactaatgccatactgggtgatgatgacacaaaaaaagaatttgtgaaatatgaacattatgacttggattatttaaggtattatcttgaagcgagtatctattttttaggtgaggcaagagatgaagcaaatagagatgttgaaataaaagatttaaacgaagcagtggagataataaataaattatcaaatagggctaaggttgctttagctgaacatattatattgtggtttgaaaatatttcattggtaggttcttataatacactatttagatttttaggcagggagaaaagaatattatga

SEQ ID NO: 32908 - DNA, 1209 bp, Escherichia coli; identical to SEQ ID NO: 28707

SEQ ID NO: 32909 - DNA, 243 bp, Escherichia coli
atgtctgcaatcacagtctcccgtccggaagtggccaacgggcatacggacgttatctgctcaaccagtatccgccacattctggctgtacgaaagagtacactgctgcaaatcgacacacttatccggcaactggctgaaatctcatcaatgacagaaagtattggcggtaaaaccgcactggactgggccatgaaacaggattttcgctgtggttgctggctgactgagaaaccgcaatga

SEQ ID NO: 32910 - DNA, 402 bp, Escherichia coli
atggtggcgatcccgctgctgttcgggcgcttaacggcggcagattacgaggacaacgttgcgcaagataaacgcatcgacgccctgcgcgagaagatcaattgctttgaagatccggcgtttaccgctgactaccacgacccggaaaaacgcgccatcgccaatgccataacccttgagttcaccgacggcacgcgatttgaagaagtggtggtggagtacccaattggtcatgctcgccgccgtcaggatggcattccgaagctggtcgataaattcaaaatcaatctcgcgcgccagttcccgactcgccagcagcagcgcattctggaggtttctctcgacagaactcgcctggaacagatgccggtcaatgagtatctcgacctgtacgtcatttaa

SEQ ID NO: 32911 - DNA, 1170 bp, Escherichia coli
atggctaagggtgatattaaaaagttgaagtttgaatctttctacgatagtgaatcgaataacgaagttattcgattaacgccaacagatattctttgccatcgcaattatttttatcaaaaatgttttacaaatgatggtaaaaaattgattttcgctgctgagtttgattgtaaccggaattattatcttatggatttggtaactcagacagcgaaacaactcactgaaggagctggagataacacctttggtggcttcctgtcccctgatgataattatcttttttatgtgaagaatgaaaaacatttgcagcgtgttgatttgaccacattagaagaagttaccatatacacagtaccggataattgggtggggtacggaacatgggttgctaatactgattgtacggaaatcgtcggaatcgaaatcagtaaaactgactggaccccgcttagcgactggaaaatatttctggaattttatcataagaatccacgatgccgtttaattacgattgatctggaaaccggaaacgctgaagtgatattggatcgtaatacttggttagggcatccaatttttcgtccgaataataacgatactatcgccttttgccacgaagggccccatgacctggtggatgcaagaatgtggatgattaaccgtgatgggacaaatgagcgtaaagtgcatgagcaccaacctggtgaaagttgcacacacgagttctggatccctgatggatctgcactggcttatgtttcctatatgaaaggacagcaacagcgttatattcgcaaatataatcctgatactgatgaagattcattagtgatggaaatgccggcatgttcccatttaatgagtaaccataatggtattctctatgttggtgatggttcaggtagtccggttgatgttaaagatacctgcagttataaaattgaaaatgatccctggatttacattcttagcagtaaaaataaaaaaatacataaattggtgaaacataatagttcctggagggtactgaaaggagaccggcaggtaacgcacccgcatccatcattttctccagataataagtacgttttatattcttgcgatgccgaaggtgaaccagcactatatatggctaaaatccctgaggaaatcttaacccagtaa

SEQ ID NO: 32912 - DNA, 960 bp, Escherichia coli
ttgcggaaattgatatattcacaacgtcatattgcaatttctgcaacgtcaacattaagggctgcgccattggatttacgcgatctgaaaaccttcctgcatctggcggaaagccgccattttggccgcagcgcgcgggcaatgcacgttagcccgtccacgctctctcggcagattcagcgcctggaagacgatctcggtcagccgctgtttgtgcgcgataaccgcacggtaacgctaaccgaagcaggcgaagaactgcgcgttttcgcccagcaaacgctgttgcagtatcaacagctgcgccacaccatcgatcagcaaggaccgtcgctctctggcgaattacatatcttctgctcggtgaccgctgcctacagccatctgccgccgattctcgatcgcttccgcgcggaacacccgtcggtggagattaaactcacgactggtgatgcggcagatgcgatggaaaaggtcgtcactggcgaagcggatctggcgattgccgggaaaccggagactctgcccggcgcagtggcgttttcgatgctggagaatctggcagtagtgctgattgcccccgcgctaccctgcccggtgcgtaaccaagtttcggcagataagccggactggtctacagtgccgtttatcatggccgatcagggaccagtacgccggcgcattgagttgtggtttcgacgcaacaaaatcagcaacccgatgatttacgccacggtcggcgggcatgaagcgatggtgtcgatggtggcgctcggctgtggcgtagccttgttgccggaagtggtgctggaaaacagcccggaaccggtgcgtaaccgcgtgatgattttagagcgcagtgatgagaaaacgccgtttgaactgggcgtgtgtgtgcagaaaaagcggctacatgagccgctgattgaggcattctggaagattttgccgaaccattaa

SEQ ID NO: 32913 - DNA, 528 bp, Escherichia coli
ttgctggcggtaaccatcccggaagagaagggcagcttcctgaagttctgccagctgcttggcgggcgctcggtcaccgagttcaactaccgttttgccgatgccaaaaacgcctgcatctttgtcggtgtgcgcctgagccgtggcctcgaagagcgcaaagaaattttgcagatgctcaacgatggcggctacagcgtagtggatctctccgacgacgaaatggcgaagctgcatgtgcgctatatggtcggcgggcgtccgtcgcatccgttgcaggaacgcctctacagcttcgaattcccggaatcgccgggcgcgctgttgcgcttcctcaacacgctgggtacgcactggaacatttctttgttccactatcgcagccatggcaccgactacgggcgcgtactggcggcgttcgaacttggcgaccatgaaccggatttcgaaacccggttgaatgagttgggttacgattgccacgacgaaaccaataacccggcgttcaggttctttttggcgggttaa

SEQ ID NO: 32914 - DNA, 153 bp, Escherichia coli
gtgcaaatagttgtcaaccctggtgttatcacagttgttttatatatcagtgaaataatttctatggcaactgttgataattttgatgtcgaagagttatttgttaaacaaaatagttaccccaaagtgatcaatgtcatgaaaataagctaa

SEQ ID NO: 32915 - DNA, 1302 bp, Escherichia coli
atgatcatgatgaccatgcacttcatcaaagatgaaaatggcaaaccgcaggtgccgttccacaccgtttacatgaccggcctgattcgtgatgacgaaggccagaagatgtccaaatccaaaggtaacgtgattgacccactggatatggttgacggtatttcgctgccggaactgctggaaaaacgtaccggcaatatgatgcagccgcagctggcggacaaaatccgtaagcgcaccgagaagcagttcccgaacggcattgagccgcacggtactgacgcgctgcgcttcaccctggcggcgctggcttctaccggtcgtgacatcaactgggatatgaagcgtctggaaggctaccgtaacttctgtaacaagctgtggaacgccagccgctttgtgctgatgaacacagaaggtcaggattgcggctttaacggcggtgaaatgacgctgtcgctggcggatcgctggattctggcggagttcaaccagaccatcaaagcgtaccgcgaagcgctggacagcttccgcttcgatatcgccgcaggcattctgtatgaattcacctggaaccagttctgtgactggtatctggagctgaccaagccggtaatgaacggtggaactgaagccgaactgcgtggcactcgccatacgctggtgaccgtgctggaaggtctgctgcgcctcgcgcatccgatcattccgttcatcaccgaaaccatctggcagcgtgtgaaagtactttgcggtatcactgccgacaccatcatgctgcagccgttcccgcagtacgatgcgtctcaggttgatgaagccgcactggccgacaccgagtggctgaaacaggcgatcgttgctgtacgtaacatccgtgcagaaatgaacatcgcaccgggtaaaccgctggagctgctgctgcgtggttgcagcgcggatgcagaacgtcgcgtaaatgaaaaccgtggcttcctgcaaacgctggcgcgtctggaaagcatcaccgtgctgcctgctgatgataaaggtccggtttccgttacaaagatcgtcgacggcgcagaactgctgatcccgatggcaggcctcatcaacaaagaagatgagctggcacgtctggcgaaagaagtggcgaagatcgaaggcgaaatcagccgtattgagaacaagctggcgaacgaaggctttgtcgcccgcgcaccggaagcggtcatcgcgaaagagcgtgagaagctggaaggctacgcagaagcgaaagcgaagctgattgaacagcaggctgttatcgccgcgctgtaa

SEQ ID NO: 32916 - DNA, 1281 bp, Escherichia coli
  misc_feature (10)..(28): n is a, c, g, or t
  misc_feature (1233)..(1242): n is a, c, g, or t
atgcaaaggnnnnnnnnnnnnnnnnnnncgcatatcttccagcgtaatacccagggaatatgggcttgtgttgataaagattgcagattaaagcacggtacaccgctcgacaaaggctggccctttggctatgtgtatgtgaaccagcgacaaaattgtgactgtggaagccctgtatacgaagttgcattctgtaatgattgtaatgagcctcatcttctggcacgggacaaaaagggcaaactagtccagtgggaaaataaaggtggcgatgaattctctttgcaggatgaagtacctgttgaacatgacgctacagaagaaaaagtcgaaaaagagaacagttttcagcctccgttgattattgccgcaggagagaccagcgaggcaggttataccctacaacgcctcgaccgtcagacgcgccgtattggcgttattaacaatgacagcattccgctgattattaatgatattgaacaggtttgtagtgccagtggctgtggctacagaggcatgagtgggaaacagcccttccggcgtgcactattaggtgggccattttacgttactaatatcgtgcccaccgttctagagtattgtcaggactttaccagtgatgaaggcaaagagggcgtcggaccagattcgttgccaggacgaggtcgtcgactcatcacctttacagacagtcgacaagggacagcccgaatggcggtgcgtatgcagcaagaagcagaacgcagtcgcttacgcggaagcgtagtcgaaattctcagctggcatcaaaggacgcaaacgtctacagcgccgaatgccaatgccgatctggaaaaattagcggccagggcgaagcaagcccgtgagcaggcagaagaatatcgaagctggggaatgccagaccaggcgaaattgtcacaagcacaggctgaacagcttgaacaggcttatcaggctgcaaccggtgggaaagccgcgactatcctggtatcccgaacctggacggagatggttaacgagcttaaagagagagccgatatccgcgggccggttctgcaatataaccattatcttaagcctgaagtgtttaatgaaaacggcagcccccttaagctttctgaaatgttgttgttccgggaattcatgcgtcgccctaaacggactaacagcctggaaacacaggggctggttcaggttggttaccaggggctggagaaaatacataagagcccnnnnnnnnnnccccttgcactggcaggaaaaaggattaacgctggatga

SEQ ID NO: 32917 - DNA, 465 bp, Escherichia coli
atgcaggagatggctcctcaggcaggcattaacctgatgccggtaacagatatcggcccggaaaccgccatcctgctgaaagagaagctggataacggcgaatgggtggcgattgtcggtgaccgcatcgccgtcaacccgcaacgcggcggcgactggcgcgtctgctggagtccgtttatgggccagcctgcgcctttcccacaggggccgtttattctcgcgtctattttgcgctgcccggtgaatctgattttcgccctacgccagcacggcaagctgcatattcactgcgaaacctttgccgacccgctgctgttgccgcgtggcgaacgccaacaggcgctgcaaaacgctatcgaccactacgccgcgcgtctggaacattacgcgctccagtcgcccctcgactggtttaattttttcgatttctggcaactgccggaaattcaggacaaggagtaa

SEQ ID NO: 32918 - DNA, 1959 bp, Escherichia coli
gtggtgaatcaggacggcttactggatgtgagcggcggcggtcacggcattgatatcactggtgatagcgccactgtaatcaataaaggcaatataactgtcacggataaagattcggttggtgtgctgattaacggtgatcgagcgacctttgccaatacgggtcatattgacgtcaataattcagctactggcatgagcatcacgaccagcgagggggccatctcccaggcaggtagcatgaatgttggtgacttttcaacaggcatggcgctcagtggtaataacaacagtgtgacgttggcggcgaaagatctgaacgttatcgggcagaaggcaacgggcgtcaacatctctggtgacaataatgccgttgatatcactggtaacattttggtagataaagatcaaaccgcgactaacgcggtagattatttttacgaaccgtctattggtgtgaacgttagcggcaacagtaacactgtatcgctagacggcaagttaactgtggtggctgacagtgaacttacctcacgtatttatgctgactttgatggaagccaggagaatatttccgggcttgtcgtatctggtgatgataataccgtgtatctgaatggtggtatccagctggttggtgaagaaaatcaattgactgatggttctaccgtcgcatcaaatcgcaatggctatggcaaaacaccagtaatcactgttgatgggaagtcgtctgtttacctgaacggggactccacgattaatggtgatttacctctagcctattcagggatgattcggttgaagaatagcgccatgattgagatcggggcggatgccacgattaacatgcaggtagatatttatgaccactatgcgagatctgaatcccaaatgatctttgtagagtctggtgctgagttagtcaataaaggtgatattgatactcgaaatatcggttttgccgctatttctggtgaaaattcaacgggaagtaacagtggcaatattacgctttctcagtacaactatggcttgttagcaaatgcaggagttggctatttcacgactaaaggcggtagtgcggttaataatggtacgattactgcgaaagtcatggaacaagaaagtgtcattaatttgggggcgtctctgggtctgaatgaggcgaacactttctactctgatgcgaacagtatgatggggcttgatgcctttgatcacggatacgtgtccaatgaaagcggtggcagcattgagatgtatggtcgcggcaacgttggtatgttggctattgatgagagtacagcagaaaacgctgggcaaattacactggatgccctgtgggttgatgcagatgataccaccactttgcgtagcaatattggtaatgatgccaggagctatggcgttggtatggccgtaggtacaaatacttacagtgggccaagaaaaaatgctacggccgttaataaacagggtggtgtaataacggtttataatgctggaataggtatggccgcctacggtgccagcaataccgtgattaacgagggtatcatcaatctggagaaaaacgctaactacgatagtagtctgggagcagattctctgatcggtatggccgcctataagagtggtactgccattaatgaacagtctggcgtaattaatatcaatgctgacaatgggcaggcgttttatagtgatggatccggtactattcttaactatggaacgatttgtgttaacactaattgcctgacgggcaatgactataatgagactgactcttatacctcgttactttacacgggtggcgatgtaatcactgcgcagaatgaaacacaaaatctgacccaaaaagcctcgattaacgacaaaaaagaaggcaatgttgttaacagtggttcgctttccggtgctgatattgcgattagggtaatgactccaacttactga

SEQ ID NO: 32919 - DNA, 231 bp, Escherichia coli
atgaacccagccatcaaaacagcgatcaatatcgttggttcacaaaagaaactaggcgctgcctgcgaagtttcacagcaggccgtctataagtggcttcacaacaaagcaaaggtatcccctgaacatgtcggcagcattgttacggctactggtggagtagtgaaggcataccagattcgcccggatcttccgaagttgtttccacacactgaaaagaacgcagcttaa

SEQ ID NO: 32920 - DNA, 540 bp, Escherichia coli
atgcaaccacttacataccaacagactagcggatttagcccgactgcggtgataaatcgttctcaaacaaaacaagctccaggccacgaaaaaatccgtgatgccgtccgcgcctggtcggctgtagataatcaggatgtcgttgccgcactcattgtgaatgagtatcgggagcagggcggcggcaccatcgatttccctgatgatgtcagccgtgcacgccagaagatgttccgcttcctcgataacaaattcgattctgaaaaataccgaaataacgtgcgtgaactgaccccggcaattctggcggtactaccgctggaatatcgcggttacctagttgagcaggatagcttcatggctcggctggctgaaatggaaaaggaactcagtgaggcaaagcaggcggtcattctcaacgcaccacgccaccagaaactgaaggagatgagtgaaggcattgtgtcgatgtttcgagtggacccggatctggctggtccactgatggcgatggtcaccaccatgctgggggcaatatga

SEQ ID NO: 32921 - DNA, 303 bp, Escherichia coli
atgacgggcaaagaggcaattattcattacttggggactcataagaacttctgtgcgcaggacgttgccgcggtaacaggcgcaaccgtaaccagcataaatcaggctgcggctaaaatggcgcgggcaggaatcctggtcgttgatggtaaggtctggcgaacggtgtattatcggttcgctaccagagaagaatgggaaggaaaggtgagcacgaatttgatttttaaggagtgtcgccagagtgccgcgatgaaacgggtattgagggtatataaaagaacatcaatgggtacacaatga

SEQ ID NO: 32922 - DNA, 333 bp, Escherichia coli
atgaatccttatatttatcttggtggtgcaatacttgcagaggtcattggtacaaccttaatgaagttttcagaaggttttacacggttatggccatctgttggtacaattatttgttattgtgcatcattctggttattagctcagacgctggcttatattcctacagggattgcttatgctatctggtcaggagtcggtattgtcctgattagcttactatcatggggatttttcggccaacggttggacctgccagccattataggcatgatgttgatttgtgccggtgtgttggttattaatttattgtcacgaagcacaccacattaa

SEQ ID NO: 32923 - DNA, 1527 bp, Escherichia coli
atgaaaaaagccatagcatatatgcgattttcatcaccaggtcagatgtctggtgattcattaaaccgccagagaaggcttattactgaatggctaaaggtaaatagtgattattaccttgataccgtaacgtatgaagatttggggttaagcgcattcaatggaaagcatgcacaatcaggagctttttcggaatttttagatgctatagaacatggttatatattgccagggactacattgttagttgaaagtctggacagactttcaagagaaaaagtcggtgaagcgattgagcgtctgaaattgattttgaatcacggtattgatgttataactctttgcgataatacaatctataatattgactcattgaatgagccatattcattaataaaagccatacttatagcacaaagggcaaatgaagaaagcgagataaagtcaagtcgggttaaattatcatggaagaaaaaacggcaggatgcactggagtcaggcacgattatgacggcttcttgtccgagatggctctcattggatgacaaaagaacggcttttgttccagaccccgacagggtgaaaactattgagctaatttttaaactcaggatggaaaggcgctcattgaatgcaatagccaagtatttaaatgatcatgctgtaaagaatttctcaggaaaagaaagtgcatggggaccttctgtaattgaaaaattattagcgaataaagctctgataggtatatgcgtaccttcatatcgtgcaagaggcaaagggataagtgaaatcgctggctattatcccagagtcatatcagatgatttgttttacgctgtacaggaaattcggttggcaccttttggtattagcaatagtagcaagaatcctatgctaataaatctacttcgaacagttatgaagtgtgaggcttgtggtaataccatgattgttcatgcggtatctggaagtttgcatggctattatgtttgtccgatgagaagattacatcgatgtgacagaccatcaataaaaagagatttggttgattataatatcattaatgaattgctttttaattgtagcaaaattcaaccagttgaaaacaagaaagatgctaatgaaactttagagttaaaaattattgagcttcagatgaaaattaataatttaatcgttgcattgtctgtcgcgcctgaagttaccgctatagcagagaaaataagactattagataaggaattacgaagggcttcggtatcattaaaaactttgaagagtaaagggatgagttcacttggtgattttcatgctattgatttaaccagtaaaaatgggcgagagctatgtcgtacacttgcctataaaatattcgaaaaaattataattaatacagataataaaacctgtgatatctattttatgaatggcattgtttttaaacactatcctttaatgaaagtaatatccgcccagcaggcgataagtactcttaaatatatggttgatggtgagatttatttttga

SEQ ID NO: 32924 - DNA, 1044 bp, Escherichia coli
atgaaaattaacaagatattatcatctgcaacactattgtatggtatgtcaatggccatgtcggtcgggagttgtgcaacacctgtccagactaatcttcctggttacaccccgggtgcagatatcattagtgtttcacccaccagaaaccaggtcgatctcattggtgatgttgtttattcccagataaaaggaactcgttctgtcagacagcttcacatgtcagttcttgtcccgcgaacaaatgatttaaaaccagccattatttattatcccggcggcggattcatgtcttctgaacatgacaaatttattgaaatgagaatggctctggctgaagctggttttgttgtggccgctgtagaatacagaacaattcctgatacatttccagcaccagttgaggatgggaaagctgcaatacgttacttgagagaacatgccagcgattatgggattgatcctcaaagaatcggagttctgggtgactctgccggtggatggcttgcccagatgatgggaactacaaatggtgacaaaacctttaataaaggtgactttcttcagcaatcagcagatgttcaggcagttgccacactttatgggatttctgacttgttgaatattggcgaggggttccctgaatcagtgcaggaggttcatcgatctcctgccgtaaccgaagccttaatgatcaatggccctgcattcagaagttttgcgggagcccccataacagcgtcaaaagaaaaagcgctaaacgccagtccaatcggacatatgaaaggagtaaaacccccatttcttattatgcatggtagcaaagacactctggtttcacctgagcaaagcgccaaactattcaggatgttgaagaagaacggcgataacgctgagtacgttctggtagaaggggctgagcatggcgataatacatggtatcagccaattattataaacagagttgttgagtggtttactaaaaacctgggaacccccataaaaaccgctacccaacaacaaaaaacaaacgctgacctgtaa

SEQ ID NO: 32925 - DNA, 456 bp, Escherichia coli
gtgaacctcccacaagatggcatcaaattgcatcgcggcaacttcaccgctttcggccagcagatccagccttatctggaggacggaaaatgctttcgcatggtgcttaaaccgtggcgtgagaaacgcagtctttcccagaatgcactcagccatatgtggtacagcgaaatcagtgaatacctcatcagcagggggaaatcgttcgctaccgcagcatgggtaaaagatgctctcaaacacacatacctcggttatgaaaccaaggacctggttgatgtcgtaaccggcgaaatcactactatccagtcgttacgccatacctccgatcttgataccggagagatgtatgtcttcctgtgtaaggttgaagcttgggcgatgaatattggctgccacctgactattccgcagcgctgcgagttccagctgctgcgcgacaagcaggaggcgtaa

SEQ ID NO: 32926 - DNA, 171 bp, Escherichia coli
atggctacaccgcttattcgtatcatgaacggacacatctacaaagtaccaaatcgtcgtaagcgtaaacctgagctgaagccatccgaaataccaacactgctcgggtataccgccagcctggttgataaaaaatggttgcgactggcagcaaggaggaatcatggctga

SEQ ID NO: 32927 - DNA, 291 bp, Escherichia coli
atggctgatttgagaaaagcagcgcgtggtcgggaatgccaggtaagaatccctggcgtatgtaatggcaatcctgaaacgtcagtactggcacatatccggctggctggattgtgcggtaccggtatcaaaccgccagacctgattgccaccattgcatgttctgcctgccacgacgaaatcgaccgtcgcacgcattttgttgacgctggatatgcaaaagaatgcgcgctggaaggtatggcgagaacacaggttatctggttgaaagagggggttattgaggcgtga

SEQ ID NO: 32928 - DNA, 363 bp, Escherichia coli
gtgaatacctacagcatcacattaccttggcctccgagcaataatcgctattaccgccataatcgtgggcgcacgcacgtcagcgcagaggggcaggcatactgcgataacgtcgcccgaatcattaaaaacgcaatgctggatatcggcttggctatgccagtgaaaatccgtattgagtgccacatgccggatcgccgtcgccgtgacctggataatctgcaaaaagccgcttttgacgcactcaccaaagcaggtttctggctggatgatgttcaggtcgttgattaccgtgttgtgaagatgcccgttaccaaaggtgggaagctggagctgaccatcaccgaactgggagatgaatga

SEQ ID NO: 32929 - DNA, 2151 bp, Escherichia coli
atgctaacatttatctctggtgctgctttcgcggcaccagagataaatgttaagcaaaacgaatcgttacctgatttaggtagccaggcagcacaacaggatgaacaaaccaacaagggtaaatcgctgaaagagcgcggagccgattacgtcatcaactccgccacgcaagggtttgaaaacttgacccctgaggcgctggaatctcaggccagaagctatctgcaaagtcaaatcacctcaaccgcacaatcttatattgaagacacactctctccctacggtaaggtccgttcgaacctctccattggtcagggcggcgatctggatggcagttccatcgattattttgttccctggtacgataatcaaaccactgtttatttcagccaattttctgcgcaacgaaaagaagatcgtacgatcggaaatatagggcttggtgtaagacataattttgataaatggttattgggtggaaatatattttatgattatgattttacccgtggacatcgccgtttaggtataggcgctgaagcgtggactgattatttaaaattttctggtaactattatcatccgctttctgactggaaagactctgaagatttcgacttttatgaagaacgccctgcgagcggttgggatattcgtgccgaagcctggcttcccgcttatccgcagcttggcggtaaaatcgttttcgaacattattacggggatgaagttgcgctatttggtaccgacaatctagagaaagatcccttcgctgtcacgttaggcgtgaaataccagcctgttccgctcattgctgtaggtacggacttcaaagcaggaaccggtgataacaccgataccacggtcaacgcaacgcttaactaccagtttggcgtcccgctcaaagaccagcttgatcctgacaaagtgagcgcggctcactcactcatgggcagccgtcacgactttgttgaacgtaacaactttattgttctggaatataaagagaaagatcccctcgatgtcactttgtggctgaaagctgatgcgatgaatgaacatcccgagtgcgtgattaaagatacgccagaagaagctatcgggctggaaaaatgtaaatggaccattaacgcgcttgtcaaccaccactacaaaattgtcgctgcgtcatggcaggcgaaaaacaatgccgcccgcacgctggtgatgccggttatcaaagagaataccctgacagagggcaacaataaccactggaacctggtgctgcccgtctggcagtacagctctgacaaagccgaacaaggaaaactcaatacctggcgggttcgcctggcgctgaaagatgaaaagggcaaccgacagaactcaggcgtggtggaaatcaccgttcagcaggaccgtaaaattgagctgattgttaataacatcgctaacgtgccggaagagaacaaccacagccacgaagccagtgcacaggctgatggtgtagatggtgtggtgatggatctcgatattactgatagctttggcgacaacactgaccgcaacggtaatgtcttgccgcaggataatctcaacccgcagctgtttgatgccaacgataaaaaagtgatgctgacgaataacccctgcactaccgagactccctgtgtctttatcgccaaacaagataaagaaaaggggaccgttacgctctccagtacgttgcctggcaccttccgttggaaggcgaaagctgccccctatgatgacagtaactatgttgacgtaacgttcctgggggctgacatcggcgggctgaatgcctttatctatcgcgttggtgcggctaaatccgtgaatcttatcggcaataaagaaccgttgcccctcaatagccgatatcgctttgtgttgtggcgcgacgctaacaaagacggtgtgttccagctatctgaaaagctcactgacgaagagatgaaacagtatgactaccaatgggaattcacggggcatagcgtaaatggcaatactggcgcgcaagccaataccactaacgtcgatatcgagatcccggcaacgaacaaggaagcggcagcgaagtttagtgcccaggtaaccgatggtgtgcaagggtacggtttgcaggtcaattacagcaagacatag

SEQ ID NO: 32930 - DNA, 780 bp, Escherichia coli
gtggtggaaatcaccgttcagcaggaccgtaaaatagagttgattgttaataacatcgcgaacgtgccagaagagaacaaccacagccacgaagccagcgctcaggcagatggcgttgatggtgtagtgatggatctcgatgtaaccgacagctttggcgataacaccgaccgcaacggtgatgcgttgccggaagataaccttacgcctcagctttacgacgcgcaggacaaacgagtgacgttaaccaacaagccctgctcgaccgataacccctgcgtttttattgccaaacaagataaagaaaagggcactgtcaccctctccagtaccttacccggcacctatcgctggaaagcaaaagccgcgccctacgatgacagtaactatgtggatgtcactttcctcggggcagaaattggtgggctaaatgcttttatctatcgtgtgggggcggctaaacccagcaacctgataggtaaagataaagaaccgttgccgctcaacaacacttatcgatttgttttgtggcgcgacaacaataaagacggtgtcttccagcaggtcgaaaaactgactgacgaagagatggtgcagtacgactacaagtgggaatttaccggcaagagcatcaatggtgaagtgggtgcacaggcgaacacttccaatgaggacattgtgattccggccactaaccgtgaagcggcgcaaacctatggcgcacaagcgggagatggcttgcagggatacggtttacgcgtgctgtataccaaaaaataa

SEQ ID NO: 32931 - DNA, 555 bp, Escherichia coli
atggcaaaatacaacgacaaagagctggcagagacgagcaagtttttaagttttgtcctccgacataaaccagaggcgattggcatcgtgctggacggtgaaggatgggcggatatcgataagctcatactctgtgcccaaaaagcgggcaagcggttaacccgcgcattactggataccgttgtcgccaccagcgataaaaagcgctttagttattccagtgatggtacgtgtattcgcgccgttcagggacattcgacttcgcaggtcgccattgccttcaccgtaaaaacaccgccacaatttctctaccacggtacggcaagccgttttcttgacgagataaaaaaacaagggctgattgcaggggagcgccattacgtgcatctctctgctgatgaagcaacggcacgcaaagtgggagcaagacacggttcgccggttatcttaaccgtcaaagcacaggaaatggcgaaacgagggatccctttttggcaagcggaaaacggggtctggctgacatcaacggttgcggttgagtttcttgagtggtaa

SEQ ID NO: 32932 - DNA, 972 bp, Escherichia coli
atggtggctggcgctgcattgcacattacgggatttctccgcgttaaggattcattaagatcgctacgtatacttctcgatatcttattgatttgccttaaagggattaccgtgacaaaaagtatttcgttaagtaaacgcatcttcgttattgtgattctttttgtcattgtggcagtgtgtactttcttcgtgcaatcttgcgcccgtaaaagcaatcatgcagcatcatttcagaattaccacgccaccattgacggcaaagaaattgcaggcataacgaataatatctcttcgctgacctggtcggcacaaagcaatactctttttagcactatcaacaaacctgccgccattgttgaaatgaccaccaatggcgatttgatccgcacaattcctctggattttgttaaggatctcgagacgatcgaatacattggcaataatcagtttgtcattagcgatgagcgcgattatgccatttatgtgatttcactgaccccaaactcggaagtaaaaatcctcaaaaaaataaaaatcccgctgcaggaatccccaaccaattgcggttttgaaggattggcttattctcgccaggatcacactttctggttttttaaagagaaaaacccgattgaggtctacaaagttaacgggctgttaagtagcaatgaattgcacatcagcaaagacaaggcactacaacggcaatttactttagatgatgtgtccggcgcagaatttaaccaacaaaaaaatacgcttctggtgctgtctcatgaatctcgcgcactccaggaagtaaccctgattggcgaggttatcggtgaaatgtcactaaccaaaggcagtcgaggtttgtcgcataacatcaaacaggccgaaggggttgcgatggatgcctctggtaatatttatatcgttagcgaaccaaatcgtttttatcgctttacccctcaatcatcgcattaa

SEQ ID NO: 32933 - DNA, 720 bp, Escherichia coli
gtgaattcactctataccgctgaaggtgtaatggataaacactcgctgtggcagcgttatgtcccgctggtgcgtcacgaagcattgcgcctgcaggttcgactgcccgcgagcgtggaacttgacgatctgctacaggcgggcggcattgggttacttaatgccgtcgaacgctatgacgccctacaaggaacggcatttacaacttacgcagtgcagcgtatccgtggcgctatgctggatgaacttcgcagccgtgactgggtgccgcgcagcgtgcgacgcaacgcgcgtgaagtggcacaggcaatagggcaactggagcaggaacttggccgcaacgccacggaaactgaggttgcggaacttttagggatcgatattgccgattatcgccaaatgttgctcgacaccaataacagccagctcttctcctacgatgagtggcgcgaagagcacggcgatagcatcgaactggttactgatgatcatcagcgagaaaacccgctacaacaactgctggacagtaatctgcgccagcgggtgatggaagccatcgaaacgttgccggagcgcgaaaaactggtattaaccctctattatcaggaagagctgaatctcaaagagattggtgcggtgctggaggtcggggaatcgcgggtcagtcagttacacagccaggctattaaacggttacgcactaaactgggtaagttataa

SEQ ID NO: 32934 - DNA, 288 bp, Escherichia coli
atggcggcgcaggcgcagcagccagtgatccagatattgctgctggcggtggagttccacggtcaacggatctttttcttcctcccgctgctgtttctgctgtttttccagcttttgcagacgcttcatcacccgccaggtgagccagaccagagcgataagtccccagacggcggtcgccagccagcggtttgccagcggagccagccagtgctgctcatagagcgtccattttggaccctgccaccagatccacaccagcagaaaaatccatgccagcgtcagtag

SEQ ID NO: 32935 - DNA, 210 bp, Escherichia coli
  misc_feature (159)..(168): n is a, c, g, or t
atggcaacaatgaaaaacaaagtgatctggcaggaagggctgtttgccctgccgcagcattttcagcaacagcagcgtcactgcgagtacctgctgacccgtcgtctggatgcactgggtgattttttctggggttttacggaactctccatcaatacnnnnnnnnnncatcaatacagaactgcttgcccagggcaaaatcatgattga

SEQ ID NO: 32936 - DNA, 237 bp, Escherichia coli
atggcatttccggtgattaagtctgaggattttaatcagagctttattttgctggatgaaaatactgggcaaccacttattaattggccctatgaactagaactggaaagtgggctaaaaatgagtgggattactgatgaaaatggaaatacagaactaatatcctctgataaggaggaggtcgttaatattagtgtgtttgaacccgatgagtttttagacgatgaaattaattaa

SEQ ID NO: 32937 - DNA, 603 bp, Escherichia coli
atggcagataaatccgaaaagaaaaaagaaaccacaaataaatcagcaaaaaaaacactaacgaagaagagcgaaaaattaactccagcaaaagacaccgcaccaaaacaagtgaatgtagatccagctataagattgaaacaaattcgtcaacttgtccgtaataataataaatccatcatgggagaggattatattatttgtcaaatctataaagaatctagatttaagcaatttgcaggtaagaataaacataatgcgaaaggcttaatgcaaatgcaacgaaatgcagtgaggcaggtttttaaatatcgacaacaaaaaataaaaggaagaatgactactgataaagagacaaatgaagctttcgctaatgctgatacattttataaatctgataaaatatttgatgaaaaagaaaatattaagattggcacagagtatttgcaatactggatagataaagaagcaacaattgaggaggcatatcgggcatatcgtggaacagatgaagcatactattctgttataaaaccttgcgctgaaaaactggctaaagatcctgataacatacaaatactaatggagggaataggaagatag

SEQ ID NO: 32938 - DNA, 483 bp, Escherichia coli; identical to SEQ ID NO: 5958

SEQ ID NO: 32939 - DNA, 1215 bp, Escherichia coli
atgccagtccgacttaataccattcccgacgcagaaccctatcccgtaccgccagcccgaattaagtggctgacagctttattactgatgctgtctgtcggtgtggccctgacttcattattcgccagcgatgaactggcaaaaaacggcccgtatttctgggggctggcctgtggtgtgcctgcctttatctggtctctggtctgttcagtgcgcaggctggtgtttattacacaacatattcgtgccgatgcgtggaatctgcgccgcgaggaagtcattttgcaggaaacgcgccggggacgacgggcgttgcagatactcagtttttccgtacaaaccgcgctgaatggtgattccgttgcagaaactataacagcatttctggcacgtcagcaggtgttgaatacctacgctgatttgcgcggagaagataccgtgcgtcgcagtgtcattcctgtattaaccaataaaccggttaccgggcgtttatccgaaattatttcccgtctttttattgatatcagaccgcaattgtttctgctgccccctgattttcatatcaacgtactactggaaattgatgcgccgctttcaggggcctccgtgagaactatctggcaggacgaatggcaaaaagccggactcccggaagcccgtctgttttctgccccagagccggggctggccgccgtggacgactggctggacaactttattcaggaaaaggccgtactgctggtgatttccgtacgacttgaaccgaagaacccggaacggacggcagaatccgccaccgcgctgttgctggcaaaccggttgacgcaaaccgcgctgacgccgctggccctgctgcatcgtcctgaacgtatcacagatacagagatgatggcgtcaggcattgcacaggcgctggactggatgccggtgcagccagatgccatatccggtatgtggactgccgaactggacagggaacagcgtgccgcgttgttaagcctgaaccagccgtttgctcaggaagccctgatgtacgagctggatgcctttctggggcgctccggaccggctgcgccgtggctgtccgtcgctgtggcaacgctggcggcaatacaatcacaacacccccaactgacgctcagcggcgttcagggcgggcattattcatgggcgaccgtggtgtcgccattcgtttcccctcaggaggcatcatag

SEQ ID NO: 32940 - DNA, 3393 bp, Escherichia coli
gtggttccgggattaaaccgtctccggccccgttcggtttcagggcctgccatcgtcatgaccgtggctgttgtggtggcgctttgcacgtttattcaccgtaaaccggcattgctgggcgttgaaccgggtagctcacagcaaatgtactggatggctggcgtgattgccgcaggcgtggtctttttgattatcatgggggtttatcatctgctgaaccgccacgctgccgtacagaactttgaactccgcagacaacttgccgccggagatgactatcgtgcggtgacgacaaagaaagccgacagccgtcatccggcaatggtggaactcgccgccttcctgcgcgaccgctacggcccgttctggcggcgtaaaatccgcctgctgctggtgaccggcgagcctgaacaggcagaggccatcgcgccggggctgaccgggcaacactggctggagggcgaccacacggtgctgatatacggcggcaggccatctgcggagcctgatgtcgcgctgctgaccgccttaaaaaaactgcgccgcaaccgtccgctggacggcatcatctggccgctgacagaagaacagagccgccagaccgcacaactcgacaaaggctggcgcgagctggttaacggaagtaagcgactcggttttcaggctccactctatttgtggcaggtctgtgacaacggtgattatcagaccggacgccccctgcaaagcgtcggctgcctgctgccggaacgctgtaccccggaacaactggctgtaatgctggaagcacaaaccctgccgctgacggaacagggcatgtcgcagctgttagccgataaccgccatgatttcctgctgcgtctggcccatacccttgcagagcagggtatcgcccactggcaaaccgtcctgaagccgctgctggcaggtggcgcattctcttccctgcgcctgcgtggcctgatgttcagcccgccgcttgccgccgtgccggaggccgcacctcatgcgtggctgccgtcaccggtctgggcgggcgtcaccggcgataacgcgcggggccgcgcggtgggctttccgtggctgcgcaccatgttgatagcctgtacctgcgtgctggtgatatggggggccggaatggcgacctctttcttcgccaaccgagctcttgttcaggaaaccagcatccagacggcacgtgcgcttgatacccgcctgccgcaggcagaacaactggtggcgctgcataccctgcagggcgaactggagcgcctgcaatatcgtatccgcgaaggtgcgccgtggtatcagcgttttggccttgaacgtaaccagcaactgctcgccgccgcttttcccggctatgcgcaggcggcaaaccggctggtgcgcgacgtggccgttgaccatctgcaacagcaactgagcgcctttgtcgccctgccgcccaacagtcctcagcgtaccgccaccggcgaacaacgctataagcagcttaaggcattgctgatgaccgctcacccggaaaaggccgacgccgcctttttcagcactacgctgatggcagataacctgcgctatgcaggtgtaccggaaggcgtgcggcagggcgtgctgccgtcactgctgaccttctggatggcgaacttgccggaacacccgcagtggaaaacctcgccgccgccggaactgaccggcgcagtgcgtaaaatcctgctgcgccagattggtgtgcgtaatgccgaaaacaccctctaccagaacgtgctgcaacaggtgtcccgcaactacgccgatatgacgctggcggacatgaccggggataccctcaccgaatctcttttcagtacggaacagacggtgccggggatgttcacccgtcaggcgtgggaaggacaggtcagggaagccatcgagcaggtggtgacggcgcggcgcgaggaaatcgactgggtactcagcgaccgccagcaggatacctctgcggatatctcgccggatacgctgcgtaaccgtctcacctcacgctactttaccgactttgccggaagctggctggcgtttctcaacagcattcgctggaaaaaggaagactcgctctccggcattctcgaccagctgacgctgatggccgatgcccgtcagtcgccactgattgcgctgacggacaccctcgcgtggcaggcggcggcaggcagggaaaaccgtggtctgtcagactcgctggcgaaatcggcacaggaactgtttaacggcaaggagaaaacgccgcagcaatcccgtgaaggtgacgacgtgcctgtcgggccgctggataaaaccttcgcgccgctgctgcggttgctgggcgataagtcaggaggcggtggtggtgatacgcaactcaacctgcaaacgtatctgacccgcgtcacccgcgtacgcctcaaactgcaacaggtgaccaacgcccccgacccgcaggagatgacccagcaactggcgcagacggttttacagggcaaaaccgttgacctcaccgacacccgcgactacggacggttaatcgccgccagtctgggcgaagaatggagtggcttcggtcaggcgctgttcgtccgcccggtggaacagtcgtggcggcaggtgctgacgcccgcagcggacagcctgaaccgccagtggcaacgggcgattgtcagtcactggaatcaggacttcgctggccgctatccattcaaagcctcacagaatgatgcctctctccccctgctggcgcagtacctgcgcgatgacgggcgcatcaaccagtttatcgccgccaatctttctggtgttctgaaacgtgaaggccgctactgggtggctgacgccatgaacacgcaggggctgacggtcaacccggactttatccgcgccctgaaccgcctgcgcgatgtggccgataccgcctttgccagcggcgatgccggaatacatttcgaactgcgggcaaaaccggcgcgtgacgtgatgaaaacgcatctggtgattgacgggcaggaactggagtatttcaaccagaaagaacgctggcagcgttttaactggccggatgaacagtggcaacccggcgcatcgctgagctggaccagtacgcaggcgatggagcgcatactggcggattaccggggaagctggagtcttattcgcctgctggaacaggcgcaggtgacgccggtggacagcagcacctttaaggtggtgtggaaagcgcaggatggcctgccgctgaattacctgctgcgggttgaacagggtaaagggccgctggcgctgctggagctgaaaaacttccgcctgccgggacaggtatttctgaccggcaggagtatgaaggatgcggaagagtatggggaagacgccgatgagtga

SEQ ID NO: 32941 - DNA, 963 bp, Escherichia coli
  misc_feature (915)..(924): n is a, c, g, or t
gtgactattaaatctactaatcaccttacccacatcgccacgttttgcgctctgctgtatagcaatagtgctttatgcgctgaactcgtcgaatatgaccatacatttctgatgggaaaggatgcttcaaatatcgaccttagtcggtatacagaaggcaacccgacactacctggcatttacgatgtcagtgtgtatgttaacgatcaacccatcatgagccaaagcattgcttttactgttattgaaggtaaaaagaacgctcaggcctgcattacgcagaaaaatttattgcaatttcatatcagttcaccagacaagaatagcgaaaaagccattttgcttaagcgagacgacgatcttggtgattgcctcaatctggctgaaatgatccctcaatcatccattcgttacgatgttaacgatcaacgcctggatatcgacgtcccccaggcatggattatgaagaattatcaaaactatgttgatccctctttgtgggaaaatggcattaatgcagccatgctttcctacaacctcaacggatatcacagtgaaagtccaggcagaacaaatgacagtatctacgcggcattcaacggtgggataaacttaggtgcctggcggttacgtgcctcgggtaactacaactggatgaccaatgtccatagcgattacgattttcagaatcgctatttacaacgcgatcttgcgtcactacgttcacaactggttattggtgaatcttacacgaccggcgagaccttcgattcagtcagcattcgcggtattcgtttatacagtgacagtcgaatgctgcctccggtattagccagttttgcgccaatcattcatggcgtagcgaataccaatgccaaagtaaccgttatgcaaaatggttataagatctatgannnnnnnnnnttatggcagcgatctcattgtgactatcgaagaagctga

SEQ ID NO: 32942 - DNA, 354 bp, Escherichia coli
atgttcgccgagggtaaaagcccggtacatctcgcagcacctgcggccatcgccgaaagcctgcgcaacatccggcatcatgaagaggccaaccgggcggcgattgtggaagcgttgcgtgtcatgctggacgccttctcgccgggcaacctgatgcgccgctttgcgcaataccgccgcagccatgagctgcgccagaaaatggacaacgcctgggcatggcagatgtacagcaactattacgatgaactggcctccagccgacagcagggatttgaaatgctgttcaatgaagtttatgcccaggtctatgaccgggtgctgcgcgaaaaacagcgggagccggaagcatga

SEQ ID NO: 32943 - DNA, 555 bp, Escherichia coli; identical to SEQ ID NO: 32931

SEQ ID NO: 32944 - DNA, 1179 bp, Escherichia coli
atgccttcgccctcgcatcccgtagaacgcttttctttcagcaccgcgcttttcgggatgctggttctgaccttaggtatgggtttaggccgcttcctttatacgcctatgttgcccgtcatgatggcggaaggatcgttttcatttagccagctctcgtggattgccagcggcaactatgcggggtatctggctggcagtctgctattttcgtttggcgcatttcaccagccttcgcgcctgcgcccatttctgttggcttctgccctggcgagcgggttgttgatcctcgcaatggcatggttgctgccatttattctggtgttattgattcgcgtcctggcgggtgtcgccagcgccggaatgctgatttttggttcgacgctgattatgcagcacacgcgccatccttttgtgctggcagctttgttttctggcgttggcattggtatcgcactgggcaatgaatatgttctggcaggcctgcattttgacctctcctcgcaaacgttatggcaaggcgccggggcgctttctggcatgatgctgattgcacttatgcttttaatgccctcgaaaaaacacgccatcgcaccaatgccattggtaaaaacagagcaacagataatgagctggtggttactggctattctgtacggcctggcgggatttggttatatcatcgtcgcgacttacctgccgctcatggcgaaagatgctggctcaccattgttaaccgcccatctctggacgttagtcggcttatcaattgtgcctggttgctttggctggctatgggcagcaaaacgttggggggctttgccctgcctgacggcgaatttgctggtgcaggctattagtgtgttgcttactctcgccagcgactcgcctctcttgcttatcatcagcagtcttggttttggcggtacctttatgggtacgacatctctggtgatgactatcgcccgccaactgagcgtaccgggaaatctcaatcttttaggctttgtgacgctcatttacggcattgggcaaatcctcggcccggcgctgaccagtatgctcggcaatggaacatcggcgcttgccagcgccactctctgcggcgcggcggcgttgtttattgctgcgcttatcagcacagtgcaattatttaagctacaagtggtcacttcatga

SEQ ID NO: 32945 - DNA, 972 bp, Escherichia coli; identical to SEQ ID NO: 32932

SEQ ID NO: 32946 - DNA, 258 bp, Escherichia coli
atgaaagagtatctgtttttatttcactccacggtcggcgtcatacaaacccgcaaggcgttgcaggcagcgggcatgacttttcgcgtcagcgatattccccgttatttacgtggcggctgcgggttatgcatttggctgacctgtccccccggcgaggaaattcaatgggtgatccctgggcatacggaatcagtttattgtcagcaggatggtggctggcgctgcattgcacattacgggatttctccgcgttaa

SEQ ID NO: 32947 - DNA, 768 bp, Escherichia coli
gtgacatattcgattggcattgattccggctcaaccgccaccaaagggatcttactggcagacggcgtgattacgcgccgtttcctcgttccaacaccctttcgcccggcaacagcaattactgaagcctgggaaactctgcgcgaagggttagagacaacgccgtttctgacgctcaccggctatggacggcaactggtggattttgccgataaacaagtgacggaaatctcctgtcacgggctgggcgcacggtttcttgagccagcaacgcgcgcggtaatcgacatcggtggtcaggacagcaaagtgattcagcttgatgatgacggtaacctgtgcgatttcctgatgaatgacaaatgcgcggcaggaacagggcgtttcctggaggtgatctcgcgcacgcttggcaccaacgtcgaacagctcgacagcattaccgaaaatgtcacgccgcacgccatcacgagtatgtgcacagtgtttgccgaatcagaagtgatcagcctgcgctcagcgggcgtcgcgccagaagcgattctcgccggagtgattaacgccatggcgcggcggagtgccaatttcattgctcgtctctcctgtgaagcgccgattctgtttactggtggcgttagtcactgtcaaaggtttacccacatgctggaaagccatctgggaatgccggtacaaactcaccctgatgcgcaattcgctggtgcaattggcgcggcggtgatcggtcagcggcagagaaaacgcgcatga

SEQ ID NO: 32948 - DNA, 1152 bp, Escherichia coli
atgtcacttgtcaccgatctacccgccattttcgatcagttctctgaagctcgccagaaaggctttctcaccgtcatggatctcaaggagcgcggcattccgctggttggcacctactgcacctttatgccgcaagagatcccgatggcagccggtgcggttgtagtttcgctctgttccacctctgatgaaaccattgaagaagccgagaaagatctgccgcgcaacctctgcccgctgattaaaagcagctacggcttcggcaaaaccgataaatgcccctacttctacttttctgatctggtggtcggtgaaaccacctgcgacggcaaaaagaaaatgtatgaatacatggcggagtttaagcccgttcatgtgatgcaactgccaaacagcgttaaggacgatgcctcacgcgcgttatggaaagccgagatgctgcgcttgcaaaaaacggtagaagaacgttttgggcacgagattagcgaagatgctctgcgcgatgccattgtgctgaaaaaccgcgaacgtcgcgcactggccaacttttatcatttggggcagttaaatcctccggcgcttagcggcagcgacattctgaaggtagtctacggcgcaaccttccggttcgataaagaggcgttgatcaatgaactggatgcaatgaccgcccgcgttcgtcagcagtgggaagaaggccagcgactggacccgcgcccacgtattttaatcaccggctgcccaattggcggcgcagcagagaaagtggtgcgcgcgattgaagagaatggcggctgggttgtcggttatgaaaactgcaccggggcgaaagccaccgagcaatgcgtggcggaaacgggtgatgtgtacgacgcgctggcggataaatatctggcgattggctgctcctgtgtttcgccgaacgatcagcgcctgcaaatgctcagccagatggttgaagaatatcaggtcgatggcgtagttgatgtgattttgcaggcgtgccatacctacgcggtggaatcgctggcgattaaacgtcatgtgcgccagcagcacaacattccttatatcgctattgaaacagactactccacctcggatgtcgggcagctcagcacccgtgtcgcggcctttattgagatgctgtaa

SEQ ID NO: 32949 - DNA, 1245 bp, Escherichia coli
ttggcgctctctttactgcttatcgccgctgctacctttgtcgttacgctgtttttgccgcccaatttttgggtgagcggcgtgaaggcgattgctgaagcggcgatggtcggcgcactggcggactggtttgcggtggtggcgctgtttcgccgcgtgccgattccgatcatttctcgtcatacggcgattatcccacgtaataaagaccgaattggcgaaaatctcggtcagttcgtgcaggaaaaatttctcgatacccagtcgctggtggcattgattcgacgtcacgaaccggcgttgttgattggcaactggtttagtcagccggagaacgcccgccgcgttggtcagcatctgttgcagatcatgagcggttttctcgaactgaccgatgatgcgcgtattcagcgcctgcttaagcgcgcggtccaccgggcgattgataaagccgatctttctggcaccagtgcgttgatgctggagagtatgaccaaaaacgatcgtcatcaggtgctgctggatacgctgatcgcacagttgatcgcccttctccagcgcgataaatcgcgcaagtttatcgcccagcaaattgttcgctggctggagagcgagcatccactgaaagccaaaattttgcccactgaatggctgggcgaacatagcgcggagttggtttctgacgcggtgaattctttgcttgatgatatcagccgcgatcgtgcgcatcagatccgccatgcgtttgatcgcgccacttttgccctgatcgacaagctgaaaaacgatccggaaatggcagcgcgagccgatgccgtcaaaagctatctgaaagaagatgaagcttttaaccgctatctcagtgaattgtggggggatttacgggaatggctgaaagcggatatcaacagtgaagattctcgagtgaaagaacgtatcgcgcgggcgggtcaatggtttggcgaaacattaattgccgatgatgccttgcgggcgtcgttaaatggtcatctggaacaagccgcacaccgcgttgcgcctgagttttccgcattcctgacgcgccatatcagcgacacggtaaaaagctgggatgcgcgggatatgtcgcggcaaatcgagttaaatatcggcaaagatctgcagtttatccgtgtcaacggtacgctggttggcggttgtattggacttattttgtatttgctgtcccagctcccggccttgttccccctcggcaatttttag

SEQ ID NO: 32950 - DNA, 519 bp, Escherichia coli
atgtatttcagcatgttggcgaaagtgcgacgtccctcaataaccccctcttccagcaccatcaggcttttttccagcaggatgatatcagccgcttcacgggcaatatctaccgcgccgtccacagaaatgccgatatccgcagcgcgtaaggcgggcgcatcattaataccatcgcccataaagccaaccacatgcccttcgcgcttcagcaacgttacgatgcgttctttatgcatcggcgtcagacgagcaaacagcgtggtgcgctgtgcgagatttgccagttcgtcgtcagatagcgtttcaatatcactaccaatgaccacctctcccgcgtccagccccacttcatggcacactttcgctgcaactaactcactgtcgccagtaaggatttttacggtaattccactcgcttttaatgccttcagtgccggagctgttgtctcttttggcggatcaaggaaagcaatatatccttcgaggatcaggtcggattcatccgcccgctggtaa

SEQ ID NO: 32951 - DNA, 183 bp, Escherichia coli
atgattctccagcacaattttatcctgtgtcagggtgccggttttatcagtgcacagaatatccattgcgccaaagttctgaatggcatccagatgtttgacgatcactttctgtttcgacaacttgactgcgccacgcgccagcgtcgaggtaacaatcatcggcaacatttctggcgttaa

SEQ ID NO: 32952 - DNA, 948 bp, Escherichia coli
atgcaaaatcggctgaccatcaaagacatcgcgcgcttaagcggcgtggggaaatctacggtttcccgggtgctgaataacgaaagcggcgtgagccagcgcacgcgcgagcgtgttgaagcagtgatgaatcagcatggattttccccttcccgctctgcgcgcgctatgcgtgggcaaagcgataaagtggtcgccatcattgttacccgtctggattcgttgtcagaaaatctcgccgttcaaaccatgctgccagcgttctatgaacaaggttacgatccaatcatgatggaaagtcagttttccccacaattagttgccgaacatttgggggtgctgaaacggcgtaatatcgacggcgtagtgctgttcggttttaccggcataacagaagaaatgttagcccactggcagtcatcgctggttctgctggcgcgtgacgcaaaaggctttgcttcggtctgttatgacgacgaaggggcaatcaagatcctgatgcaacggctgtatgaccagggacatcgtaatatcagctatctcggcgtgccgcatagtgacgtgacaaccggtaagcgacgtcacgaagcctacctggcgttctgcaaaacgcataaattgcatcccgttgccgctctgccagggcttgctatgaagcaaggctatgagaacgtagcaaaagtgattacgcctgaaactaccgcgttactgtgcgcaaccgacacgctggcacttggcgcaagtaaatacctgcaagagcaacgcatcgacaccttgcaactggcgagcgtcggtaatacaccgttaatgaaattcctccatccggagatcgtcaccgtagatcccggttatgccgaagctggacgccaggcggcctgccagttgatcgcgcaggtaaccgggcgcagcgaaccgcaacaaatcatcatccccgccaccctgtcctga

SEQ ID NO: 32953 - DNA, 630 bp, Escherichia coli
  misc_feature (584)..(593): n is a, c, g, or t
atgatggcacaactgacagaaaaacagaaagcctattcccgtcatctcgatgaaaaatatggtttcccatcagggacgatggaaacattagttggcaatgaatctagtggtaacggaagtgccgagtcaccgaaaggagctagaggatttgctcaactgatgccctcagtaatgagtgatgctggttatcgtggaacagatccgcgctcactgccatttgaaaagcaaatggatatcgcagcaaaccatctcaataaaggaatgaagcgatttggtgatataggtatggcattggctgggtataattctggctatgctcgtattaatgccgtaagaaacggtaaatctacactgccagatgaaacggctaattacgtaagtaaatttgcagatgccggaataatccctgatgacagtgaaatcttgcagtttgcacaaaccagtcaacatcgcaatcttcagcagcctgactactcagagcttgataaagaaatctctcaggtgggagatatttctgcatgggaagcaaaacgtcagcaatttaagaacatagaagcaggactaccaacagccagttcatgggnnnnnnnnnncatgggagcagaaaagagctcagtttctcgccgatga

SEQ ID NO: 32954 - DNA, 726 bp, Escherichia coli
atggtaagaaaaggtgccgatacgcttaaggcatccgcaaacactggaactggagcttttcaccgtcttatctccgcgctgccggaagcagaacgccaaccagcaatagcatctattcttcagcatgctgtggcgcagggagagaagggaggaatcggtgaagagtctggtatccagtattttgccaagctcatgacccagcagaatgtaaacgccatcagtcgtcatgcgccagatctcggtagaatgatgaaagagttcggtgtactcgctaaagccagcaccagaccgcagcgatacgtagagcgcacgggaagaacaactgaggctctcaaaacgctcgattcaggccttccaaagatcgtcggcgtgattatgaacggagttcaacagtcaggtgcgatcgctggaggctttggcggtggtgtaattggttcgattagtggtttggttgctggtggcgcgctgagaaatactgtggctaagattggggcgacaagaagtggtaggtatgcgatagagaaagccgttcaggaagctacaaaagcagtgcgcgcaggggcatcaccagcagcgatcgccgcagcagagaaacgattttcggccaataaaattgccatgaaagcaattcgtgatgccgttggggctgaagaattcgtgaaactgacaagggccgggattgtagctaccctcagtggcatgaaagatgttagcgaatgggaatag

SEQ ID NO: 32955 - DNA, 576 bp, Escherichia coli
atgtgcccagtgtgcggtcataaagtcgatggtttcgacagcacgcagagagacaacccagtcatacttacgaccatcgcccattacgccaacggaacgtactggcaggaagacggtgaacgcctggctgactttgtcgtacaggtccgctttacgcagttcttcaatgaagatggcgtcagcacggcgcagcaggtcacaatactctttcttcacttcccccagaacacgaacgccaaggcctggtcccgggaacgggtgacggtacaacatgtcatacggcaggcccagctccagaccaatcttacgcacttcgtctttgaacagctctttcagcggttcaaccaggcccatcttcatctctttcggcaggccgcccacgttgtggtgagatttgatgacgtgcgctttaccggttgcagacgccgcagattcgataacgtcagggtagatagtgccctgcgccagccacttcacgtcttccagtttcagcgcttcttcatcgaatacttcaacgaaaacgcgcccgatgattttacgttttgcttccggatcgttttcgccagccagcgctga

SEQ ID NO: 32956 - DNA, 864 bp, Escherichia coli
gtgaacaatgttcagaccaaagtgatcgccaaacatatccagaacctgctctgcttcgttgagacgcagcaggccgttgtcgacgaatacgcaagtcaggtttttaccgatagcgcggtgcaacagcattgcggtaacggaggaatccacgccaccagagaggccgaggatgactttatcgtcgcccacttgctcgcggatgcgggctacagcgtcgtcgataattttcgctggcgtccacagggcttcacactggcagatatcacgcacaaaacgctccagcatgcgcataccctggcgggtgtgagtcacttccgggtggaactgtacgccatagaagcgtttttcttcgttggccatgatggcaaacgggcagctttcggtgctggctacggtgacgaagtcggacgggatagcggtaactttatcgccgtggctcatccagacgtccagcagcggtttaccatctgcggtcagcgcatcttcgataccgcgaaccagtgcgctgtcgtttacgacttcaacctgcgcgtagccaaattcacgttcattagaggcctcaacgtgaccgcccaactgcatcgccatggtctgcataccatagcaaacgccgaataccggtacgccggcttcaaagacatactgcggcgcacgcgggctgttttcttcagtagtactttccgggccgccggaaagaataatgccgcttggattgaagtcacgaatttgtgcttctgtcacatcccacgcccacagttcgcagtaaacccccagttcacgcacgcggcgcgcaaccagttgagtatactgggaaccgaagtccagaatgaggatgcgatgcttatgaatgttttccgtcattga

SEQ ID NO: 32957 - DNA, 1467 bp, Escherichia coli
atgctacgtatcgctaaagaagctctgacgtttgacgacgttctcctcgttcctgctcattctaccgttctgccaaatactgctgacctcagcactcagctgacgaaaactattcgtctgaatatccctatgctttccgcagcaatggataccgtaacggaagcgcgcctggctattgctctggctcaggaaggcggtatcggctttatccacaaaaacatgtccattgaacgccaggcagaagaagttcgccgtgtgaaaaaacacgaatctggcgtggtaaccgatccgcagaccgtactgccaactacgacgctgcgtgaagtgaaagaactgaccgagcgtaacggctttgctggctacccggttgttaccgaagaaaacgaactggtcggcattatcaccggtcgtgacgtgcgttttgtgaccgacttgagccagccggttagcgtttacatgacgccgaaagagcgtctggtaaccgtgcgtgaaggcgaagcccgtgaagtggtgctggcaaaaatgcacgaaaaacgcgttgaaaaagcgctggtggttgatgatgaattccacctgatcggcatgatcactgttaaggacttccagaaagcggaacgtaaaccgaacgcgtgtaaagacgaacaaggccgtctgcgtgtaggtgcagcggttggcgcgggcgctggtaacgaagagcgtgttgatgcgctggttgccgcaggcgttgacgttctgctgatcgactcctctcacggtcactctgaaggtgttctgcagcgtatccgtgaaactcgcgctaaatatcctgacctgcaaattatcggcggcaacgtggcaactgctgcaggtgcccgcgcgctggcagaagccggttgcagtgccgttaaagtgggtatcggccctggttctatctgtacgacgcgtatcgtgactggcgtcggtgttccgcagatcaccgccgttgctgatgcagtagaagccctggaaggtactggcattccggttatcgctgacggcggtatccgtttctcaggcgatatcgctaaagctatcgccgctggcgcaagcgcggtgatggtaggttccatgctggcaggtactgaagaatctccgggtgaaatcgaactctaccagggccgttcttacaaatcttaccgtggtatgggttccctgggcgcgatgtccaaaggttcttctgaccgttacttccagagcgacaacgctgccgacaaactggtgccggaaggtatcgaaggtcgcgtagcctataaaggtcgcctgaaagagatcattcaccagcagatgggcggcctgcgctcctgtatgggtctgaccggctgtggtactatcgacgaactgcgtactaaagcggagtttgtacgtatcagcggtgcgggcattcaggaaagccacgttcacgacgtgaccattactaaagagtccccgaactaccgtctgggctcctga

SEQ ID NO: 32958 - DNA, 267 bp, Escherichia coli; identical to SEQ ID NO: 28727

SEQ ID NO: 32959 - DNA, 435 bp, Escherichia coli
gtggcctacggaacccaacatgctaaatgcaaaggagttgttggcgtaaatgttgatggcgccattgttctcaatgaccgcatcagctgtcgtgccgctgtccagttgcatcccgatcatgcccgtgtcggtcgtgcccgacgttccgaggttgatagtgccgttgttaaccagtcgtgcgtttttatccccttccatcgcaatagcgttattaccgctaatattcatggtgccgtcattctgcgcaacgtaattgctgtgaatgaatttcactgcaacgccgctgtctttatcaaaattgacgaccccattgctctggttccagaagaaggcattgctgctcccggcatcactggcgcttacggccaaagatttcgccgtgacatccgcaataccgccgttaataaagcgcccattcccaccccagaaatttag

SEQ ID NO: 32960 - DNA, 204 bp, Escherichia coli; identical to SEQ ID NO: 2032

SEQ ID NO: 32961 - DNA, 2151 bp, Escherichia coli
atggatactaaaaagatattcaagcacataccctgggtgattctcggaatcatcggtgcattctgcctcgcggtagttgcattacgtcggggggagcacgtcagcgccctgtggatcgtggtcgcctctgtgtcggtgtatctggtggcgtatcgctactacagtctgtacatcgcccagaaggtaatgaaactcgaccccacgcgcgcgacgcctgcggttattaacaacgacggtctgaactacgttccgaccaaccgttacgtgttgtttggtcaccacttcgccgctatcgccggtgctggtccgctggtgggtccggttctcgccgcgcagatgggctacctgcctggcacgctgtggctgctggcgggggtagtgctggccggtgcggttcaggactttatggtgctgtttatctcctctcgccgtaatggcgcatctcttggtgagatgatcaaagaagagatggggccagtaccggggactatcgcgctgtttggctgtttcttaatcatgatcatcatcctcgccgtcctggcgctgattgtggttaaagccctggccgaaagtccgtggggtgtcttcaccgtttgctcaaccgtaccaattgcgctgtttatgggtatctacatgcgctttattcgtccggggcgtgtgggtgaagtctctgtcattggtatcgtgctgctggttgcctctatctacttcggtggcgtgattgctcacgatccgtactggggtccggcactgacctttaaagacaccaccattactttcgcgctgattggctatgcgtttatttccgcactgctgccagtgtggctgatcctcgcaccgcgcgactatctggcaaccttcctgaaaatcggcgttatcgtcggcctggcgctgggtatcgtggtgctgaacccggaactgaaaatgcctgcgatgacccagtacattgacggtactggcccgctgtggaaaggcgctctgttcccgttcctgttcatcaccatcgcctgtggtgcggtatccggcttccacgcgctgatctcttccggtacgacaccgaaactgctggctaatgaaaccgacgcgcgtttcattggctacggcgcaatgctgatggagtccttcgtggcgattatggcgctggttgctgcgtccatcatcgaaccgggtctttacttcgcgatgaataccccgcctgctggccttggcatcaccatgcctaacctgcatgaaatgggtggcgagaacgcgccgatcatcatggcgcagctgaaagacgttaccgcacacgcggcagcgaccgtcagctcctggggcttcgtgatttcgccagagcagatcctgcaaaccgcgaaagacattggtgagccttctgtcctgaaccgtgcaggtggtgcgccgacgctggcggtaggtatcgctcatgtgttccacaaagtgctgccgatggctgacatgggcttctggtatcacttcggtattctgttcgaagccctgttcatcctgaccgcgctggatgccggtacccgttctggccgctttatgctgcaagacctgctgggtaacttcatcccgttcctgaaaaaaaccgactctctggttgccggtatcatcggtactgcgggctgtgtgggtctgtggggctacctgctgtatcagggcgtggtcgatccgctgggcggcgttaagagcctgtggccgctgttcggcatctccaaccagatgctggcagccgtggcgctggtactgggtaccgttgtgctgattaagatgaagcgcacccaatacatctgggtaactgttgttccggctgtatggttgcttatctgcaccacctgggcgctgggcctgaaactgttcagcaccaacccacagatggaaggcttcttctacatggcaagccagtacaaagagaagattgctaacggtactgacctgacggcacagcagattgccaacatgaaccacatcgttgtgaacaactacaccaacgcaggcctgagtattctgttcctgattgtggtgtacagcatcatcttctacggtttcaaaacctggctgaaggtgcgtaacagcgacaaacgtactgacaaagaaacaccgtacgttccaatcccggaaggcggcgtgaagatctcttcgcaccactaa

SEQ ID NO: 32962 - DNA, 924 bp, Escherichia coli
  misc_feature (851)..(860): n is a, c, g, or t
atggaagattactggctgcgcccaattcgattttatgaatctgaacgacgcaattttctcggaacattattcagtgaaggtggtttacctttccggctactcaaagaatcagacagtcgctttctggctgttttctccaggatccttggacaatatgagcaagcaaagcagtcaggtttttctgccctttcgctggcaagagctgtcatagaaaaatcagcgctgccaactgtttttagcgaagatacctctgtagaacttatcagtcatatggctgataacctcaattccttagtacttactcacaacctaataaatcacaaagaaccagtacaacagcttgagaaggttcaccctacctggcgaagcgagtttccaataccgttagatgatgaaacaggaacgcattttttgaatggactgctatgcgcagcctctgtagaggctaagcctcgactacaaaaaaataagagtacgcgttgccaattctattggtcagaaaagcatccagatgagcttagggtgatagtatctcttccggacgaagtttcctttcctgtaacaagcgagccgtcaactacgcgctttgaacttgccatttgtgaagatggtgaggaagtctctggccttgggccagcctatgcttctctggaaaacagacaggcaacagttcgattacgtaaaagcgaagtgagatttggcaggcaaaatccatcggcaggtttgtcgttagtggctcgtgctggagggatgattgttgggagcattaaacttgatgacagtgaaattgccattggtgaggtgccgttaaccttcatcgttgatgcagatcaatggctgttacagggacnnnnnnnnnntacagggacaggcttcttgcagtgtgcgaagcagcgatgttctgattgtgctccctcgggataa

SEQ ID NO: 32963 - DNA, 2091 bp, Escherichia coli
gtgcgaagcagcgatgttctgattgtgctccctcgggataatagcaatgttgctggttttgatggccaatcgagggcagtaaacgtattaggactaaaagcactacctgtgaagggatgtcaggacgttacagttacagcaaatgaaacttatcggattcgcaccggaagagaacaaatcagcatcggaaggtttgctctaaatggaaagcgtgcaagctgggtttgtcatccagatgaaacatttattggtgtaccaaaagtcatttctacactaccggatattcaaagcattgatgtaacgcgttacctgagcggaatttcaattgagcaatgtcatatacaagagatgctgggggctcaatatctttctatccgtaatagtaagaatgaaacgctcttgcgtcgcaaaatcggtattttgcctgctgatttcagtattgagataaaaggtggaatacacgcaaatgaaggcactatcgtaatcaccacacagcatccttgtgtagcaaaacttaaagataaaacattggaggctacacgtaagcgtactgaggggcgaacagagatacaactcaaagcggaaggggtacctccggcatttattacattacaagttctgcctaatttggcggctgaccccatcgatattgagttaccttttcccgctaaaggctgtctcgctcttgatgtaaacggacgtcctctggataaaaacattacgctgcatgatctgctgggttccagagcgtttctgttctccagaaatggcgagccgacaagatatacattgcagttgcatttgcgctccgttagtggattacaggcatggcacgaatggtgttatacggcgttgagcgatcgtcctgttgaattgaatctctatagtctgcgcgaacatattgagaacctgatttcacttgaggcaggtattgaccaggttgttgagatgcgtattacgggggcgggtgtggtcatggcctggcaaattcgtcgctataaatacagtctgcgctatgattatgaaaaagaactattactcagccagtcagtgaaccatcgtgctggacagattccttcccccgttatcatgctgttaagtgaacccgagaggaaatccatccccttagcatcaagaatgagcgagggagtgcctgtcggtgaatatgagttgagctcaatcgttaacaaaaatggaccgtggttggttgtccctaaaccgggtgaagagatggcttttcgtccctgcttcattcgtggcgaatcttcgttaccggtagaagaaagcaacatccgctcattgcagaaagcgacccagctttttaatccacaggcagaagttaataccatcacactggttctcggacagatggctaacgatcctgcccattccggctggcaatttatgcgtagcctgtacgatcaatttggttatttaccactggcaacctttgaagtatggcgtgcactggtgcagcatccgcaggcattggcaatgtcgctcttcaaatttgaaatgtcagcagagtacctgagtcgtattgagaatgagttccctattctatgggagtttttccccatctttgagatcaaagcggcatctgagcgtttcaaattgttcctgagccaaaaaggtgcaccggaggaaacccagaaattactggttactaatatgtttcaacggctggggctcgtgttcccgacatatgccgatgaaattgagaaatggttaagtaacggacatctccccccgtctattcctgagtcttttgtccacgtgtggtatcaggagcttttacgtgagcatagtgaagctcaatggccagagtacggcagcaagcggctgcatagctggatggcatcacaaaaaaatccagtgattggtattaatcctgacgcaaatcaccgctattccgtggccttgttacccgtcttcgctgcagctgtggcaagcggaaatgcttcttttgaatctgtatttgaccgtaaacccggtgccgtatttttcctgaggcaagtcagggatttcgattcccgctggtttaaggccatcttccagtgcagcctgttgcgttatgttgctaaaaaataa

SEQ ID NO: 32964 - DNA, 519 bp, Escherichia coli
gtgaacaccgcatccggtggtgtaaaccagcatagtagaggagccgtataccacgtaacctgccgcaacctgtttgttaccaggctggaggaaatcttcttccgttaccggcgtgccaacaggcgtaacgcggcggtagatggagaaaatggtaccgacagagacgttaacatcgatgttggacgagccatccagggggtccatcagcaccacgtattttgcgtgttcacagccttcaaagacgacaatctcatcttcttcttcagaggcaatgcccgcaacgatatcgcgtgctttcagtgcggctttcagtttctcattagcgaacaggtcgagtttctgctgaacctcgccctgcacgttctcagcaccgctggcacccaggatatcaaccagtcctgctttgttgatatcgcgatggataatcttggcgcccagttttattgccgacagcaaagcagtgagctcaccggtagcatgagaaaactcgtgctgcttttcgacaataaattcacctaa

SEQ ID NO: 32965 - DNA, 351 bp, Escherichia coli
atggtggaactgtttctggatcgctttcaggtcgtcaaagatatcggcgtgatcgaactcaaggttgttgaggatcagcgtacgcgggcagtaatggacaaatttagagcgtttgtcgaagaaggcgcagtcgtactcatccgcttcgataacaaagaagtcgctttcgcccagacgcgccgaaacctcaaagttccccggcacaccgccaatcacaaatcccggtttgtaaccgcattgttccagaatccaggtcgccattcccgccgtggtggttttgccgtgtgtaccggcaacggccaacacccagcggtcgcgcagcacaaaatcgtgcagccactgcggacctga

SEQ ID NO: 32966 - DNA, 552 bp, Escherichia coli
atgactaagcagcccgaagactggctcgacgacgttcccggtgatgacatcgaagacgaagacgatgaaattatctgggtcagtaaaagtgaaattaaacgtgatgccgaagagctaaaacgccttggcgcggaaattgttgatctggggaaaaacgcgctggataagatcccgttagatgcggatctgcgcgcggctattgagctcgcccagcgtattaagatggaaggtcgccgccgccagttgcagctcatcggtaagatgctgcgccagcgcgatgttgagccgatccgtcaggcgctggataagctgaaaaatcgccataatcagcaggtggtactgttccataaactggaaaacctgcgcgatcgtctgatcgaccagggtgatgacgccatcgctgaagtattgaatctgtggcccgatgccgatcgtcagcaactgcgtactctgatccgtaacgcgaagaaagagaaagaagggaataagccgccgaaatccgcacgccagattttccagtatctgcgcgagttagcggagaacgaagggtaa

SEQ ID NO: 32967 - DNA, 1599 bp, Escherichia coli
gtgctgacacgtctgtctcccatccagattccacttcctttaatccagattgctgccggtgcattactggctcagcccatttttggtttacatgtggaatttaatcctgaacttttcctgttattgtttattccaccgttgttgtttgctgaaagttcaaaaatacaacctaaagagttgatcaaacacagtcgggaaatcgtaggtctggcgctgatcctggtcttaatcactatttttgccgtcggctacgttattcatttactgttaccgaatgttccgcttattgcggcgtttgcattggctgcggtgttgtcgccaacggatgctgtcgcattgttggggatcgtcggtaaaggacgaatcaacaaaagcattcaggaagtgcttgaaggcgaagcattaatgaatgatgcctccggtttggtggcgttgaagtttgctgtcgcagtgactatggggacgatggaatttagcgtgtatggtgcgactatcgccttttttgtcgtggcagtgggcggtattgccgttgggatcgccgttacctggttatatggtaaaggactgttgttgatcagccgttacgctcacgatgagccttcaatccagatcgtgttgatgttgctgctgccgtttattgtttatctggtggcggagcattttggtttatccggcatcctcgccgctgttgccgcagggctaacgaccagccgtattggcgtcgttcatcatgcgcctatacgactgagaattaaggcgaaaagttcctggtcaatgctggaatatgtcttcaacggcatggtatttttgattctgggcttgcagcttccggccatcatttcggaatcactgacccgcgcacaacacgatcccttagtgcaaacctggtcgctggtgctggatattgtgtggatctaccttgcattgatggttatgcgctttggttggctatggttgatgcgtctgtacagccgcaggcggaaaagtaatcatccaatgctgtttgccggatacaaaacacgccacttgttgttagcgacttttgctggcgttcgtggggctataactcttgcgggggtgctttctataccgttattactgcccgatggtgaaccgttccctgggcgctatttgctggtgtttctcgctaccggggtgatcctcttttcgttgctgtgcggcattatcattctgccgctgttattggggaaaaatgttagcctgtttagcgataaccggcagaaagaagagatcgccgccgatttgtttatgtctaaaatggctatcctgagcgtgcaaaaaactcagcaacgtttgcttggtgccagcacggaaaacctcgataatgaattaattatggaaaccggggccagaattatcgattatatgcggcgtaatgatgatgatatgtcggcaaacgataattcgttgcatatgcaacggacaaaactggaaagaacatttaatctggcggcgctgaatgccaaacgtgcagctatttatcaaatgcgagcaaggcaagaagtgtgtgatgaaacactggctaaaattgtcagtgaattagatgtactggaagcattaattatggacagccaataa

SEQ ID NO: 32968 - DNA, 906 bp, Escherichia coli
atgagtcgttcacagaatttacgtcataacgtcataaaccaggtgattgaagatatggcgcggggaaatattccatccccactcccttcacaaagtggactagcagaaatgtataacattagccgcaccacggtacgccacatactccagcatttaagcgcatgcggcgtgctcacccaggtgggaaaggattatgttgtcgcccgcaaacccgaacagaacgatggtttcgattgcatcacagtctcgctgacagagcaaaactacattttcgagcaggcatttttcaccatgattaaccagcgtcagctacgcgccggagagagtttttccgagctgcaactggcgcggacggcaggcgtcagcccggtcgtggttcgagaataccttttaaaatttggccgctatggtctgattcagagcgaaaaacgcgggcagtggagcatgaagcagttcgatcagtcttatgccgaacaactgtttgaactgcgggagatgctggaaacacacgcgttacagcactttctgaatttgccagatgatgattcacgctggttacaggcaaaaacactgctcgaacgccaccggacactgcgtgacagcattggcagtaattttcgtatgttttcgcagttagaccgcgattttcatgccatgctgctatctgctgctgacaacatcttttttaatcaaacacttgaaattatatcggtgatttttcactgtcattatcagtgggatgaaagcgatctgaaacaacgtaatattattgccattgatgagcatatgacgattcttagcgcgctaatttgccgcagtgatttagatgccgtactcgcgctgcgtaatcatctcgataccgccaggcaatcgatgattcgctcagtcaaacagcatcatcgttaa

SEQ ID NO: 32969 - DNA, 2049 bp, Escherichia coli; identical to SEQ ID NO: 10977

SEQ ID NO: 32970 - DNA, 675 bp, Escherichia coli
ttgggcattctgtttggcccctatttaaccgacgatccgcaaaaactgttcaaaatatatgaaagtgactggttcaagcagaaaaatgaaagcctgaagaaaaaaggtattcatgtggttatgaataattatctttatggcacccggcagatcatttctaaaaaacctatccgcacagttgaagacctcgcgggattaaaaatccgtgtgcctaataatgtcatgcagataaaagctattcaggcgatgggagcaaccccaacgccaatgccattaggtgaagtttatcctgcgttaacccagggcgttattgacggagtggaaaacccgatttctgttctgcaaggacaaaaactctatgagcaggcgaaatacctgacgatggtgaattaccttaccaacacctccgtctggattggtggcgaagctttctttagcaccctctccccggaacaactggaaatgattcaccagactggttatgaagctgggctctatagccagaagctcactcttgagcgcgatgctgaaatgctgaaagccatgcaagctgaaggtgtagaggttatctatcctgataccgaaccattccgtaagaaagcccgcgaagtttactcacagttcccggagtggacacctggcctctatgaaaccattcaacaacaactgaaataa

SEQ ID NO: 32971 - DNA, 474 bp, Escherichia coli
atgcgttttttcggcaaactggcagagtttagcgctgcctttgcgctgtttgttctggttgtgatgacaattggagcagtatttatgcgctatttcatcggccaaccgattcagtggacagaagagatgtccgggatgctgatgatttgggtggtgatgctaggtggtatcgtggcagagcgcgaccgggcacatctgaccatcccttttgtaatggatatgctgccagccaccatcagacgagtgattgctgttctggtcgcccttctctccctctgcgtattgctttatatggcctggctgggctaccggctggcggaaatggcgcagtttaaagtgacacaaatactgaaagtttcctggttctggatcgatctggcggtccctgtcggcgcgctggcaactgctctctataccctttactggttaatcaccgatataaagcaaccccatagcggagacgaaaaacaatga

SEQ ID NO: 32972 - DNA, 1272 bp, Escherichia coli
atgagttggttattgattatcccgctaatgatcgtctgtttatttcttaacattcgggtctatctggcgatgtttattggcatcatcgcttactttttattcttctccagcgtgccgatcgaaattgccgtccagaggctaatcgccccgacgcaaagtccttcactactggctattccgttttttattttgctgggtacgctaatgagctacaccggcattgcagaacgcattttacaaattgccaacgtcctggtagggaaaatgcgcggtggtctgggtgtagcgaatattctcgtcagcaccatgatgggcggtgtcagtgcctctaaccttgcagatgcagcaatgttatcgcgcatgatggtgccggaaatggaacgcaaaggttacaaccgtgcctttgccgccgccattaccgctggcggttcgttagtcacgccaatcataccgccgggaattgccctgattatttacggtctggttgcggatgtctctatcggcaaaatgtttatcgccggactggtgcctggtttgctgtgtgcggtcgtgctgatgtttaccgtctacctcgtcgcccgcagaacaaacgccaaaccctcgcgtgaaagctggccaacgggcaaagaagtggtgttctctctcggtcaggcgtggccagcgctgtttctgatttttgccgtagtcggcggcattcgggcgaatatcttcaccccgacggaagcaggtgccgcagcggtattaatcgttctggcgattggctttttcatctaccgtgaaatgaaagtttcccacgtagttaaagctctcggtgaaaccgcacgcgccacggcgtcggtgatgctggtgattatggccagcgccgccctgggttggattttctcaatggaacatgctggcgtcgcggtggcgaatttcgtcacctcgctgactgaaaacaaatatatgttccttttgattatcaacgtattgcttttgacgttggggatgtttctggaaggaaacgccattctgttgatcctggtgccgctactgaaaccggtggtcgaacactttggtatcgatccggtacatttcggtatcatcatgatcttcaacctgtcgattggcgcgttcacgccgccggtgggcaccgtgatgctgctggtgtgtaatatcacgcaagtttctgtaggtaatttctttaagcaatctctgccactgctggtagccctgctgctgatgctgttgctggtcacatatatcccggcaatttcgctgttcctggtataa

SEQ ID NO: 32973 - DNA, 738 bp, Escherichia coli
atggagcaactgaccgcgacagtgaaacaaaatgccgagaacgcgcggcaggccagccatctggcattaagtgcttctgaaacagcacaacgcggcggaaatgtggtggatagcgtggtacagaccatgcgtgatatttctaccagttcgcagaaaattgccgacattatcagtgttatcgacggcattgctttccagactaatattctggccttgaatgcggcggtcgaagcggcacgcgcgggtgaacaaggtcgcggttttgcggtagttgcgggagaagtgcgtaatctggctcagcgtagcgctcaggcggcgcgtgaaattaagactctgattgaagactcggttggcaaagtggatgttggttctacgctggtcgaaagtgccggggaaacgatggcggagattgtcagcgccgtgacccgcgtgaccgatattatgggtgaaattgcctccgcttctgatgagcagagtcgtggtatcgatcaggttggtttagcggttgtcgagatggatcgggtaacgcaacagaacgctgcgctggtggaagagtctgccgccgctgccgccgcgctggaagagcaggccagccgcctgactgaagctgtggctgtatttcgtattcagcaagagcaacaacgtcagcgcgaagcgttggcagtaaacagtgtggcaccggttgcgccgcgcaaaattgccgttgccgatagcggggataactgggagacgttttaa

SEQ ID NO: 32974 - DNA, 765 bp, Escherichia coli
atggcgcgccttaacctgaacgataacgggacaaacatttgctgggactttaccaacctttatggcggtacgatgatttttcccggtgacagcggatacctcaaaatgggtaactgccttatgtcatacagcaagcgtggaagtaacgcgcttattaaatttgattacaccgacacattacagatcaaatatgccaatcatgggtcaaccatgacattaaacacacagggaaccgcttatgctggtgttactgctcaattgtggggcaactccagccgtcctgttgtttatgaagtcggtgttgatggtggcgcttatatgttctatgcgcagaaaaataccgataacacctatatgttaagcgttaatggtgcatgtcatgccaccgcatttaaccagcattccgaccgggatctgaaagacaacattcaggtgatcgataatgcaaccgaccgcatccgtaaaatgaacggctatacatacacgcttaaagaaaacggtatgccctatgctggtgtcattgcacaggaagctctggaagcaatcccagaagttgtaggttccgcaatgaaatatcaggacggtgcgagcggatcggaaggtgaagaaggtgaacgttattacacagtagattattctggtgttactggcttgcttgttcaggtagccagagagtcagacgacagaataacagcactggaagaagaaaacgcagaattaagacaaagattatctgcaattgaggcggcgcttgcgtctaaataa

SEQ ID NO: 32975 - DNA, 219 bp, Escherichia coli
atgtatctgcttccattctcatgttcatatttcaccttacgctttcactatctgttattggaagtaccgatttattttggtgctgctcacttacggtcattcacggaagaggatggtggtgaaccgtacgatcctggctgctggcgagggaaggttcaggactgggatggagcaggtttagtggtggaagatgagtcggaatttctgactggtcagtga

SEQ ID NO: 32976 - DNA, 528 bp, Escherichia coli
atgaacctaaaacggatatctcactgcgcggctgtactggcgacggtgctgctgacgccccatgttcaggcggctgacaacctgcatttctacggcaatttactcagtaaatcctgcacgctggtggtccagggcgaaacgctggcggaggtgcattttcccaccatcagccgtaaagacctgatggtgaccgggcagtcggcgcgggtgccagtggtgtttcagctcaaagattgcaaagggccagctcagtatgaagtccgggtgacgctgaccggtacagaagacagtgaacagcccggttttctggcgctggatgcatcttcggcggcgcaaggtgtcggaattggcatggaaaaaaccgatggaacaccggtgccgattaacaataccagcggcgcgacctttgtgctgagtaacggcaataacaatctgaattttaatgcctggctccaggcgaaaagcggccgggaagtgacgatgggtgaatttaccgcttttttaaccgcaacgtttgagtacatttaa

SEQ ID NO: 32977 - DNA, 1020 bp, Escherichia coli
atgctcgccgccgaacagcgcgttaatggtttcgtggatgccgatgtaacccagcgaaatagacgcacgaccgtttttgaatatttcagaaacgtcgtcgtcagcattcagacgcacgccacaagcgccttccatatagaggatcggggctacgcgcgctttcacgccttcgagacgagcgatacgggtcatcagcgccttacgtgccaacaccagacgttcatccagcagcttccagaaggtggcttcatcgccttttgcttccagagcaatacgcggcaggttcaggctgatcacgccgaggttgttacgaccatcgtggatctgctcgccgttttcattttcccacacgccgaggaagctgcggcagcccatcggggttttaaacgaaccggtgactttcactacctgatcgtagttcaggatatccggatacatgcgcttgcttgcgcactccagcgccagctgtttgatgtcgtagttcggatcgtcttttttatggttcaggccatcgcgaatcgcaaacaccagtttcgggaacaccgccgttttacggtttttaccgaggccggcgatacggttacgcaggatagattcctgaatcaggcgcgactcccagctggtgcccagaccaaaaccaaaggtcacaaacggtgtttgaccgttggcggtgtgcagggtgtttacttcgtactccagcgactggaaggcatcgtagcactctttgatggtacgagagttagcgtagccttcggcgtccgggatgttccactcttctgcggtcttgcgatgtttgttgtagctggcggtgacaaacggtgccagcacttcatcgatacggttaatggtggtgccgccataaatatggctggcgacctgagcaataatctgcgcagttaccgcggttgccgtagagatcgatttcggcggttcaatctcggcgttccccattttaaagccctgggtcagcatgcctttcaggtcgatcaacatgcagttgaacatcgggaagaacggtga

SEQ ID NO: 32978 - DNA, 840 bp, Escherichia coli
atgacctttaattttcatcacctgaaggtcgattatcccggtggtgaaaaatggacgctggctaaacctgactttgtggcgttgaaaacattgttccgccactggcaacaaggaatgcacaacgtggcatggaatgccttgttctggtgtaaccacgatcagccgcgcattgtttctcgctttggtgatgaaggtgaataccgcgtgcctgcggcaaaaatgctggcgatggtgctgcatggcatgcagggaacgccgtatatctaccagggcgaagagattggcatgaccaacccacatttcacgcgcattactgactatcgcgacgtggagagcctcaatatgtttgccgagctgcgcaacgatgggcgtgatgccgacgagttattgacaatcctcgccagtaaatcccgtgacaacagtcgcacacccatgcaatggaccaacggcgataatgccgggtttacggctggcgaaccgtggattggcctgggcgataactatcaggaaatcaacgtagaagcagcgctggccgatgagtcctcggtgttttacacctaccaaaagttaatcgcactgcgtaagcaagaagccgtcctgacatggggcgattaccaggatctgctgccaaacagccctgtattgtggtgctatcgccgtgagtggaaggggcaaaccttgctggtcattgccaaccttagccgtgagacccaaccctggcagccagggaaaatgctcggcaactggcagcttgtgatgcataactacgaagaagcctcaccacaaccctgtgccatgactttacggccttttgaggctgtctggtggttacagaagtaa

SEQ ID NO: 32979 - DNA, 1470 bp, Escherichia coli
atgttcgccgccgaacagcgcattaatcgtttcgtggatcccgatataacccagcgaaatcgatgcacgaccgtttttgaagatttcagaaacgtcgtcatcagcattcagacgtactccacaggcaccttccatatagaggattggggccacgcgcgctttcacgccttccagacgggcgatacgggtcatcagcgccttacgcgccagcaccaggcgttcatccagcagcttccagaaggtggcttcatcaccttttgcttccagcgcaatacgcggcaggttaaggctgattacgccgaggttgttacgtccatcgtggatctgctcgccgttttcgttttcccacacgccgaggaagctgcggcaacccattggcgttttaaacgacccagtaaccttaaccacctgatcgtagttcagaatgtctggatacatgcgcttgcttgcacactccagtgccagttgtttgatgtcgtagttcggatcgccttttttatggttcaggccatcgcggatcgcaaacaccagtttcgggaacacggcagttttacggtttttaccgaggcccgcgatacggttacgcaggatagattcctgaatcagacgcgactcccagctagtacccagaccaaagccaaaggtgacaaacggcgtctgaccgttggctgtgtgcagggtattcacttcatattccagcgactggaacgcgtcgtagcactctttgatggtacgagagttggcgtagccttcagcatctggaatgctccactcttccgctgttttacggtgcttgttgtagctggcagtgacgaacggtgccagaacttcgtcgatacggttaatggtggtgccgccataaatatggctggcaacctgggcgataatctgtgcagttactgcggttgccgtagagatcgacttcggcggttcaatctcggcgttccccatcttaaagccctgggtcaacatacctttcaggtcgatcaacatgcagttgaacatcgggaagaacggcgagtaatcgagatcgtggtagtgaatatcgccacgctcatgcgcctgaaccacgtcacgcggcagcaaatgctggcgtgcatagtgtttagcaacaatcccggccagcaggtcgcgctgggtcggaatcaccttgctgtctttgttggcgttttcattgagcaacgaagagttggtctgctcgaccaggccacggatctcctggttcaggcgaccgcgtttttcacgttcaatgtcgcgatcatgacggtactcgatgtaagcacgagccagttgtttgtacgggccagacatgagctggttttcaactgcagtctggatttcgttgatatcgacctgggtgcggccttgcatttgctcgctgacgacagcggcaacagtggcacaataatctgcatcatcgacttccgctgctttagctgcacgcagaatagcttctttgatgcgctctga

SEQ ID NO: 32980 - DNA, 840 bp, Escherichia coli
atgacctttaattttcatcacctgaaggtcgattatcccggcggtgaaaaatggacgctagctaaacctgactttgtagcgttaaaaacattgttccgccactggcaacagggaatgcataacgtcgcgtggaatgctttgttctggtgtaaccacgatcagccgcgcattgtttctcgctttggcgatgaaggtgactaccgagagcctgcggcaaaaatgctggcgatggtgctgcatggtatgcagggaacgccttatatttaccagggggaagagattggcatgaccaatccgcatttcacacgcattaccgattaccgcgacgtggaaagcctcaacatgtttgccgaactgcgcaactgcgggtgtgacgccgaagagttattggcgatcctcgccagcaagtcccgcgataacagccgcacgccaatgcaatggaacaacggcgataacgccgggtttactaccgccgaaccgtggattgccgtgtgtgataactatcgggaaatcaacgtggaagccgcgctggccgatgaatcttcggtgttttacacctatcagaaattaatcgcgctgcgtaaacaagaacccattctgacatggggcgattaccaggatctgctgccaaacagccctgcgttgtggtgctatcgccgcgaatggcaggggcaaaccttattggtgattgccaaccttagccgcgacatacaaccctggcagccagggcaaatccgcggcgactggcaactgttaatgcacaactatgaagaagcctcctctcaaccgggagccatgacattacggccttttgaggctgcctggtggttgcagagataa

SEQ ID NO: 32981 - DNA, 1215 bp, Escherichia coli
atgaaaattattgctgtggatgtttttgttacttgtcccgggcgtaatttcgttacgcttaaaataaccactgaaagcggactttgtggattaggagatgccacgttaaatggtcgcgaattgtcggtcgcttcttatctgaaagatcatctttgtcctcaattaattggccgcgatgccagccgtatcgaagatatctggcaattcttttataaaggagcttactggcgacgtggtcccgtcacgatgtcggccatttctgccattgatatggcgttgtgggatatcaaagctaaagcggcaaatatgccattgtatcaactgcttggtggcgcttctcgtgaaggcgtgatggtttattgccacaccaccgggcggacgattgatgaagtccttgaagactatgcaaagcaccagcagatgggctttaaggcgattcgtgtgcagtgtggtgtaccgggtatgcaaaccacctatggtctggcgaagggcaaaggactggcgtatgaaccagcaaccaaaggcctgtggccagaagagcagttgtggtcttcagaaaagtatctcgattttacgccgaagttatttgaagcggtgcgtaataagttcggttttaacgaacatctgttgcatgacatgcaccatcgcctgacccccatcgaagcggcgcgctttgggaggagcattgaggattaccgcctgttctggatggaagatccgacgcctgccgagaaccaggaatgttttcgtctgattcgccagcataccgtgacgccgattgcggtcggtgaagtgtttaacagtatctgggactgcaaacagttaatcgaagagcagctgattgactatattcgcacgacgattacccatgcaggcggcattaccgggatgcgacggattgccgattttgcatcgctttatcaggtacgtaccggttcgcatggcccttcagatttatcgcctgtttgtcatgcggcggcgctgcattttgacctctgggtgccaaactttggcgttcaggagtacatgggctattccgaacaaatgtttgaagtcttcccgcacagctggcgcttcgatgaaggttatatgcacccaggcgatgaaccggggctgggtatttctttcgatgagaaactggcggcgaaatatccgtatgacccggcgtatctccccgtcgcacgactggaagatggcacattgtggaactggtaa

SEQ ID NO: 32982 - DNA, 666 bp, Escherichia coli
atgtacggcggctcgttgctctctacccagcaaggtttatgggcgaaagatggcgacaactttgtctatattgaacgagtaaaaggcgatgaagagttaggtggcatcagtatttatgccttcaacgagaatcgtcgtctgcaatccgttcgctatgctgcttccgcgaagtttgacccggaacataaagtctggcgtctctcgcaggttgatgaatctgacctgaccaatcccaaacagataaccggttcgcagactgtgagcggtacctggaaaaccaacctcacgccggacaaactgggcgttgtagcgctggatccggatgctctctccattagtggtttacacaactacgtgaagtatctgaagtcgagtggccaggacgccggacgttatcagctcaatatgtggagcaaaatcttccagccgctttctgtcgcggtgatgatgttgatggcgctgtcgttcatcttcggtccactgcgcagcgtgccgatgggggtacgggtggtcaccggtatcagcttcggctttgtgttctacgtgctggatcagatcttcggcccactgacgctggtttacggtatcccgccgatcatcggcgcactgttgccaagcgccagcttcttcttaatcagcctgtggctgttaatgagaaaatcgtaa

SEQ ID NO: 32983 - DNA, 1503 bp, Escherichia coli
atgagcgaaccgcgtttaattgcccgcacgccggacacagaactgtttttactacccgctatggctaaccgtcacggactgattactggcgcaacagggacaggtaaaactgtcacgctgcaaaaactggcggaatctctgtcagaaatcggcgttccggtatttatggccgatgtaaaaggtgatttgaccggggttgcggcagaaggtactacctcggaaaaactgctcgctcggttgaaaaatatcggcgtcaacgactggcagccacatgcgaatccagtcgttgtgtgggatatttttggtgagaaaggtcatccagtacgggcaacggtctcggatctgggaccgctgttgcttgcacggctgttaaatctcaacgacgtgcaatccggcgtgctgaatatcatcttccgtattgccgacgatcagggactattgttactcgactttaaagatctccgggcgattacccaatatatcggtgataacgccaaatcattccagaatcagtacggtaatatcagtagcgcatcggttggcgccatccagcgcggattactgacgctggaacagcaaggggcgacgcatttctttggtgagccgatgctggatatcaaagactggatgcgtaccgatgctaacggtaaaggtgttatcaatattcttagcgccgaaaagctctaccagatgccaaaactgtacgccgccagcctactgtggatgctttctgagttgtatgagcaactgccagaagcaggcgatttggataaaccgaaactggtatttttcttcgacgaagcgcatctgctgttcaacgatgcaccgcaggtgttgctggataagattgaacaggtaataagacttatccgctcgaaaggtgtgggcgtctggtttgtttcgcaaaacccgtctgatatccctgacaacgtgcttgggcagttgggaaatcgcgttcagcacgctctgcgcgccttcacgccgaaagaccagaaagcggtgaagacggcggcgcaaaccatgcgtcccaatccggcatttgatacggaaaaggcgattcaggaactaggaaccggcgaagcgttgatctcttttctggatgcgaaaggaagtccttctgtggtagagcgtgcgatggtgatcgcgccttgttcacggatggggccggtaacggaagatgagcgtaacggcctgattaatcactctccggtgtatggcaagtatgaagatgacgtggaccgggaatccgcctatgagatgctgcaaaaaggcgtgcaggccagtaccgaacagcaaaataaccctcctgccaaagggaaagagataagtgaagatgacggtattctgggtgggttgaaggatattttgtttggcactaccggaccgcgcggcgggaagaaagatggcgtggtacagactatggcgaaaagcgccgcccgtcaggtgacgaaccagattatacgcggggtgctggggagtttgctggggggaagaagaaggtaa

SEQ ID NO: 32984 - DNA, 657 bp, Escherichia coli
  misc_feature (628)..(637): n is a, c, g, or t
atgggcaatggtgtggttggcgtaaattactacaccagctcaggccgtggcgtaactggcgaaaacggcaaattcaacttcagctggggcgaaaccatctcctttggtatcgacacctttgaactgggctcagtgcgcggcaataagtcgaccattgcgttgactgaactgggtgacgaagttcgcggcgcgaatattgatcagcttattcatcgttactcccaggccggaaaaaatgatgagcgtgaagtgccggacgtagtgcgcaaggtctttgccgagtatcccaacgtaatcaacgagattatcaatctctcgttatccaatggcgaggcgttgagcgaaggcgatcaaacctttgagcggacaaacgaatttcttgagcagtttgaatccgggcaggctaaagagattgatacggcgatttgtgactcccttgggggctgcaactctcagcgttggttctcgttgacagcacgcaatgttaatgacggccagattcagggcgttattaacaagctgtggggtgtggatacgaactacaaatctgtcagcaagttccatgtattccatgactctaccaacttctatggcagcaccggtaatgcgcgcggtcaggcagtggtgnnnnnnnnnngaaaaacgcgcctgggataa

SEQ ID NO: 32985 - DNA, 471 bp, Escherichia coli
  misc_feature (412)..(421): n is a, c, g, or t
atgaaagccgaactcagcgctgtttcctgtaacctgaccatgacgtttgaaatagacagtatccaggttggtacctacggtcatgctggctttcgcgtccggcgtccatttatcgtcggacagatagcgcaacacgttctgcataaagtgcttcatatcattagaatcactgttacgcgtacactgaccgtttttatcaacaccgccttcccagctgtaaccgttcggacaacgcaaaatgctgttgtagtgcgggttaccgataaccatcagtttgccctcaccgacttgccccagcgaaataaacggcaggttaaaggtggcggtatcgcgcgtaacgttttccggctcaacgagagaaggcgcttccgtaatgtacgccagctcgtttttatcccaggcgcgtttttcnnnnnnnnnncaccactgcctgaccgcgcgcattaccggtgctgccatagaagttggtag

SEQ ID NO: 32986 - DNA, 546 bp, Escherichia coli
atgatcggcctcatcaataaaggcataacgcgtttcctgtttgccatctacatcttccagccagctggcaacttccagcttcggtttgtcatcaggtttgttttctacctgatatttccacttaacttcccctgtcttactatcgatggtgtacggcagcgcaccatctacggcaggataacgttcatagacccaaatgcccgttgcgcgctgctgacgaacgcggttcggatacccttgcggatcgttatttactaccgacttgttcagtgccatcgacagacctgcggcatcaagcagacgtacaaagccagacgcgctctcttccttaagattgctcatcacgttttccatgatcagcaccgatccacctttgttcagataggcgatcagatcggtcacatcctgctgagtcagcttcggtttgctggtatctgctcgcagcgggattgcataaggatcgttaccaacctgagtcacatattcaaagccgttaaggatcagcagcggcatttcctgcgggtcgagatcgccatagctacttaa

SEQ ID NO: 32987 - DNA, 849 bp, Escherichia coli
  misc_feature (832)..(841): n is a, c, g, or t
atggatagtcaaaaaattagtcagttagtagagaatcgtgagttatatcccatcactgatattggcagggaattgaatttcattttcaaaccatctcttttttggtgtcctacataccttgcacaatctgcttggctagaacacattccttttgctttctggttagttgacacactgcggccaagaaatattgttgagctgggaactcattatggaagttcttatttctcattttgccaagcagtctctaaactagatttagaaacatgctgctttgccgttgatacctgggggggagatgaacatgcggggctgtatggcgaagaagtttacaggcaagtatcagaatataatcaacagcactattcaggtttttctactctcattcgcagtacatttgaccaagcgttagagcatttttcacaaggtagcattgatctgcttcatattgatggtttgcatacgtttgaagcggtacgccatgattttgaaagctggttgccaaagctttctgaaagggctgtggtcattatgcatgataccaatgttagggaacgtggttttggcgtatttcagcttttggatgaattaaaacgacaatatccacactttgagttcgctcatgggcatggactagggatagttggtgtggggtgtgaacaatctccagaacttaataatttgtataaaatctcagaaaatgctcgtgtaaccaaacaagtccaagacatcttttgtcgtttggggaaatcttgtagcgagagttgggagaattcccagttaaaacgtcagttgtctacacaacaagatgacattcaggctgaacggcagnnnnnnnnnnattggtag

SEQ ID NO: 32988 - DNA, 1824 bp, Escherichia coli
atggaaaagcagcttgcacatgctcaagtgcaatctgatgagctatcttttgcccagcaacatatcaattcgctgacatctgaggtggcattattgcaagaacagctcaatgaggcccaaacaaacttgagtgtatggtcgcaggagcgaatacaagccaacgatgagttgcatacagctctgcatcaactagagcagcaacagagtcgcatcacgagccaggagcaagctcgccatcaactggagcaacaggtcaataccctgacgttacaattgagtgaagaaacacagcgtgcatctcaccttactctcgcgctcagcaagagcaacagagcattgagcgaacattcgcggcaaattaccgaattacagcttcagttggaacaagcgctacatatccaggatacacaggttcgtacactggccgagcgagacaatatggtgaacttgttgcaacagcaggctaatgcattgcagcaacagcttgacggtgagcagcaaactaaaaaccagttgcagcatgcttatggattactggaagcacagcacgatacgttaggcttggaatatgatgcactgaaaaaggtaagtgcaaatctacagcaacagctggaagaagggcaacttgtgcaacaaacattgcagcaaagcatagatgagcaaactcttgctttggctgcggcttctaaacaatgtgatgaactgactcaactaatagcagtgcacgagtctaatattgcgtcacaaagcgacgtaatggctgctcaacaagcagagtataagcaactcacagaggcgctatcagcattacaacaacaactggcagttgaacagaccacacatcagcaacagattagcgaacgggacttggcattagccgagcgttttagtgaaacggtagctctaacacgtctattagaagagcgcacgcagattatcactgaactagagattgaaaaacaattgcttaccaccaagttgtctggcgtagagcagcagttaagggctgagcaagagtcgcttcagcaggcccagtctgcattgctctcagcagcaaaagaaaagcaacatcaacttgatgagttggaatcggtgctcaatgagcggtacagtgagattgcaaccttaacccgttggctggaagaacgtgatcaggcactccttagtgcagcaagtgaacaacaacagaccaatgaaacatatagagctcagcagcaagcctggaaagaagagaaggaggccttaatccgggaacaaaccttgctgcagagccagcagtctgtactgcaagaccaggtaagagaactaaccacactcaacggaaggttggaagctaatattgcagagcgtttccaggagttggcagtcatgacgcggcatatggagcagcttagctgtgagttaaaacaaaaagagcggcaattgaatagagcaaaagaacgcgctcagaatttgaagagaaccgtctcttggaagattacagccccagttcgtgctcttggcagaacatttaaggaggagactccatccagaacaacagctacagagagtgccgcggagcgtattgccgcttcaggattgtttgatgaactctggtatcaacatcgctacccagaggttgcagacactgggctctcagctcttgagcattttattagcgtgggggcggataaaggttatagccctagtgagcagtttgatactcgctggtatttgcaaacctatccggatgtggcccaaggaggcattaatccgctgcttcattacattatgtatgggaagtttgagcagcgcagttgcctgcctgtcaataagggagaataa

SEQ ID NO: 32989 - DNA, 453 bp, Escherichia coli
atgaaatttctggaatgtgctgtccgggatgtgatttatgggaccaatgtccgtattgtcaaaccggtcaacatttatgaatgtgaactcagggacaacgtgtttgtcggccccttcgttgagatacagaaaggctgtgtcattggtagtggaagtcgaatacagtcgcatacgtttatttgtgagaacgtaacactgggagagaactgcttcattggtcataacgtgacgttcgccaacgatctgtttcgttcaggagcaccagatccgtcaccggataactggatcagcattatcctgggggattcggttactgttggcagtggagccattattctgtctccgtatatatgcagcggagctgttatcggtgcgggggctgttgtagtaaaaccgattgagaacaaaggcatttatgcaggaaacccggcaagactgatcagaatattatga

SEQ ID NO: 32990 - DNA, 333 bp, Escherichia coli
atggaaaactgggttattcaggagctaaaatcactggatataggggactcaagacttaataaaagagtaaaacatatcctcaatagcctcagtcgttcaccagaagaaagtattcctgtttcctgccgtacctggagtgaaacaaaggcagcttatagttgtttttcaaacgataaagtctctgctaataaccagacaggagtaaccagaccaaccgaaaactccggggaggtgattacccgctggcaggataaatctgtagtttttgatgccagctataacgtgtttgacgataaagtattacgaaagaactttaatgagttcatggagtaa

SEQ ID NO: 32991 - DNA, 183 bp, Escherichia coli
atggcgtcgctgctggtggacgagactgcaccgtttgcaacatcagtgattacactgggagcattattaatgccgtgtttggcgctgaatttgcctgcggttgcatcccaaagtagggcgtcgccgagtgatgtgctaaatgatgtgttaatggctgccagagcatcaccgacgttagtgtag

SEQ ID NO: 32992 - DNA, 948 bp, Escherichia coli
atgcaaaatcggctgaccatcaaagacatcgcgcgcttaagcggcgtggggaaatccacggtttcccgggtgctgaataacgaaagcggcgtgagtcagcgcacacgtgagcgcgtggaagcagtgatgaatcagcatggattttccccttcccgctccgcacgcgccatgcgtgggcaaagcgataaagtcgtcgccattatcgttacccgtctggattcgttgtcagaaaatctcgccgttcagaccatgctgcctgcattctatgaacagggctacgacccaatcatgatggaaagccagttttcaccacaattggtcgcagagcatctgggcgttctgaaacgtcgtaatattgacggcgtggtgctgtttggttttaccggcataacggaagagatgttagcccactggcagtcatcactggtgctgatggcacgtgacgcaaaaggctttgcttcagtctgttatgacgacgaaggggcgatcaaaatcctgatgcagcgactgtatgaccaggggcaccgcaatatcagctatctcggcgtgccacacagtgacgtcactaccggtaagcgacgccatgaggcctatctggcattttgcaaagcgcataaactgcatcccgtcgccgctctgccgggccttgccatgaagcaaggctacgataacgtggaaaaagtgattacgcctgaaaccaccgcgttgctgtgcgcaaccgacacgctggcacttggcgcaagtaaatacctgcaagagaaacgcattgacactctacagttggcgagtgttggtaatacgccgttgatgaagttcctccatccggagatcgtcaccgttgatcccggctacgctgaagccggacgccaggcggcctgccagttgatcgagcaggtaaccggacgcagcgaaccccaacaaatcgtcatccccgccaccctttcctga

SEQ ID NO: 32993 - DNA, 315 bp, Escherichia coli
atggtttacgcccataacgacgacatggtaataggcgcgattcaggcgattaaagaagcgggtctgaagccgggcaaagatattctgacaggctctatcgacggcgtgccggatatctacaaagcgatgattgatggtgaagcgaatgccagtgttgaactgacgccaaacatggcaggcccagctttcgacgcgctggagaaatacaagaaagacggcaccatgcctgaaaagctgacgctgactaagtccaccctttatctgcctgataccgcaaaagaagagttagagaagaagaaaaatatggggtattga

SEQ ID NO: 32994 - DNA, 852 bp, Escherichia coli
atgttgtccgatgcagcaccggaagtcgcaaacggtctggccttcaacgtggtagcgaaaggcgacccgcgtgctgaactgggtaacgacacacagtacgacatgatggcgctgcgtaaatctctgacgctgactgaacatcagaacctgagtctggaatacgggattgcgcgtctggagggtaatggttcagataccgcaggcgataacggagtgacaggcggttacagccagttcttcggtctgaaacaccagatggcctttgacaacggtatgagctggaataacgccctgcgttatgatgtgcaccagctcgacagcagccgctcggtagcgtacggcgatatcaataaaacagccgatgctaatgtgaaacaacagtacctggagttccgtagtgaaggggcgaaaacctttgagctgcgtgaaggcctgaacgtcacgccatatgccggggttaaactgcgtcacacactggagggtggctatcaggaacgcaatgcgggtgactttaacctgagcatgaacagcggtagcgaaacggcagtggacagcattgttgggctgaaactggactatgccggtaaggacggctggagtgcgaacgccacgctggaaggcggcccgaacctgagctatgtgaaaagccagcgaactgcgagcgtttcgggcgcgggaagccagcgtttcaacattgatgatggtcagaatggtggtggtttcaacagcctggcgacaatgggtgtgaaatacagcagccaggaaagtgcgttgcaggtagatgcattccactggaaagaagacggtatcagcgataaaggcgtgatgctgaactttaagaaaacgttttaa

SEQ ID NO: 32995 - DNA, 1200 bp, Escherichia coli
atgcctgctcgccaagtatgtcagaattttttccgcggtgctttagcaccatttcacaaataccgacaaaatgctttgttggatgccactatcgcactaatcaatggcgcatctctgacgctgaccagcatcggacgttatttacccggtaatgctcaggtcaaaaataaaataaaacgtgttgatcgtctgctcggtaatgagtctcttcatcacgacatccccctgattttcagaaacattatttccatgctgacgagcaagctgtcactgtgtgtcatcgccgttgactggagtggatacccctcacaggagtatcacgtactccgcgccagcctgatttgctatggacattcgattccattgctgagttggatagttccttcggaaaaacagcaaaatgcaaagatacagcaagcctttcttaatactctttccgaagcggtaaacccaaaagcaagggtaatcatcgtcacggatgcagggttccagaatgcctggtttcggcacataaaatcactcggctgggattttattggccggatacgaggcaataaacaactgcatctggcgagaaaaggtgaatgctggttcgggcgtcaggaattacaggccagtaacaaacctgaatatctggggccggggacgctttcccgggcggaatacgcccgttgcgatggtcatttttatttgcacaaaaaagagccgaaaggccggagaaataaacgttcgcgttgtggtatagccagaccatcacagataaaagatgccaggtcggcggcaatagaaccatggttaatattcagcagcacagatgactttaaatcgcgagaaatcatgaagttatacagccgccgaatgcagattgagcaaaacttcagggatgaaaaaagtgagcgttttgggttcggtctgcgagccagttacagctgttcggcaggaagaatgctggtactgagcctgctggcaacactgagcacaatagtgctgtggcttattggctatcacgctgaaaatcaagggttacatcttagatatcaggccaacagcattaaaacgcggcgggtaatctcgtatctgacgttagcggagaatgtcttacgacactccccgctaattttaaaacgaacggtgctaagcaccattcttaatcacctcaccagaacctaccagaatatggtgttggtttattatcgctga

SEQ ID NO: 32996 - DNA, 213 bp, Escherichia coli
atggtacagcccggcaacgtcgggtttgctctgtgcaactcggattgcatgggcggtacaatcggccagcaactcagctccagttggagcgccaaactgatcattaatgaccgatatctcgcgacgctctttgccaagacgcagcatagttttggcgaagttggcaccgcgcgcagcataaacccaactggtacgaaagataaggtgacgtga

SEQ ID NO: 32997 - DNA, 1122 bp, Escherichia coli
atgccgtttattttcaaacatattgcggtaatgcctgatgtacatctgggtaaaggttccaccattggtagcgtgatcccaaccaaaggagcgattattccggcggcggtgggggtagatatcggttgtggaatgaacgcgctgcgtaccgcgttaacggcggctgacctgcctgaaaacctggcggagctgcgtcaggcgattgaagctgccgtgccgcatgggcgtaccacaggccgttgtaaacgtgataaaggcgcatgggaaaaaccgcctgttaacgtcgatgcgaaatgggctgagcttgaagccggttatcagtggttaacgcaaaaatatccccgtttccttaacactaacaactataaacacctgggaacgctgggaacgggtaaccactttattgaaatctgccttgatgagtcggaccaggtgtggattatgctgcactccggttcacgcggaattggtaacgccatcgggacttattttatcgatctggcgcaaaaagagatgcaggaaacgcttgaaacattgccgtcgcgtgatctggcgtactttatggaaggtacggaatactttgatgattacctgaaagccgtggcctgggcgcagctttttgccagccttaaccgcgatgcgatgatggaaaacgtggtaacggcgttgcagagcattacgcagaaaacggtaaggcagccgcaaacgctggcgatggaagagatcaactgtcaccacaactatgtgcaaaaagaacagcactttggcgaagagatctatgtgacgcgtaaaggcgcggtgtctgcgcgtgctggtcaatatggaattattcccggttcgatgggggcgaaaagctttattgtccgtgggctgggaaatgaagagtcgttctgttcgtgcagccacggtgccgggcgggtaatgagccgtactaaagcgaaaaaactgttcagcgtggaagatcaaattcgtgccaccgcgcatgtggaatgccgtaaagatgccgaagtgatcgacgaaatcccgatggcgtataaagatatcgacgcggtgatggcggcacaaagcgatctggtggaagttatctacaccctgcgtcaggtggtgtgtgtaaaaggataa

SEQ ID NO: 32998 - DNA, 1590 bp, Escherichia coli
gtgattgaagtggagtttgtccatctggcggggctggagagttatcccggtcagttgacgttactggatacccccgggccaaatgaagccgggcaaccgcatctgcaaaaaatgcttaaccagcagctggcacgcgcctcggcggtactggcggtgctggattatacgcaactgaaatcgatctccgatgaagaggtccgtgaggcaattttggcggtggggcaatcggtgccgttgtatgtgctggtcaataagttcgatcaacaggatcgtaacagtgacgacgccgaccaggtgcgggcactgatttccggaacgctgatgaaaggctgtattacgccacagcagatatttccggtgtcgtcgatgtggggctacctggcgaatcgggcgcgccatgagttagccaacaacggtaagttacccgcgccagagcaacaacgctgggtggaagattttgcccatgccgcgctcggcaggcgctggcgtcatgccgatctggcggacctcgaacatattcgccatgctgccgatcagttgtgggaagattcgctgttcgcccagccaattcaggcgttgcttcatgccgcttacgctaacgcctcgttgtatgctctgcgatctgccgcgcataaactgttgaattacgcgcagcaggcgcgggaatacctggattttcgtgcgcacgggttaaacgtcgcttgtgaacaattgcggcaaaatatccatcaggtcgaagaaagtttgcagctattgcaactcaatcaggcgcaggtgagcggcgagattaaacatgaaatcgagttggccctgacctgcgccaaccactttctgcgtcaacagcaagatgcggtgaatgcgcagttagccgcgttgtttcaggatgattcggggtcattaagcgagatgcgtacccgctgtgagacactgttacagacggcgcagaacaccatcagtcgcgactttatgctgcgttttgccgagcttgaatccactctttgccgggtgttaaccgatgttattcgccccattgagcaacaagtcaaaatggaattgagtgagtcagggtttcgtcctgggtttcattttcctgtttttcacggcgcagttccccacttcaacactcgccagctgttcagtgaagtcatttcgcgccaggcagcaacggacgagcagagcacgcgtttaggcgttgtgcgtgagactttttcgcgctggttgaatcagcccgactggggacggggaaatgagaaatccccgacagagacggttgattacagtgcgttgcaacgagcattaagcgcagaagtcgatctttattgccaacaaatggctaaagttctggcagagcaggtcgatgaatctgttacggcaggcatgaatacttttttcgctgagttcgcttcatgtttgacggaattacagacgcgtttacgcgaaagtctggctctgcgtcaacaaaatgaatcggtggtcaggctgatgcaacagcaattgcagcagactgtgatgactcacggctggatttacaccgacgctcagctgttacgcgatgatattcaaacacttttcacggcagaacgatattga

SEQ ID NO: 32999 - DNA, 441 bp, Escherichia coli
atggcgaccgacaacattggtgtggaattactggcagcaacgccgttccgccataaaatcggcacccgggcgaccggcgatattgcaaccgttcatcatctgccgccaacactgatggcgcagtggtattttggtgatgccagcagcaaattccgtccttacgttggtgcaggtattaactacaccaccttctttgataatggatttaacgatcatggcaaagaggcggggctttccgatctcagtctgaaagactcctggggagctgccgggcaggtgggggttgattatctgattaaccgtgactggttggttaacatgtcagtctggtacatggatattgatacgactgccaattataaactgggcggtgcacagcaacacgatagcgtacgcctcgatccgtgggtgtttatgttctcagcaggatatcgtttttaa

SEQ ID NO: 33000 - DNA, 1005 bp, Escherichia coli
gtgaagcgtaacacgatggataacggcgctaccgtgctggatattctcggaggcgataacttcctcggtctcggacgcagcagcctgtctggtcagtcaatatcagaagtgttcctcaacattaaagagaaagtgctggcgtggaagccggatatcatccgcttgtggaaattccctaccgagatgaaaacgttcaccattgatcagaacaaaaacatgatcgcattctcaggaagccacttccgcctgccactgctgttacgcgtgtcagataaacgcgtggagcctctgccagaaagtgaatactccgcacctctgcgtttccagttagctgatttcgccccacgagacaatttcgtctgggttgaccgctgttacaagatggcgcaactgtgggcaccggaactggcgctctctaccgactggtgcgtctcacaaggccaacttggcggacaacaaattgtgcagcatgttgataagcctgaatggaaaggcaaaacagcgtttaaagacacggtcatcgacatgaaacgctacaaagagaatgttgatacgctgaaaattgtcgataacgatattcgctacaaagcagacagtttcatctttaacgtcgctggtgcgccggaagaggtgaaacagttcagtggaatttcccgcccggaatcctggggacgctggtcaaacgcgcagttaggcgatgaagtgaaaatcgagtacaaacatccgctgccgaagaaatttgacctggtgatcaccgccaaagcctatggtaataacgccggccgccccattccggtacgcgtaggcaatgaagaacaaaccatcgtgctgggtaatgaagtgaccaccaatacgctgcatttcgataacccaaccgatgccgatacgctggtgattgttccaccggaacctgtcgcaaccaacgaagggaacattctcggccattcgccgcgtaagctcggcattggtatggtggaaatcaaagtggttgagcgtgaagggtaa

SEQ ID NO: 33001 - DNA, 816 bp, Escherichia coli; identical to SEQ ID NO: 13638

SEQ ID NO: 33002 - DNA, 429 bp, Escherichia coli
  misc_feature (409)..(418): n is a, c, g, or t
atggctaatattgcaggcatcgttaatgaagcgaagaaaaaaagcaaagatgtgtttttctttgatgcaggcgactattttaccgggccgtatatcagcacactgaccaaaggtgaagctattattgatatcatgaacactatgccctttgatgcggtgtctgttggtaatcacgagttcgatcacggtgtgcccaatatggtgtctcagttatcaaaagcaaaattccccattctgctgggaaatatctactacaccgatacgaataaaccagtttgggatcatccgtggaccattatcgaaaaagatggtttaaagattggtgtgattggattgcatggcgcattcgctttctatgatacagtcgcggcaaaagcacgtgaaggcgtagaagccagagacgaaattnnnnnnnnnncgttttgctaa

SEQ ID NO: 33003 - DNA, 930 bp, Escherichia coli
ttgctaattcacgaaggtgtcccggcgcgtcaatcaagctttggtagtaaagatgtggagcggctactacaggcagatattgagacagctaaaaaagtgaatggtgttgatgtcttaattaccggtcacgcacatgtcggaacaccgcaaccaataaaagttaataacacattaattgtatctaccgatgcatacggcaccaacatcggaaaacttgtgcttgattacaatccgaaaacgaagaaaattgatagttataatggtgagttaatcaccatctttgcagatcaatttaaacctgacaccatcgttcaaaatactattgataaatggagtgcaaagcttaacaaaataacacaggaagttgtcggccattctcccgtagttttaacacgtgagtatggtagttcctcttctaccggcaaccttattcttgatgcaatgatggaaaaaacacctgatgccgttgccggatttcaaaatagcggtgggatgcgagctgattttcctaaaggcgatatcacactgggagatgttattagcacattcccctttaataatgacctcatcgagatggatttgacgggccgcgatctcaaatcattgatgacgcatgcaaccaatctaactaacggtgtgttacaggtttcaaaaagcgttgcggttgtctatgacagcaaaaaaccactcaaccaacggttaatctctttcaccattaacggcaaacccgtggaagataatcaaacatatcgtattgccacgcactccttttgtgccagtggtggtgacggttttgaagcatttttgaatggaaaaaatgtgaagacgataccgggaacaacctcggcggaatctatcatcgattatttcaaaaatcataaacctgtcaccccagacttaactaaacgagtcatggacgtcgccaaataa

SEQ ID NO: 33004 - DNA, 822 bp, Escherichia coli
atgttgcagggctactgttcaacgcgccattcactctccagttgcgtgattgccgaagagaacggcgatatggagcgtgattatgcctacaccattggtcgcgcgatgagcgatctacaaacgccggaatgggtcggggcagactgcgcccgccgtactttatcgcgcctgtcaccgcgtaaactctccactatgaaagcgccggtaatttttgccaatgaagttgccacggggctgtttggtcatctggtcggcgcgattgccggtggtgcggtctaccgcaaatcgacttttctgctcgactcgctcggtaaacaaattttgcctgactggctgaccattgaagaacacccgcatctgctaaaagggttggcatccacgccattcgacagtgaaggtgtgcgcaccgagcgtcgcgatatcatcaaagatggcatcctgactcagtggctgctgacttcctactctgcgcgcaagctggggctgaaaagtaccggtcatgcgggcggtatccacaactggcgtattgccgggcaaggtctgagcttcgagcagatgctcaaagagatgggcaccgggctggtggtgacagaattgatgggccagggtgtgagcgcaattaccggtgattattcccgtggtgccgcgggtttctgggtagaaaacggcgaaattcagtatccggtgagcgaaatcaccatcgctggtaatttaaaagatatgtggcgcaatattgtcaccgtcggtaacgatattgaaacacgcagcaatatacagtgtggttctgtactgttgccggagatgaaaatcgccgggcagtaa

SEQ ID NO: 33005 - DNA, 387 bp, Escherichia coli
atgcgtaaaagcctgttagctattcttgcagtctcctcattggtattcagttcggcgtcgtttgccgctgatctggaaggcaatatggaaaccctcaacgacaatttaaaagtggttgaaaaagccgataacgcggcgcaagtcaaagatgcgttaaccaaaatgcgcgccgcggcgctggatgcgcaaaaagcaacgccgccgaagctggaaggtaaatcgccagacagcccggaaatgaaagacttccgccacggtttcgacattctggtcggtcagattgacgacgcgctgaagttggcaaatgaaggtaaagtaaaagaagcgcaggctgccgcagagcaactgaaaacgacccgcaacgcctatcaccagaagtatcgttaa

SEQ ID NO: 33006 - DNA, 1005 bp, Escherichia coli
atgtccgggttttatcataagcatttcctgaaattactcgatttcacacccgctgaaatcaacagcctgcttcagttagccgcgaagctgaaagccgataagaaaaacggtactgaagaagccagactcacgggtaaaaacatcgcgctcatcttcgaaaaagactcgacacgaacccgatgctctttcgaagttgccgcatatgaccagggcgctcgcgtcacttatctcggccccagcggcagccagattggtcataaagagtcgattaaagatactgcccgcgtgcttggacgcatgtatgacggtattcagtatcgcggctatggtcaggagatcgtcgaaacgctggcagaatacgctggcgtgccggtctggaacgggctgaccaatgaattccatccaacgcagttgctggcagatctgctgaccatgcaagaatatttaccgggtaaagcgttcaatgaaatgacgctggtctacgccggagatgcccgcaacaacatgggcaattcgatgctggaagctgctgcgctgactggcctggatttacgcctggtggcaccgcaggcgtgttggccagaagcctcgctggttgcggaatgtcgcgcgctggcacaacagaacggcgggaatattacactgacagaagatatcgcggcaggcgttaaaggcgcagactttatctataccgatgtgtgggtgtcgatgggggaagcgaaagagaaatgggcagaacgtattgcactgctgcgtgattatcaggtaaacagcaaaatgatgcagttgacgggtaatcccgaagtcaaattcctgcactgtctgcccgcatttcatgacgatcaaaccacgcttggcaagaaaatggcagaagaatttggcctgcatggtgggatggaagtgacggatgaggtcttcgaatctgccgccagcattgtttttgatcaggcggaaaaccgtatgcataccatcaaagcagtgatggtcgcgacgcttgccaaataa

SEQ ID NO: 33007 - DNA, 549 bp, Escherichia coli
atgctgcaacaacacgctcctgccgagacgcatattcttccgcagcaggcgatacgcgatccctttgtgctcgaatttctggaattgaaagatgaatattcagaatctgatttcgaggaggcgctgatcaaccacctgatggatttcatgctggaacttggggatgattttgcctttgttggtcggcagcgaaggttacgcattgatgacaactggtttcgtgtcgatctgctgtttttccaccgccgtttacgctgcctgctaatcgtcgatctaaaagtgggcaaattcagctatagcgatgccggacagatgaatatgtatctcaactacgccaaagagcactggacgctaccggatgaaaatccgcccatcggtctgattctctgtgcagagaaaggagccggcgaagcgcattatgcactggctggtttgcctaacaccgttctggcgagcgaatataagatgcaactacctgatgaaaaacgactcgcggatgaactcgttcgaacacaggcggtgctagaggaaggctatagacgccgttaa

SEQ ID NO: 33008 - DNA, 534 bp, Escherichia coli
  misc_feature (368)..(377): n is a, c, g, or t
atggaatcgctctcagagagaacctcaacaggctaccagcaaatccacgacggtattattcacctggtcgatagcgcccggacggaaacggtacgtagcgttaacgcgctgatgaccgcgacatactgggaaattggccgacgaattgtcgaatttgaacaaggtggcgaggccagggctgcgtatggtgcgcagctaatcaagcgactatcaaaggatttaagtctaaggtataagcgtgggttctctgcaaaaaacttacgccaaatgaggcttttttacctcttttttcaacatgttgaaattcgccagacagtgtctggcgaattaacaccattgggaattccgcagacaccatctgcagaatnnnnnnnnnngaattcccatcggcaaagatttggcagacgctgtctgccaaatctttccccctgccctggtccacttacgtccgtttgctttctgttaaaaacgctgacgctcgtagcttttatgaaaaagagacgctccgctgtggctggtctgttcgccagctag

SEQ ID NO: 33009 - DNA, 534 bp, Escherichia coli; identical to SEQ ID NO: 32539

SEQ ID NO: 33010 - DNA, 1302 bp, Escherichia coli
atgatcatgatgaccatgcacttcatcaaagatgaaaatggcaaaccgcaggtgccgttccacaccgtttacatgaccggcctgattcgtgatgacgaaggccagaagatgtccaaatccaaaggtaacgtgattgacccactggatatggttgacggtatttcgctgccggaactgctggaaaaacgtaccggcaatatgatgcagccgcagctggcggacaaaatccgtaagcgcaccgagaagcagttcccgaacggcattgagccgcacggtactgacgcgctgcgcttcaccctggcggcgctggcttctaccggtcgtgacatcaactgggatatgaagcgtctggaaggctaccgtaacttctgtaacaagctgtggaacgccagccgctttgtgctgatgaacacagaaggtcaggattgcggctttaacggcggtgaaatgacgctgtcgctggcggatcgctggattctggcggagttcaaccagaccatcaaagcgtaccgcgaagcgctggacagcttccgcttcgatatcgccgcaggcattctgtatgaattcacctggaaccagttctgtgactggtatctggagctgaccaagccggtaatgaacggtggaacagaagccgaactgcgcggtactcgccatacgctggtgactgtactggaaggtctgctgcgcctcgcgcatccgatcattccgttcatcaccgaaaccatctggcagcgtgtgaaagtactttgcggtatcactgccgacaccatcatgctgcagccgttcccgcagtacgatgcgtctcaggttgatgaagccgcactggccgacaccgagtggctgaaacaggcgatcgttgctgtacgtaacatccgtgcagaaatgaacatcgcaccgggtaaaccgctggagctgctgctgcgtggttgcagcgcggatgcagaacgtcgcgtaaatgaaaaccgtggcttcctgcaaacgctggcgcgtctggaaagcatcaccgtgctgcctgctgatgataaaggtccggtttccgttacaaagatcgtcgacggcgcagaactgctgatcccgatggcaggcctcatcaacaaagaagatgagctggcacgtctggcgaaagaagtggcgaagatcgaaggcgaaatcagccgtattgagaacaagctggcgaacgaaggctttgtcgcccgcgcaccggaagcggtcatcgcgaaagagcgtgagaagctggaaggctacgcagaagcgaaagcgaagctgattgaacagcaggctgttatcgccgcgctgtaa

SEQ ID NO: 33011 - DNA, 810 bp, Escherichia coli
atgaaacttgcattaatcattgatgattatttgccccatagcacacgcgttggggctaaaatgtttcatgagttaggccttgaattactgagcagaggccatgatgtaactgtaattacgcctgacatctcattacaagcaatttattctattagtatgattgatggtataaaggtttggcgtttcaaaagtggacctttaaaggatgtaggtaaggctaaacgtgccataaatgaaactcttttatcttttcgcgcatggcgcgcatttaagcacctcattcaacatgatacatttgatggtatcgtttattattccccctctattttttggggcgacttggttaaaaaaataaaacaacgatgccagtgcccaagctatctgatcctaagggatatgtttccacagtgggtcattgatgcaggtatgttgaaagccggttcaccaattgaaaaatattttaggtattttgaaaaaaagtcatatcagcaggctggccggataggggtaatgtctgataagaatcttgagatatttcgccagaccaataaaggttatccgtgtgaagttttacgtaattgggcctcaatgactcctgtgtctgccagcgatgattatcattcacttcgtcaaaaatacgatctaaaagataaagtcatttttttctatggcggtaatattgggcatgctcaggatatggcaaacttaatgcgccttgcgcgtaatatgatgcgttatcatgatgctcatttcctgtttatagggcagggtgatgaagttgagctgataaaattcatctaccttcagtga

SEQ ID NO: 33012 - DNA, 369 bp, Escherichia coli
gtgaaccaggaagagtttaaattaattttatctgaagttgatgtcggcctgttctccctttcatctcgccattcttcacataatttccccggaaaattactagggtatatggttcaatcaatcccgatccttgggagtgtgaatggcggcaatgatttaatggatgtaattaataagcacagagccggtttcattcatgttaatggtgaagatgataaactgtttgaatctgcacaattgcttcttagtgattcagttttaagaaaacagctaggtcagaacgctaatgtgttgttaaagtctcaattttcggttgaatcggcggcacatactatcgaagtccgactggaggctggagaatgcgtttag

SEQ ID NO: 33013 - DNA, 513 bp, Escherichia coli
atggaacgtattgagcctgatgaacagatacaaattcgcctgatggcactggcctcgttaaacgacttaccacaggaccgagaaacgttgttctactataacgtgcgagaaattccgccgcgcgccaaagaacagaatgtaatgcaaatcgccatgcaaagccgcctgaagctattctggcggccaaaagcgattgagttaaaagagggggagatgattcctctgcaaaaagtaacgattacccgcaccgccgccggtctgaccctgaataacccgacgccttatcatattaccgtcggttatatcggcactaatggcaagacactgatgcccggtgcggacagtattatggtggcaccatttacttctgcaactcaacacctaagcagcctgccctctaccttccagttaggctttgtggcggactacggcgggctggagatgtttaaagtcgaatgtaattccatccaatccctctgccaaagctctcctgctaagaaggggaaaatatga

SEQ ID NO: 33014 - DNA, 504 bp, Escherichia coli
atggggcctgtatcgggtattggtgacacgttagactttggtacattgcgtcccattgttattggtgtctgtatcccgtttattattcagggatatgttattgctgcacttctccccctgatttaccaggttagttatatgttcttcgccagtcgatttgctcttaatatcggctataaaaaagggaaagagtcaattctggaaatcttgcattccgggagcatacatcgaattatcgaaggtgctggaatgttcgggctgttgatgatgggggcgctttcagcaacgtatgtaaaaattaagacgccattgcatattacaaccggcggtggcaataccattgtcttacaggatatgctagataaaattgtccctaacatgttgccacttattgccgtgttgggtatttatttttacatacaaaaatgtggccctcatttcttacgtattctggtcactattcttgttttgagtcttgcattttctttctttggccttttataa

SEQ ID NO: 33015 - DNA, 366 bp, Escherichia coli
  misc_feature (283)..(292): n is a, c, g, or t
atgaaaaacgttggcgacctgatgcaacgtctgcaaaaaatgatgcctgcccatatcaaacccgccttcaaaacgggtgaagagcttctggcgtggcagaaagaacaaggagcgctccgcgccgccgctctggagcgcgagaaccgggcaatgaaaatgcagcgcacctttaaccgctccggcattcgtccgctgcatcagaactgctcctttgagaactatcgtgttgaatgcgaagggcagatgaatgcgttgagcaaagcgcgccagtatgtcgacgagnnnnnnnnnngcctggaaccggtaaaaaccacctggcggcagcgatctgcaacgaactactgctacgcggcaaatcggtattga

SEQ ID NO: 33016 - DNA, 324 bp, Escherichia coli
atgtcagcgatgaaagatactttcagaaatagcggcaccagcgaagagcaactgctcaacgatctgagcaacgttgatctgctggtgatcgacgagatcggtgtacagaccgaatcgaaatacgaaaaagtgatcatcaaccagatcgtcgatcgtcgttcttcttccaaacgcccgaccgggatgctgaccaacagcaatatggaggagatgacgaaattgctgggcgaacgcgttatggatcgtatgcgcctgggcaacagcctgtgggtgatcttcaactgggacagttatcgtagtcgggtaacgggtaaagagtattaa

SEQ ID NO: 33017 - DNA, 243 bp, Escherichia coli
gtgttgtttttcacgtcgctttataaccagggatgtttagaggagtttataaatgcacttgtggaaaaggaggacatttatctgaaaatgtcccctggggaggaaaaggtgaaagcacaccagaaaatggttaactacattgaagcgttctgcaacaaaatgacggaaaaatacctgatgcccgcagcaagcagacactacaaaaagaagaaaatcgctaggagcgaaagtggtgaaagttaa

SEQ ID NO: 33018 - DNA, 570 bp, Escherichia coli
gtgttcagcgtgctggtggcgagtgctttcttgcctttcctgccgatgttgccgttacacttgcttattcagaacctgctgtacgatgtgtcacaggtggctatcccgtttgataacgtcgacgatgagcaaattcaaaagccacagcgctggaatccggcggatctggggcgctttatgatcttcttcggaccgatcagttcgatcttcgatattctgacgttttgcctgatgtggtgggtattccatgccaacacaccggaaacgcaaacgctgttccagtcgggctggtttgtggtggggttactgtcgcaaacgctgattgtacatatgatccgtacccgccgtgttccgtttattcagagccgcgcatcgtggccgttaatgatcatgaccgtgatcgtgatggttgtggggatcgcattgccgttctcgccgctggccagttatctgcaactgcaggcgttgccgttaagctatttcccgtggctgattgcgattctggcagggtatatgacattaacgcaactggtgaaagggttctatagccgtctttacggctggcagtaa

SEQ ID NO: 33019 - DNA, 402 bp, Escherichia coli
atgggaatttctactcgcagcaccactattcgcatttatatgctctccaccggactggcgacactggcggggattgtcttctctatttacacccaggccggatacgcgctggcaggcgtaggtgtggaactggacgctatcgcctccgtggtgattggcggtacacttttaagcggcggtgttgggacagtattaggaacgctttttggcgtagcgattcagggactcattcagacttacataaactttgacggcacgatgagttcatggtggacgaaaatcgccatcggcattttgctgtttattttcattgcattacagcgtgggttaacggtgctgtgggagaaccgtcagagttcgccagtaataagagtgagtccggaaaatacaataaaagagtaa

SEQ ID NO: 33020 - DNA, 549 bp, Escherichia coli
atgctctatcggaacttgaaaatcacctcagctttagacgaaatatatggtggcatatgtaaaaaggcgcatgctaccacagagttagcagaaggtttacggctaaatttatttatgaagagccctttcgatcctgttgaggactatacagttcatgaaataacattaggccctggttgcaatgttcctggttatgccggaaccacgataggatatatttcaacccttccagcttctcaggcaaaaagatggaccaatgagcagccaaggattgatatctatattgatcagataatgacggtaacaggggtagcaaattcttccggattcgcccttgccgcattacttaatgctaatattgagttgggtaatgacccaataattggtatagaagcctatcccggtaccgcggagatccatgcaaaaatgggatataaagttatcccgggtgatgaaaatgcaccactcaaacgtatgactctgcaaccgtcatctcttccagaactgtttgaattaaaaaatggtgaatggaattatattggtaaataa

SEQ ID NO: 33021 - DNA, 216 bp, Escherichia coli; identical to SEQ ID NO: 30185

SEQ ID NO: 33022 - DNA, 552 bp, Escherichia coli; identical to SEQ ID NO: 1594

SEQ ID NO: 33023 - DNA, 210 bp, Escherichia coli
atgctttcatatgagtttttgtatactgcaataatccttgtttacttaggttatcgagaagagcatataaaaattgctcacctaccacaccggaaaactcagaatcaaacagaatcacagtgtcacccacaattcaaacgggcttatctcaagcagtctgaacgtttgattattcacagcttcatactgaattaccccaaaatggcttag

SEQ ID NO: 33024 - DNA, 126 bp, Escherichia coli
atgaaacatttccgcaacggctatagagtctgtattaactgcttcggtcatgtagtcgctaatacgttcagcggtaattttcgttatttcatcgtaattcattttatctcctacaagattatttaa

SEQ ID NO: 33025 - DNA, 927 bp, Escherichia coli
atggcgcagcttatcctgccattaagcctgttcctcgggctgctgatgacgttgggtaaactgtataccgaaagtgaaattacggtaatgcatgcctgtggcctgagcaaagcggttctggtcaaagcggcgatggttctcgcggtattcacggcgattgtcgcggcggttaacgttatgtgggcaggaccgtggtcatcgcgccatcaggatgaagtgttagcggaagcgaaagctaaccccggcatggcggcgctggcgcaaggtcagttccagcaagcgacgaatggcagctcggtgctgttcatcgaaagtgttgacggtagcgatttcaaagatgtgttcctcgcgcaaattcgaccaaaaggtaatgcgcgtccttccgtggtggtggccgattccggacatttaactcagttgcgagatggctctcaggtcgtgaccctcaatcagggaacgcgcttcgaaggcactgcactgctgcgtgatttccgcattacggacttccaggattatcaggcgatcatcggtcatcaggcggtagcgctggacccgaacgatactgaccagatggacatgcgcacattgtggaacactgacaccgatcgtgcccgcgcggaactgaactggcgtatcactctggtattcaccgtgtttatgatggcgctcatggttgtgcctctgagcgtggttaacccgcgtcaggggcgtgtcctgtcgatgctaccggccatgttgctgtatctgcttttcttcctgatccagacctcgctgaaatcgaacggcggtaaaggtaagttggacccgacgctgtggatgtggaccgtaaacctgatttatctggctttggcgattgttctcaacctttgggatacggtgccggtccgccgtctgcgcgccagttttacgcgtaaaggagcggtataa

SEQ ID NO: 33026 - DNA, 927 bp, Escherichia coli
atggcgcagcttatcctgccattaagcctgttcctcgggctgctgatgacgctgggcaaactgtataccgaaagtgaaattacggtaatgcatgcctgcggtctgagcaaagcggtgctggtgaaagcggcaatgatccttgcggtgttcacggcaatcgtcgcggcggttaacgtgatgtgggcgggaccatggtcatcgcgtcatcaggatgaagtgttagcagaagcgaaagcgaaccctggcatggcggcgctggcgcaagggcaattccagcaagcgactaatggcagctcggtgctgttcatcgaaagcgttgacggcagcgatttcaaagatgtgttcctcgcgcaaattcgaccaaaaggtaatgcacggccttctgtggtggtggccgattccggacatttaacccagctgcgcgacggctcccaggtcgtcactctcaaccagggaacgcgcttcgaaggcactgcactgttacgtgatttccgcattacggatttccaggattatcaggcgatcattggtcaccaggcggtggcgctcgacccgaacgataccgaccagatggacatgcgcacattgtggaacactgacaccgatcgtgctcgcgcagaactgaactggcgtatcacgttggtgttcaccgtgtttatgatggcacttatggtcgtaccgctgagcgtggttaacccgcgtcagggacgcgtactatcgatgctgccagccatgctgctgtatctgttgttcttcctgatccagacctccctgaaatcgaacggcggtaaaggtaagctggacccgacactgtggatgtggaccgttaacctgatttatctggctttggcgattgttctcaacctttgggacaccgtgccggtccgccgcctgcgcgccagtttttcgcgtaaaggagcggtgtga

SEQ ID NO: 33027 - DNA, 699 bp, Escherichia coli; identical to SEQ ID NO: 3282

SEQ ID NO: 33028 - DNA, 150 bp, Escherichia coli
atgaaagatttccgtcacggtttcgacattctggtcggccagattgacgacgcgctgaagttggcgaacgaaggtaaagtcaaagaagcacaggccgccgcagagcaactgaaaaccacccgcaacacctatcacaagaagtatcgttaa

SEQ ID NO: 33029 - DNA, 732 bp, Escherichia coli
ttgctttccgatgacgaaaaagttgagttaacaaaagccgtcgttgaagaggtcggtaatgaagttaccatttgtgcaggtgctgggtgctgcagcacaaaacaaaccatcgaattgactaaacggttagttgatgcgggtgccgattatatttctgttgtcacgccgtactatctggtaccaaatcaggaagatttataccgtcactattacgatattgcctttagcacaacagcccccatcattctctataacctgccgggccagacaggattaagcatcgaatacgaaacggcaaatcgtttagccgatatcaaaaatatcgtagcgataaaagacagtagcggtaaattcgaagtccagaaacagtatctggaaatcgctaaacataaaaactttaaggtattaaacggctctgactcgttaatgctggatgcatttaaagaaggttctgtggctgctgtcgctgcaacgtcgaatgttctgcctacgattgaagtcgatttatataattacttcatggccggtgaaatggagaaggcgcaggaagagcgtaataaaatggatgcactgcgcatgacgatcaagaaaatgaccgcgcctgcagtaatgaaggaagcattaaacctgatgggtgtgaaggcaggtattacacgtagaccaattcatatgccaaacgacgcgatcgttgaagacatcaaggaaatgttgaaaggctataatttcctgtaa

SEQ ID NO: 33030 - DNA, 687 bp, Escherichia coli
atggcgatgggctgttggagcgagcaggagctggtgggcgagcaggggcactggcaggcgaaaaagctgaccactgacgcttctgaatgggaagtcttgctggatggcgaaaaagtgggcgaagtgaaatggtcgctggtaggcgaacataatatgcacaatggcctgatggcgattgcggcggctcgccatgttggtgtagcgccggcagatgccgctaacgcgctgggttcgtttattaacgctcgtcgccgtctggagttgcgtggtgaagcgaatggcgtcacggtatatgatgattttgcccatcacccgacggcgattctggcaacgctggcggcgctgcgtggcaaagttggtggtacggcgcgcattattgccgtactggaaccgcgctctaataccatgaaaatggggatctgcaaagacgatctggcaccttcattaggtcgtgccgatgaagtcttcctgctgcaaccggcacatattccgtggcaggtggcagaagtggcagaagcctgcgttcagcctgcacactggagcggcgatgtggatacgctggcagatatggtggtgaaaaccgctcagcctggcgaccatattctggtgatgagcaacggcggttttggtgggatccatcagaaactgctggatgggttagcgaagaaagcggaagccgcgcagtaa

SEQ ID NO: 33031 - DNA, 663 bp, Escherichia coli
atggtgccgtgggcagggcgactggggaatgcgacgctgaatgctggtgggcaatgttattctttacccgccaataaaccaccacatgcgttgcatggtatggcttgttactcaacgtgggaaatcatcgacaaaacagcagattccctgactttacgtatgcccctggcttcaccgtggccctggcaaggggaagtgattcagacttttttgctggagaacgatgcgctggttttgcaactggaagtccattcatatgccgatacattcccggcctccgcaggctggcatccgtggtttgcgaaaaagctgactccgcaaaatacagaatcgttgcaggtgctttttgatgcggactggcaagaagaagcgggtagtgatgaactgccaactggaaatcgtatctctcctcaagtcggtccctgggatgactgttttggtttttatgacggggtgaaggttaagttactgtggcctggtaaactcgcgatgaccatgacctcttctgcaaacagtctggtggtatttgataaacagcccgatgccacctgtattaacccgctgactcaggcacctaacgcaataaatctaacgccggaatttgtgacaccagataagccgctggtcatcgaaactcgttggcaatttacacctgaatcttaa

SEQ ID NO: 33032 - DNA, 183 bp, Escherichia coli
atggtgaatgagttgttaatagcacctgccaatctggatgtttaccaagttcataaagatgcgcttgcgccgctctggcagccattgggtgtaacgcattttctggctcatccattaaaagaatatatccgggcaaggctggatcgtctgtatcttcaggaacaggggcgccattttcaatag

SEQ ID NO: 33033 - DNA, 537 bp, Escherichia coli
atgctccgcgagaataagccgctgatctcactgtgggcgcaatggtatatcggtctgatgatgccgccattaatgctggcgctgttaacacaggaaaaagcgttagatctttccccggaacattttcacgttgagtttcacgaaaccgggcgtgccgcctgtttctggatcgacgtgtgtgagaacaagaacgctccgcatttgccacagcagcgaatggaaaagttaatcagtcaggcgatcgccccggttgtgcaggcattagaagccaccggcgaaatcaatggcaaacttatctggagtaataccggctatctgatcaactggtatttgactgagatgaagcagttacttggtgatgcgacagttgaatcacttcgccatgctctcttttttgagaaaacactctccacgggtgaagataatcctctttggcgtacggtggtgctgcgcgacggcctgttggtgcgccgtacctgctgccaacgttatcgcttgccggatgtacagcaatgcggcgactgtacgctgaaatga

SEQ ID NO: 33034 - DNA, 447 bp, Escherichia coli
ttgcaaaccgtattgcctgacgtcgcgtggcataacaatattcgcgccgagctgtggcgcaagctggcagtcaactgtgtgattaatccactgaccgccacctggaattgcccgaatggtgaattacgtcatcatccgcaagaaattatgcagatatgcgaagaagtcgcggcagtgatcgaacgcgaaggacatcatacttcagcagaagatttgcgtgattacgtgatgcaggtgattgatgccacagcggaaaatatctcgtcgatgttgcaggatatccgcgcgctgcgccacaccgaaatcgactatatcaatggttttctcttacgccgcgcccgcgcgcatgggattgccgtaccggaaaacacccgcctgtttgaaatggtaaaaagaaaggagagtgaatatgagcgcatcggcactggtttgcctcgcccctggtag

SEQ ID NO: 33035 - DNA, 354 bp, Escherichia coli
gtggttattgttaccctctgtcagggtattctctttgataaccggcatcaccagcgtgcgggcagcattgtttttcgcctgccaggaggcagcaacgattttgtaatgatgattaatgagtgcgttaatggtccacttacatttttccagaccgacggcttcttcgggcgtatctttaatcacgcactcgggatgttcattcgtgacgtcggctttcagccacaaagtgacatagaggggatctttttctttgtattccagaacaataaagttattacgctcaacgaaatcaagacggctgcccatcagcgagtgcgccgctttcactttatcgctatccaattgatcttttag

SEQ ID NO: 33036 - DNA, 774 bp, Escherichia coli
atgctccgtgcatggtgggtgatgttaggtctgcctgttctgttggcgttagctttttggttagcgctataccttattgcgcaagttatgacatcaataggaggattagtctttaatttagtggtgttaagtttactttcagccgtcggattgggtgttgtccacggtattacctatagcaaatggatgccgttgctgggtaataacgcgacctttggcactcatcagttctctattaaggtaaacgtaaaagaatgcattaaaggatgtatgctcgcaatattgaccatggttcctttcatcattgtcattggtattatgattgcgccagtatttcagcaattaatgatgatgactatgttagggcgggctggtgcgggtagtgatcttatattgcaatattacccgcagattatggcttcctatttcctgtattttgtggcgattcttgtttttgccagttatctctatgcaacgttacgcggtctgtttctgaataatctgacactggcaaatggaacaattcatttccattcgtctgttaccaccttcggtatgcttctgcgcatgtttgcgatattaatgggggcttcaatcacctgtggactggcttatccctggctgaaaatgtggatggttggctggattgccaataatacccatgttcagggtgaccttgattcgctggaattaaccaatgatgacaaaccgcaggatagcgggccgttaatgtggatatctcgcggtattatgccgtatgttccgtttatctaa

SEQ ID NO: 33037 - DNA, 201 bp, Escherichia coli
ttgcgccagcgtctgaccgttgctcatgggcaaatcgccgatcacattgcgaaaaccgaggatcaaaccaccactaatcaacgcgggcagcaatgggaagaagatctccgcgaaatgagagatcaactgctcatgccatttcatattctgccgggcggctttttttacctgctctttatcaacctgcgcctgtccggttga

SEQ ID NO: 33038 - DNA, 474 bp, Escherichia coli
atgggtgtgatcgaatttctcttagcactagtgcaggatatgatcctcgcggcaattcctgcagtcggctttgcgatggtattcaatgtgccggttcgggcgttacgctggtgtgcactgcttggcgcgattggtcatggctctcgaatgatcttaatgaataccgggctgaatattgaatggtcaacctttatggcatccatgctggtcggcaccattggtattcaatggtcacgctggtatctggcgcatccgaaagtctttaccgtggcagccgttatccctatgtttcccggtatctctgcttatacagcaatgatttcagccgtaaaaatcagccagttaggttacagcgagccgttgatgattaccctgttaaccaactttcttacggcatcatcaattgttggcgcgttatccatcggcctttccattcctggattatggttgtaccgcaagcgccctcgcgtataa

SEQ ID NO: 33039 - DNA, 318 bp, Escherichia coli
atgtatatccgtcagctactggcgcaacgtcatctccaccctcagataaacttttgcatcaccgcatttgccgccaccacgatttctggtttgcttttacaactccctgccttcagcaatacgccaacaatcgcgatggctgccagcgttctgctgctggtgccgggctttccgttgattaatgccgtcgctgatatgtttaaagggcacatcaataccgggctggcacgctgggcgattgccagcctattgacgttggctacctgcgttggcgtggtgatggcactcacgatttggggactacgcggatgggtgtga

SEQ ID NO: 33040 - DNA, 363 bp, Escherichia coli
atgaatgaatttgagaagatttttaatgaaatgaatctggaccgggcattgctaccgatcctttttcgttcgaaccggtcgacagtgtggaagtatttaagcggcgatagtacggctcctgcctctgccatgtcgctgattatgctgttgcagttgatccagaaacgaaaccccgatctgttagccgaatggttaacgctttctgatttcaccattccgccagaagtttacctggaccaacctgattactggaaagggtgggtgtatacccaacacaaggtcaataaaaacgtcctggaatatctaaaaaaacactatccggatgaagaccaaaaaagtatgggtaaaggccgggaagagtaa

SEQ ID NO: 33041 - DNA, 498 bp, Escherichia coli
atgcaggaggagatgagaaaatattatacagttgccacattttctggcattcctgacaggaaaaaaactgtaacctgtaataaagacaaaaacaaagatgaaagcctggatattgtagatgccgaaaatatgaactggatgcaggcattgcgttttgttgcagcaaaaggccatcagaaagcgattattgttttccaggatacgttgcagacaggaaaatatgactctggattgaaatcaatagtttggacagattataaaaatcaaaaattgactgacacgatgtcactgcgttatttggttcgattcacgttggtggatgtggctacaggtgagtgggctacctggtcgcctgtgaattatgaatcgaaagtgatttttccgcagatagggaataaaaattctgacagccttgatgtggcagaacagcagatttcacaacttaagcagaaaacgtatgcagcagtggttaaagacttggtgaatcgatatcagtag

SEQ ID NO: 33042 - DNA, 189 bp, Escherichia coli
atgaaggtgaatgatcgggtaacagtcaaaacggatggcggtccgcgtcgtcctggcgtggtactggcagttgaggagtttagtgaaggcacaatgtacctggtttcgctggaagactacccgctcggcatctggttctttaatgaagcaggccatcaggacggtatctttgttgagaaagcagagtaa

SEQ ID NO: 33043 - DNA, 492 bp, Escherichia coli
atgtccggtcaaaccgttgaagtgctgaataccgacgctgaaggccgtctggtgctgtgcgatgtgttaacttatgttgagcgttttgagccagaggcggtgattgacgtggcgacgttgacgggtgcttgtgtgatcgcgctgggccatcatatcactggcctgatggcgaaccacaacccgctggctcatgagctgattgccgcgtctgaacagtctggcgaccgcgcatggcgtttaccgctgggtgacgagtaccaggaacagttggagtccaattttgccgatatggcgaacattggcgggcgtcctggcggggcgattaccgcaggctgtttcctgtcgcgctttacgcgtaagtacaactgggcacacctggatatcgcgggtactgcgtggcgttctggtaaagcaaaaggcgcaaccggccgtccggtggcgttgctggcacagttcctgttgaaccgcgccgggtttaacggcgaagagtga

SEQ ID NO: 33044 - DNA, 471 bp, Escherichia coli
atgggtgacaaccagtcatcccggcaaagtacatggtatatggggcttggtacagatatcgacacgggtctaccaattaagctttctgccaatatatacgccaagtatcagtggcaaaactatggtgccgctaatgaaaatgaatgggacggatatcgattcaaaataaaatatagcatccctcttacaaatttattcggaggacgattggtatacaatagttttactaactttgattttggctccgatcttgcggacaagtcacacaataataaacgaaccagtaatgctattgcttcaagccatatcctttcccttctatatgaacactggaaatttgcatttacactacgttattttcacaacggtggacaatggaatgcgggagagaaggttaacttcggagatggtccatttgaattaaaaaatacaggatggggaacctatactactattggttatcaattttaa

SEQ ID NO: 33045 - DNA, 606 bp, Escherichia coli
gtggcagatgcactttccaaacgtctggtcagcagtgttctggatgccgcagttgtggaagacgagcagatccatctacgctgtttcgaatcgacgcacgagatgcttttagagcagttgagtcagcataaactggatatgatcatctctgactgtccgatcgattccactcagcaggaagggctgttttccatgaaaattggcgaatgtggtgtcagtttctggtgcactaacccactaccagaaaagccgtttcctgcctgtcttgaagagcgtcgtttacttattccggggcgtcgctcaatgttggggcgtaagctattaaactggtttaactcccagggcttgaacgtcgaaattttgggtgagtttgatgatgctgcgttgatgaaagcctttggggcgacgcataacgctattttcgttgcaccttcgctttacgctaatgatttctataacgatgactcggttgtggagataggccgtgttgagaacgtgatggaagagtaccacgcgatttttgccgaaaggatgattcagcaccctgcagtacagcgtatctgcaatacagactattctgcgctgtttactccagcttcaaaataa

SEQ ID NO: 33046 - DNA, 249 bp, Escherichia coli
atgacctgcattcagcgccgctttcaggcaggcggagtcttccgcttccacggcaatcactttgatttgcggcatcagttgtttgatcagtaccgccacgcccgccgccagaccgccgccgccgactggcacaaatacgcggtcgagatgggcgtcctgctggagcagttccagcgccagcgtgccttgcccggcgatcaccatcggatggtcgaacggcggcacccaggtgaagccctgctgctgtga

SEQ ID NO: 33047 - DNA, 591 bp, Escherichia coli
gtgattaatcaactggcagataaacaaaccattaaacaaactttatttgcccgtcagccagcaaaaatccacaaaccctatccaactaatagcaagattattatgggggatgtactgaatcatgcagcactgaagcaggccatgcagggacaggatgttgtgtatgccaaccttacgggggaagatttagatattcaggcaaattcagtgatcgctgcgatgaaagcctgtgatgttaaacgtctgatctttgttctttccctcggtatttatgatgaagttccaggaaaatttggcgaatggaataatgcagttattggtgaacccctaaaaccattccgcagggctgcggatgcaattgaggtttctggactggaatatacaattcttcgccctgcctggctgactgatgaagatattattgattatgagcttacctcacgcaatgaaccattcaaaggtacgatcgtatcacgtaagagtgtcgcagcattaatcacagatatcatcgataaacctgagaaacacattggtgagaatataggcatcaatcaacccgggactgatggtgataagcccttcttcatgtaa

SEQ ID NO: 33048 - DNA, 465 bp, Escherichia coli
atgatgatgggtgaagtacagtcattaccgtctgccggattacatcctgcgttacagggcgcgttaacgctggcattagctgccagaccgcaagaaaaagcgtctggccgttacgaattacagggcgacaatatttttatgaatgtcatgacgtttaacactcaatcgcccgttgagaaaaaagccgaattgcacgaacaatacattgatatccagctgttattaaacggtgaggaacggattctgtttggcatggcaggcactgcgcgtcagtgtgaagagttccaccatgaagatgattatcagctttgcagcgccattgaaaacgagcaagccatcatcctgaaaccgggaatgttcgccgtgtttatgccaggagaaccgcataaaccgggatgcgttgttggcgaacctggtgagattaaaaaggtggtagtgaaggttaaggctgatttaatggcttaa

SEQ ID NO: 33049 - DNA, 222 bp, Escherichia coli
atgctgtacctgagtggcgttgcccagcggcagtttgttttcaatatcataaaagtaaacatacattcccagcgattcagccagaatacccaattgcgtaccaatatgaccgtagccgatgatacccagctttttgccgcgcgcttcaaaagaacccgccgccagtttgttccacacgccacgatgcgctttagcattggcttccggcacgccgcgcaatag

SEQ ID NO: 33050 - DNA, 366 bp, Escherichia coli
atggggcacgtggcattaggccatgtgaagaaaggaatgcaggtagcacttggtacaaacgcaattcgcgttgcggcggcctctgcaggcggaattgtcggcagtttgtcacaatcacaactgggagacctgggcgaaaagctagtcaattcgcaatttacccaacgtcaggaatcagaggccgatgattactcctacgatttgctgcgccaacgcggtatcagcccggcaggtcttgccaccagctttgaaaaactggcgaaactagaagaaggccgccaaagctcaatgtttgacgaccatcctgcatccgccgaacgcgcccagcatattcgcgatcgtatgagcgcggatggagttaagtaa

SEQ ID NO: 33051 - DNA, 150 bp, Escherichia coli
atgggcttcaaacgctgctatctggaaacaaccgcttttttgaaagaagcgattggtttgtatgaacatttaggttttcaacatatcgactatgcgcttggctgcacgggccatgtcgattgtgaagtgcggatgctgcgcgaactgtaa

SEQ ID NO: 33052 - DNA, 240 bp, Escherichia coli
gtgactgatccagaagagctggaagttgaagagggtgatatcgtgatttgctgtgacatcatcagcgaatgcgcgttgaatgccgatctgatcgatgctcaggttgagcaattgatgaacctggcagagaaattcgacgttgaatacgacggttgggggacttactttgaagatcctaacggtgaagaaggcgacgatgaagattttgtcgacgaagatgatgacggtgttcgccattaa

SEQ ID NO: 33053 - DNA, 207 bp, Escherichia coli
atgcccgatgtgccccgccagaccgccagggccggtgagcagtttgccgccgctcactacaccgccgccaacaccagtggaaacggtgataaacaccatctcggttatatcgccttccagcgcctgatactccgcccatgctgcggcctgcgcgtcgttaatggcaatggtcggcaaatcggtaagctgctccagtgttttgactaa

SEQ ID NO: 33054 - DNA, 339 bp, Escherichia coli
gtgactggtccaaactggcgtggcggtgtggcgaccatcggcgtaacgcgagatggaaagccggaaacagtgctgtatgcagaaaaacgttattacaacactgccgggtcgatgatgaccgaagcggcgattgacggtggcatcacgcgtgacctgtacgcggcgctcggtgaagagctggaaaacggcgcgtgggccgtgcgtctttactacaaaccatttgttcgctggatttgggcgggcgggctgatgatggcgttgggcggactgctgtgtctgtttgatcctcgctatcgtaagcgcgtgaacccgcagaaaactgcgccggaggctgcatga

SEQ ID NO: 33055 - DNA, 321 bp, Escherichia coli
atgcaccgtaaagcacgcggcgatgaggttggcaaaaccaagtttggcgaaagaaattactgtgccgaatccaacggtaacgctgccgacaagctgatgctgtgtgcatcctgggtcgcccagacggatctttcggagttctttaagaaatggaatccgggcgcgaatgcttaccagttgccgggagcgagcgagatgaacttcgagggcggtgtgagccagtcggcttacgagacactggcggcgcttaatctgccgaaaccgcagcaagggccggaaaccattaatcaggttaccgagcataagatgtcagctgagtaa

SEQ ID NO: 33056 - DNA, 225 bp, Escherichia coli
atgaacctaaagaaaacactgttaagcgtgttaatgatattgcaactttgcttattggtagggtgtgactatattgaaaaagcgagtaaggtcgacgatctcgttacacagcaagagttacaaaaaagcaaaattgaggcgcttgaaaaacaacaagaactcgacaagcgcaagatagaacactttgaaaaacaaacaggacgaatttgtctttacagaatttaa

SEQ ID NO: 33057 - DNA, 210 bp, Escherichia coli
atgaaatccatcaaaactttcgttgcagttaccgctctatccatgatgtctttcggtgcatttgctcagagcgtcagcgctaccgcctccactctggatcgtgctgaagcaaaaattgccgcacaggccgctgaacaaggtgcgtcatacaaaatcaccagcgctcacttcaataaccgtgtccacatgacggctgaactgaccaaataa

SEQ ID NO: 33058 - DNA, 759 bp, Escherichia coli
atgagtggtattgaaaattctaatcaaggtccggggtggcatgatcacaatactccctatggaacaattcatagttatgatggggacagccatagcggttatggtgctcattctggtggtaatgggggaaatcgccatgaaggtatttctgataagacacatattagtataccatctaccagaaactataatggctactatatgagcatgtgtgttaataatttaaaagcccatgaggggttcaaaaacaccatgtataaggatagcgaaggtaatattactgttggtattggtcatttgctatctacgccagatatggcggcatctctcccttttacaagaactcatacatggcatggtcatggtgatgatatggaaaaagaagttgcagcatcaaaaaaagaaataaccgatgcttttaataactttaaaaaagactctagacaagtaccaatgaacttgcatttatcaaatgatgctgttattggattatgtatttccgatgttcagactacagagaaaggcttgcgttctttatattctggttatgatggtttttctaactctagaaaaactgccttagtggatatgggatttaacttaggaattcctaagctatcgagaaactttccgaactttaatgctgctgtgaaccgtggggattgggagtctgcagcacgtgaaagccatcgaaatcttcatcaacgaggcgatcagagaaacaaggatacagcagatcagttgcgggataaacattaa

SEQ ID NO: 33059 - DNA, 480 bp, Escherichia coli
atgatcaagcggttattattcttatatgttgctttattgttcttatcagaaggtgcttatgcatctgtaacagtattcattgctccaagttgggaaaggaatacagattcagttaatgagatatataaatatattgatgatataaatagtaataaccatgtcatcgatcaagcatatgtagaacctattaggaaggagttaggggtatatcgagattatatccagaaaaaactaattaactttaatgggaagggagtttgtaaattatcgataacaacaggaaatacaggtgttaaagatattgagcctccagatgttgttttgttaaactcattggcggaaaactcatcattagactgtaaaaaactgtatagagaaatacaaagtattgttgataacgatccgtcacttttatttcctgagaaaataaagttaaatggtttgttatcaattgatatgatcattgttatgaggagataa

SEQ ID NO: 33060 - DNA, 366 bp, Escherichia coli; identical to SEQ ID NO: 25367

SEQ ID NO: 33061 - DNA, 822 bp, Escherichia coli
gtggctcaattcgtttataccatgcatcgtgtcggcaaagttgttccgccgaaacgtcatattttgaaaaacatctctctgagtttcttccctggggcaaaaattggtgtcctgggtctgaacggcgcgggtaagtccaccctgctgcgcattatggcgggcattgataaagacatcgaaggtgaagcacgtccgcagccagacatcaagattggttatctgccgcaggaaccgcagctgaacccggaacacaccgttcgtgagtccattgaagaagcggtttctgaagtggttaacgccctgaaacgcctggatgaagtgtatgcgctgtatgccgatccggatgccgattttgacaagctggccgctgaacaaggccgtctggaagagatcattcaggctcacgacggtcacaacctgaacgttcagctggagcgtgcggcggatgcgctgcgtctgccggactgggacgcgaaaatcgctaacctttccggtggtgagcgtcgtcgcgtggcgttgtgccgcctgctgctggaaaaaccagacatgctgctgctcgacgaaccaaccaacgacctggatatcgaaaccctgcgcgcactggaaaacgccctgctggagttcccgggctgcgcgatggttatctcgcacgaccgttggttcctcgaccgtatcgccacccacattctggattaccaggatgaaggtaaagttgagttcttcgaaggtaactttaccgagtacgaagagtacaagaaacgcacgctgggcgcagacgcgctggagccgaagcgtatcaagtacaagcgtattgcgaagtaa

SEQ ID NO: 33062 - DNA, 2619 bp, Escherichia coli
atgagtatcctgacccggtggttgcttatcccgccggtcaacgcacggcttattgggcgttatcgcgattatcgtcgtcacggtgcgtcggctttcagcgcgacgctcggctgtttctggatgatcctggcctggatttttattccgctggagcacccgcgctggcagcgtattcgcgcagaacataaaaacctgtatccgcatatcaacgcctcgcgtccgcgtccgctggacccggtccgttatcttattcaaacatgctggttactgatcggtgcatcgcgcaaagaaacgccgaaaccgcgcaggcgggcattttcaggtctacaaaatattcgtggacgttaccatcaatggatgaacgagctgcctgagcgcgttagccataaaacacagcatcttgatgagaaaaaagagctcggtcatttgagtgctggggcgcggcggttgatccttggtatcatcgtcaccttctcgctgattctggcgttaatctgcgttactcagccgtttaacccgctagcgcagtttatcttcctgatgctgctgtggggggtagcgctgatcgtacggcggatgccggggcgcttctcggcgctgatgctgattgtgctgtcgctgaccgtttcttgccgttatatctggtggcgttacacctcgacgttaaactgggacgatccggtcagcctggtgtgcgggcttattctactcttcgctgaaacgtacgcgtggattgtgctggtgctcggctatttccaggtcgtatggcctctgaatcgtcagccggtgccattgccgaaagatatgtcgctgtggccgtcggtggatatctttgtcccgacttacaacgaagatctcaacgtggtgaaaaataccatttacgcttcgctgggtatcgactggccgaaagacaagctgaacatctggatcctcgatgacggcggcagggaagagtttcgccagtttgcgcaaaacgtgggggtgaaatatatcgcccgtaccactcatgaacatgcgaaagcgggcaacatcaacaatgcgctgaaatatgccaaaggcgagttcgtgtcgatattcgactgcgaccacgtaccaacgcgatcgttcctgcaaatgaccatgggctggttcctgaaagagaaacagctggcgatgatgcagacaccgcaccacttcttctcgccggatccgtttgaacgcaacctggggcgtttccgtaaaacgccgaacgaaggcacgctgttctatggtctggtgcaggacggcaatgatatgtgggatgccactttcttctgcggctcatgtgcggtgattcgccgtaagccgctggatgagattggcggtattgctgtcgaaacggtaaccgaagatgcgcacacttctctgcgtctgcaccgtcgtggctacacctcagcgtatatgcgtattccgcaggcagcggggctggcgaccgaaagtctctcggcgcatatcggtcagcgtattcgctgggcgcgcgggatggtgcaaatcttccgtctcgataacccgctcaccggtaaagggctgaagtttgctcagcgactgtgctatgtcaacgccatgttccacttcttgtcgggcattccacggctgatcttcctgactgcgccgctggcgttcctgctgtttcatgcctacatcatctacgcgccagcgttgatgatcgccctgtttgtgctaccgcatatgatccatgccagcctgactaactcgaagatccagggcaaatatcgccactctttctggagtgaaatctacgaaacagtgctggcgtggtatatcgcaccaccgacgctggtggcgctgattaacccgcacaaaggcaaatttaacgtcaccgccaaaggtggactggtggaagaagagtacgtcgactgggtgatctcgcggccctacatcttccttgttctgctcaacctggtgggcgtagcggttgggatctggcgctacttctatggtccgccaaccgagatgctcaccgtggtcgtcagtatggtgtgggtattctacaacctgattattctcggcggcgcagtcgcagtatcggtagaaagcaaacaggtacgccgatcgcaccgcgtggagatgacgatgcccgcagcaattgcccgcgaagatggtcacctcttctcgtgtaccgttcaggatttctccgacggtggtttggggatcaagatcaacggtcaggcgcagattctggaagggcagaaagtgaatctgttgcttaaacgcggtcagcaggaatacgtcttcccggctcaggtggcgcgcgtgatgggtaatgaagttgggctgaaattaatgccgctcactacccagcaacatatcgattttgtgcagtgtacgtttgcccgtgcggatacatgggcgctctggcaggacagctacccggaagataagccgctggaaagtctgctggatattctgaagctcggcttccgtggctaccgccatctggcggaatttgcgccttcttcggtgaagggcatattccgtgtgctgacttctctggtttcctgggttgtatcgtttattccgcgccgcccggagcggagcgaaacggcacaaccatcggatcaggctttggctcaacaatga

SEQ ID NO: 33063 - DNA, 741 bp, Escherichia coli
atgactacttttaccgacaaagaactgattaaagaaatcagagagcgaatcggcagcctggacgtgcgagacaatattgagcgcctggcttatgaaatcgcactggcatcgctggcagcagtatcggatgaacgagcagcctatgaattatttatggagaagcgtttcggggaatctgtagatcgccgtagggcaaaaaatggcgatagagaatacatggcatgggatatggcgcttggctggattatctggtgtcaccgcgccgccatgcttcagggtagccaacctgtaagccaaacttacaacttgccagaattaatcgaaggcatggaagtttccattgatgtaagcacttgtgatgctgatttaggtaatcgctatttcggcaccgtcaccgaggcgttagaacttgatacagccaagaatggttacatcctcctggttcaggacgcagagccaaacttcgatgtaaatggcaactctccgggaactccggatagttgggttatggtgccgaagagactaacagcagagaacggcgctaagggggtgctatccggtgaattttcagaaactacgtttataagctgcctggaatgctttggcgatgatgattgcgatacctgtgacgggagcggacgtattgaaattaaagtgccagtcacgtggtcgaccataaaatctatctgggataaaggtatcgagtattttgcagcaaaaccatcacaagaggtgaagtga

SEQ ID NO: 33064 - DNA, 1350 bp, Escherichia coli
gtggcggatattgcgcgtacacagggagaactgaatgcgttgaaggccgcgaaggaagcaaccggcgaaacacttcctgctaatgcaacagagaaacaacgtcaggaatatcttgcgaaactgcgtgacacgcaggcttacaggaatgaaatggcgaagtatggtaccggcagtgaaattcagcggggtatccaggccgcgacagccgcgcttcagggactggcgggtggtaatttagcgggtgctctggccggagcttctgcaccggaactggcgcatctgctgaaatcaacagaaaaagacccggcagtaaacgccattgctcacgccattctgggcggtacagtagcggcaatgcagggtaataatgttgctgctggtgcagcaggcgcagcaacgggagagctggcagccagagcgattgccggaatgctgtatccgggagtgaagcagtcagacctcagtgaagagcagaagcagacgataagtacgctggcaactgtgtcagcagggctggccggcggtctaaccggaaacagcaccgcatcagcagcagtgggagcacagagcgggaagaatgctgttgagaataactacctgagcgtgtctgaaaagacagaacttgagatagcaaaacagacgcttaaaaacagtaaagatccggcagagcgtgaaaaggcacagcagaaatatgatgcattgcttgaaaaagatattgccagtgataaggaggttattgctgcctgtagtaatggtaatgcgagtagttcagcgtgtgccagcgcaagactgaaagttattgcgtcgaaagaagggtacgaagatggcccttataactcgaaatacagccagcaatacgctgatgcgtatggtcagatagtcaatctcctcgatatcaccagtgttgatgcacagaatcagcagcaggtgaaaaacgccatgattaactatttcatggtcaccaaaggggtggatcgtcagaccgcagaaagctacaccgaaacaacgcagggcttggagatcattgcggcttcggtaacgcctcttatagggcaagctgcatcaaataaattaagctaccttggtattgggaaaaagatatcctttgatggtgatttttatactgtagatggaatgaaattcagcaaaagttattatgagaaattatgggagcaaggcagacctgcgccattcgtgcaagcaagagaagtgttgaatagcaatccaaaaattgagccggatcctagaggcgcacctggctacttaagatatgaaggtgcaggtcttgaaatgatctataacccgaaaacgggacaagttggtcatattcaaccagtcaaggttaaataa

SEQ ID NO: 33065 - DNA, 225 bp, Escherichia coli; identical to SEQ ID NO: 11866

SEQ ID NO: 33066 - DNA, 405 bp, Escherichia coli; identical to SEQ ID NO: 2569

SEQ ID NO: 33067 - DNA, 216 bp, Escherichia coli
atgaaatccatggataagttaacaacgggtgtcgcctatggcacctcagcaggtagtgccggttactggtttttacagctgctcgataaagtcacgccctcacagtgggcagcaataggtgtgctgggtagcctggtatttggcctgctgacgtacctgacaaacctttatttcaagattaaagaagataagcgcaaggctgcgagaggtgaataa

SEQ ID NO: 33068 - DNA, 261 bp, Escherichia coli; identical to SEQ ID NO: 5351

SEQ ID NO: 33069 - DNA, 378 bp, Escherichia coli
atggacgaacagtggggctatgtcggggctaaatcgcgccagcgctggctgttttacgcgtatgacagtctccggaagacggttgttgcgcacgtattcggtgagcgcactatggcgacgctggggcgtcttatgagcctgctgtcaccctttgacgtggtgatatggatgacggatggctggccgctgtatgaatcccgcctgaagggaaagctgcacgtaatcagcaagcgatatacgcagcgaattgagcggcataacctgaatctgaggcagcacctggcacggctgggacggaagtcgctgtcgttctcaaaatcggtggagctgcatgacaaagtcatcgggcattatctgaacataaaacactatcaataa

SEQ ID NO: 33070 - DNA, 174 bp, Escherichia coli
atgggtaatctgccagtgggaagtcgtggtttatataaaggtaaaaaacgcagcgccggtatgaatgaattacgtcgtccgggaagcacacagatgacgcgcactggtcaggcgcatcgtggtggcgaacaccggctgaacacggggccaccggactggcagaccgtggaataa

SEQ ID NO: 33071 - DNA, 444 bp, Escherichia coli
atgaacgggagtataaggaagatgatgcgtgtcacctgcgggatgttactgatggtcatgagtggtgtgtcgcagtcagcggagctgacactggagagtcacggcagtcgcggcgggcagttacgtgatggagagaagctggcgacggggcggattatctgccgggaggcgcacacgggttttcatgtatggatgaatgagcgtcaggtggacggcagggcggagcgctatgtggtgcagagtaaggatggtcgtcatgagcttcgtgtcaggacaggaggagatggctggtcgccggtgaagggagaaggcgggaagggggtgtcgaggcccggtcaggaggagcagtttttttttgatgtgatggcggacggaaatcaggacattgctcctggtgaataccggttttcggttggcggagcctgtgtggggccacaggaataa

SEQ ID NO: 33072 - DNA, 2583 bp, Escherichia coli
atgcgtgatacttcttcagggcggatgaaaacgggggtgacagggctggcgctggctgtgatggtggcctgtgtgatgtttcgtgcggagagtggtattgcgcgcacctactcctttgatgcggccatgctgaaaggtggcggtaagggggtggacctgaccctgtttgaggaaggtgggcagttacccggcatttatccggttgacattatcctgaatggttcccgtgtggattcacaggagatggcctttcacgcggagagggacgcggagggcaggccttatctgaagacctgtctgacccgtgagatgctggcgcgttacggggtcaggattgaggaatatccggcgttgttccgtgcatccggagagggtcgtggtgcctccgtggcggaggaggcctgtgctgacctgacggcgataccgcaggccacggagagttatcagtttgctgcccggcaactggttctgggtatccctcaggtagcactgcgtccgcagctgagggggattgcgccggaggctttatgggatgatggcattccggcttttctgctgaactggcaggcgaatgcggggcgcagtgagtaccggggttacgggaagcgtgtcacggacagttactgggtcagtctgcagccgggaatcaacattggaccctggcgtgtgaggaacctgaccacctggaacaggtcatccggtcagtcgggaaaatgggagagttcatacatacgtgctgagcgggggctgaacgggataaagagtcgcctgacgctgggtgaggattacacgccgtcagacatttttgacagtgtgcctttccggggggcgatgatgagttctgatgagagtatggtgccttataacctgcgtgaatttgcgccggttgtacgtggcattgcccgcacgcaggccaggatagaggtgcgtcagaacggctatctgatacaaagtcagacggtggcgccgggggcatttgccctgacggacctgccggtgacggggtccggcagtgacctgcaggtgacggtgctggaatcagacgggacggcgcaggttttcacggtgccgttcaccacgccggccattgcgctgcgtgaggggtacctgaagtacaacgtcacggcgggtcagtaccgttcaccggatgatgcggttgagcagacgtcgctgggacaggtgacggccatgtacggtctgccgtgggggctgacggtgtacgggggtgttcagggtgcggagcattatcaggctgcggccctggggcttggctggtcactggggcgtctgggggcggtgtcgctggacacgactcactcccgggggcagcagaagggacatgattatgagaccggtgacacctggcgtatccgttataacaagtcgtttgagctgacggggacgagttttacggcagcgagttatcagtactcatcggatggttaccatacgctgccggacgtgctggacacctggcgtgatgaccggtacacataccgtcacacggagaaccggagtcgccgtaccacgctgagtctgagtcagtccctgggtcagtggggctatgtgggactgaacggcagccgggatgagtaccgtgacagaccgcaccgtgattattttggcgcgtcatacagtacgtcctggaacaatatctcgctgtcggttaactggtcacgcaaccgcaacagcggcggctattacggtggctggtcgcgtacggaagacagtgtcagtatgtggatgagtgtgccgctgggacgctggtttggggggacggataacgacatcagtgccacggcgcagatgcagcgttccacgggacaggatacccggtatgaggccggactgaacggacgggcatttgaccgccggctgtactgggatgtccgtgagcagatggtgccgggcagtgagagccatgctgacaccagtcgtctgaacctgacgtggtacgggacatatggtgaactgacggggatgtacagttacagcagcacgatgcgccagctgaacgccgggatgtccggcagcatggtggcccacagtgagggggtcacctttggtcagcggaccggggatacggtggcactgattgcggcaccgggcgtgagtggtgcgtctgtgggtggctggccgggtgtgagaacggatttccgggggtatacgctggccggttatgcctcgccgtaccaggagaacgtgctgacactggacccgacgacgttcccggaggatgcggaagtgccgcagacggacagtcgtgtggtgccgacgaagggggcagtggtccgggccggattcaggacccgtgtgggtggtcgtgcgctggtgagtctggcccgtcaggacggaacgccgctgccgtttggtgcggtggtgacagttgagggcgaagcgggtcaggctgcgggctcagccggtgtggtgggagaccgtggtgaggtgtacctgagcgggctgaaggaaagcggtaagctgaaggcgcagtggggagagaacagtctgtgccatgcggattaccgtcttccggaagagaaggggcctgcggggatatttctgacccgtacggtgtgtatgtga

SEQ ID NO: 33073 - DNA, 798 bp, Escherichia coli
atgaaaatgcgggctgtggcggtgttcactggcatgctgacgggagtgttatcagtgacaggtttgctgtcagcgggggcatatgccgccgggggagaagggaatatgtctgcatccgcgacggagacaaacgccagagtattctcgctgcatctgggggccacgcgggtggtttacaacccggcctcgtcgggggagacgctgacggtgattaatgaccaggactatccgatgctggtgcagtcggaggtgctgagtgaggaccagaagagtccggcgccttttgtggtgacaccaccgttgttccgtcttgatggtcagcagtcgagtcgtctgcgtattgtcaggacgtacggggagtttccgtcagaccgtgagagtctgcagtggatttgcgtgaaaggcattccgccgaaggaggatgacaggtgggcggaagggaaggacggggagaagaaggctgacaaagtctccctgaatgtacagctttcagtgagcagctgcatcaagctgtttgttcgtccgccggcggtgaaggggcgaccggatgatgtggccggcaaggtggagtggcagagggccggcaacaggctgaagggggttaacccgacgccgttttacatcaacctgtccacgctgacggtggggggtaaggaagtgaaggagcgtgaatatattgcgccgttttcctcccgtgaatatccgctgcctgcgggggcatcgggtaaggttcagtggaaggtgataacggattacggcgggaccagtaagcagtttgaggcagagctgaagggttga

SEQ ID NO: 33074 - DNA, 294 bp, Escherichia coli; identical to SEQ ID NO: 29908

SEQ ID NO: 33075 - DNA, 315 bp, Escherichia coli; identical to SEQ ID NO: 10157

SEQ ID NO: 33076 - DNA, 1767 bp, Escherichia coli
gtggcttttgtaactgatattcggcttgaagataatgctattgctgcacctgcgacagcacaggttatggctcagaggctaggatctgtattacgtaagagatatgaagaattcatccataaaagagagtgtgcaccaggccaagcagactatgatgtaaaaatggctagcagggctttagctgcattcactatgtatcagttaggatgtgtggatgataagtatgcaggggagtctgtatgtgatagtagtgaagatggtggtatagatggaatagcaatcaaccataacgaaaaaatcgttgttgttgttcaatcaaaatttcaccaatcgggaaacggcacttggacaagagccgattttatgtgttttaaggatgcttgtgagaagctacaaagtgaaagatacgaattatttgattccatattgcaaaataaaagcggggaaataagtgcggctttaagtagttttgaatacaagttcatctttgcgatggcgcatacaggtaaaaaaggtgctgcagaggaaatattaaatgatatgcgggaatggcaatatcaattaaacgctgcagcttttacacctgaggatgagcctaaagagaactggggatttcaggttcatttaatatcctctgaagatatgatgcattggttacagaatggctctcgaaatcaaattgatcttaacagggttgaaattgagcgttttggatttttgaatgaaccatatcaagctttttacggggctattagtggtgatcaagttgcagaatggtgggaagagcatggtgctcgattatttacaaaaaacataaggaatatgcttggtaaaacagaagtgaatgaggaaataaaaaagacagctatagataatcctgatatgttttggttttataataatgggattactgtactggttaaggaagttgttcctcatagacgaaacgcagctcctaatatagagagagggatttttgattttcgtgatgtaagtgtcattaatggtgcacaaacagtcagtagtattggcgcatgtaaagatgcgcttggtgaaaacatatatagactcaaagtgccagctagattcattgttatagatgatgatactgataatttaactgcaaatgcaattacaaaagctaacaatttccaaaatagagtattgggaagagattttgcatcgcagcaggcagatcaacatagattggcaagggagttagtgcttgaaggatatcaatatcagttactaagaacagatgaagatcattcacagacaaatacgaaagtcattgacttggatgaggcgctcaatgcactcgcatgtttaagtaaaaataatacggttgtatcgacactaaaatcaaatcgcggtaggttttttgaaaattttgaaggctctctatataaaactattttcaatccaagattaagtggtttaaaacttatcaatactgttctacattttagagttatagataagttgatcggtaaaacattactatcagtagataaaacgacccatagtcgcaagcatttaattattacgcatggtaatagatactatgcgtctgtactattgagcaacgtttctgggatacataatagctcagaaattcttgttccagatgaaaaaaatctttccgaagaattaagtgcattaattcaacgtgctgaagagtacattgaagataattacccgaatgcctatccggcaagattttttgcaaatccaacgaaaatacaagagttatacgataatgtttaa

SEQ ID NO: 33077 - DNA, 294 bp, Escherichia coli
gtggagcacgtcttcggtgaacgcactctggccacactggagcgtcttctgagcctgatgtcggcctttgaggtcgtggtatggatgacggatggctggccgctgtatgaatcacgcctgaagggaaagctgcacgttatcagcaagcgttacactcagcgcattgagcgacataatctgaatctgagacaacatctggcaaggctgggacggaagttactgtcgttctcaaaatcggtggagctgcatgacaaggtcatcgggcattatctgaacataaaacactatcagtaa

SEQ ID NO: 33078 - DNA, 126 bp, Escherichia coli
atgcaatatgccattgcagggtggcctgttgctggctgcccttccgaatctttacttgaacgaatcaccagtaaattacgtgacggatggaaaagagttgaggtcttattatgcgcaatgaaatag

SEQ ID NO: 33079 - DNA, 534 bp, Escherichia coli
gtggatcttactcaagtgtctgtaagggagattcttcattacaatcctttgagtggtgacttttattggaagccgagagcaaagcatttgtttgcggataacagagctgccttgacgtggaacaagaagtatccaggtaaaaaggctggctcacctgacaacaagggttatctgagaataaatattggaggtaaaaaatttaagtctcacagacttgcatggctttacgtgcatggctactggcctgatgtgattgatcacataaacggcgttaaggatgacaacagaatctccaatttaagaagcgtttctttcaaagagaatatgaaaaacatgcctttaaaatcatcttcatcaactggagttacaggtgttgaagcaagaaaagagcatgggttttatgttgcatcgataactgtggatggaaaacgaaaatacctaggctcattcaaacttttagatgatgccaaacaagcaaggaaagaagccaatgcactatatggctttcatgaaaatcatggacggagccagtaa

SEQ ID NO: 33080 - DNA, 765 bp, Escherichia coli
atggttcatattatgacggaactgatagtacagtcaatacctaatatagttgaacttatggttcaacagaaagagcgtgaaactttctcgcagaggcttgcgctggcctgtgataaagcgggattacctttgcatggtaggcaggctgatttagctgtcaggcttaaggtcacaccaaaagccattagtaaatggttcaacggggagtcaataccaagaaaagacaagatggaatctctggcttcggtgctgggaactactgctgcatatctgcatggctatgctgattatgacggtatcacggtaaatcatctatcaagatcaaatgattcttatcgtgttgatgtattggatgttcaggcgagcgccgggccaggaaccatggtttccaatgaatttatagaaaagataagagcaattgaatatacgcccgagcaggcaagaattttatttaatggaaggccacaggaaagcgtaaaagtcatcacggttcgcggtgacagcatggagggaaccatcaatccgggagatgagatctttgttgatgtatccataacctattttgatggcgatggcatttatgtgtttgtatacgggaaaacaatgcacgttaagcgcctgcaaatgcaaaagaacaggcttgccgtcatctctgacaatgccgcttatgatcgatggtacatagaagaaggtgaagaagagcaacttcacattctagccaaagtcctcattaggcagtcaatcgattacaagcgattcggataa

SEQ ID NO: 33081 - DNA, 231 bp, Escherichia coli
atgaacgaagttacgtttggagaagttatcaaatccgttcgagtttctgttgtggctgatgtttgtggacttacgccaaaagccatctataagtggcttgagcgtggttctctgccgcgtaccgagttcactggtgaaaccgaatatgcggataagatcgccaaggcatcaggcggcaagtactcagcagcacagattcgccgtatcggtaaacagcagtttgttatgtaa

SEQ ID NO: 33082 - DNA, 342 bp, Escherichia coli
atggattattcacagttaagtgattttgaaattaacagaatggtaggagacataatttttaaaggcctttgggcatgtaagccggaaacgtcagggaataataccaacaaatggtattacggaaacgctgatacaacttttgagccattaaaccatttacctgactactgcaatgatccgagtgcctcatggccgattattgagaaacacaggatttctatcttagaccagttaactgaatggtgtgtggatgcaaacggcgtaagaccaatatttgataccagacctctccgcgccgccatgattgtctttctcatgatgcaggacgccaataatgcttag

SEQ ID NO: 33083 - DNA, 1401 bp, Escherichia coli
  misc_feature (1322)..(1363): n is a, c, g, or t
atgaaaatgatttttaccggtaaggtcagcggagaaaaaaccgtgctgactgccggaggtcgtcatacagttaaagcacagcccggggaacagtatggacttatcgatgaggtgaccggcctggtgcctgatggtgttgaggcggatcgttccggtgatgatttaattctgcgtaaaaaggaagaagatactgaggtccggatagagggattctgggaagaatgccagcccggggaaacacagtgtacggcggtatttaatattgttggggaagatggacaggtcaccgaagctgtactgactcaggatggtccggtgcttgatgatattactgccggacaatcgggaaccttgtcagatgatgatcgtggcggttttatatggttgggcggtctggcatttggtgggggactggctgctatggctttagctgcaggtggcggtggaagcaaacatagacatgaaaatgatgactctgatactacagccccatcgtcaccagcactgaaggcagaggatgacggttctgtttctgttgtcttgccgggtgatgccaataaaggtgataccgttgaaatcacctttgaagatgaaaaaggtggtaagcacaccgtgacgctggagaaaggggataacggctggacatccagtgacccgacgctgatcccggacagcaatggcgataaagcgaccattccggcagataatgtgaaggataacagtgaagtcaccgccattgccaaagatccgagcggtaatgaaagcgatccttcaaccgtgacgtcaaaaactgatggtgtggcagatgccccggtcctgagcattcctgaagtggctgacggttatgccaatgccgatgagctgaaggatggtttgcaggcagaggtcacgttgccggcaggcacggcagaaggtgcggttattacactgactgtgacccgtccggataaaaccacggagaacgtgacgcataccgtgactaaagatgaagtggctgccggtaaagtatccatggatattccgaaggatgcggtgattgacgggcagaacagcgtcagtgtcagtctgactcagggcagtaacccggcgaagcccgggaatgtggttgattttactgccgatacccagatcccgggggataccgatggtgatggtgcaacagatgcaacaccggtagtagccattccggaagcagcagacggcgtgaatgccgaagagctgaaggacggtgtgcagaccgaagtcacggtaccgaaaggcagtgctgccggtgataccctgacgctgacggtcactaaaccggacggcacgacggacacagnnnnnnnnnnnnnnnnnnnnnnnnnnnnnnnnnnnnnnnnnnacgacggacacggtggagcacacgctgaccgcagatga

SEQ ID NO: 33084 - DNA, 432 bp, Escherichia coli; identical to SEQ ID NO: 8375

SEQ ID NO: 33085 - DNA, 129 bp, Escherichia coli
atgcgcacccgtggccaggacccaacgctgcccgagatgcgccgcgtgcggctgctggagatggcggacgcgatggatatgttctgccaagggttggtttgcgcattcacagttctccgcaagaattga

SEQ ID NO: 33086 - DNA, 279 bp, Escherichia coli
atgagcggcctcatttcttattctgagttacaacagtccgcaccgctgccggtagctattgactatccggctgcactagccctgcgtcagatggctctgatccaaggcaaactgccaaaatatctgctggcaccggaagtcagcgccctgcaccattatgttccggatctgcatcgcaggatgctgctggctaccctgtggaacacctacatctgtattaacgaagcgctggcattgaccctgagtgatttttctctggtgccgccttatcactgttga

SEQ ID NO: 33087 - DNA, 210 bp, Escherichia coli; identical to SEQ ID NO: 9340

SEQ ID NO: 33088 - DNA, 294 bp, Escherichia coli; identical to SEQ ID NO: 32087

SEQ ID NO: 33089 - DNA, 1419 bp, Escherichia coli
atgcatgtacagcccatttcaactttccgtttgttccaggaaggtcatctgctacgtaatagcatcgctatttttgcgctaaccacgctgttctatttcattggtgcagagttacggctggttcacgaactttctcttttctggccgctgaatggcgtaatggcgggggtgtttgcccgctatgtctggcttaatcgactgcattactatgcgatcagttatgtggcgatgctggtttatgatgccataaccaccgaatgggggctggtttcactggctatcaatttctccaatatgatgtttattgttaccgtcgccttactggtcgcgcgggataagcgtctggggaaaaataagtatgagccagtaagtgccttacgactatttaattactgtctgattgccgcattattatgcgctattgtcggggcgattgggtcggtcagtattgatagtctggatttctggcctttgcttgccgactggttcagtgagcaattctcaacgggcgtgttgatcgtgccttgtatgctgacgttggcaattcctggagtgctgccgcgctttaaagcagaacagatgatgcccgctatcgcgcttattgtgtcggttattgcctcggtagtcattggcggagcggggagtctggcgttcccgctgcctgcattaatctggtgtgccgtgcgctatacgccgcaggtaacatgtctgttgacctttgtcaccggtgcggtggaaatagtactggtggcaaattcggtgattgatatctcggtcggttcgccgttctccattccggaaatgttctccgcacgtctcggtattgctacgatggcgatatgcccaattatggtttcttttagcgtggcagcgatcaattcgctaatgaagcaagttgcgctgcgagccgactttgattttctgactcaggtttactcacggtccggtctttatgaggcgctgaaaagtccatcgctgaaacagacacaacatctgactgtcatgctgcttgatatcgactatttcaaaagtattaacgataactatggacatgaatgtggcgataaagtgttaagcgtgtttgcaaggcatattcagaagattgtcggtgataaggggctggtggcacgaatgggcggcgaagaatttgctgttgcagtgccgtcggtgaatcctgtcgatggtctgctaatggcggaaaaaatccgtaaaggcgttgaattgcaaccgttcacctggcaacaaaaaacgctttatctcacggtaagtattggcgtcggtagtggatgcgcgtcgtaccgaacgctgaccgatgactttaataaattgatggtcgaagccgatacatgtctgtatcgctcgaagaaagatgggcgcaaccgtaccagcactatgcgttacggtgaggaagttgtctga

SEQ ID NO: 33090 - DNA, 537 bp, Escherichia coli
atgaaccactccttaaaaccctggaacacatttggcattgatcataatgctcagcacattgtatgtgccgaagacgaacaacaattactcaatgcctggcagcatgcaaccgcagaaggacaacccgttcttattctgggtgaaggaagtaatgtactttttctggaggactatcgcggcacggtgatcatcaaccggatcaaaggtatcgaaattcatgatgaacctgatgcgtggtatttacatgtaggagccggagaaaactggcatcgcctggtaaaatacactttgcaggaaggtatgcctggtctggaaaatctggcattaattcctggttgtgtcggctcatcacctatccagaatattggtgcttatggcgtagaattacagcgagtttgcgcttatgttgattgtgttgaactggcgacaggcaagcaagtatgcttaactgccaaagagtgccgttttggctatcgcgacagtatttttaaacatgaataccaggatcgcttcgccattgtagccatgcgagagtag

SEQ ID NO: 33091 - DNA, 198 bp, Escherichia coli
atggttgccgtaaatcatataccacaccttgtacacacacaaacggcctttgtgtggcgttttctggcactgagtgccggagaatctcaaatcatccacgtaaccgcctggacggaacgcgaagcgcgtagccgttgcccgtccggttgtgttgctgtatttgctgcccgtattcgccaggggtcacatcatgcgtaa

SEQ ID NO: 33092 - DNA, 483 bp, Escherichia coli; identical to SEQ ID NO: 21028

SEQ ID NO: 33093 - DNA, 327 bp, Escherichia coli; identical to SEQ ID NO: 21023

SEQ ID NO: 33094 - DNA, 747 bp, Escherichia coli
gtggcgatagcccacatatgcggccttcgatgtgtagtttttggtgaagacgagatgccctacaacgctgaatccggcgcgtttccaggctgccataaagcggtcaatacggttccagccatagaaactcaccatcagcgcgtcttttttgagtacgcggtacatttcattacaggctggttgcagccattcatcggttttatcgccggcgatggtgcgcccggaacggtcacggaaaccgacgagatacggcgggtcggtgaggatgaaatcgacagcattgcccggaaacgtggccataacacgcacgcagtcacccaggataaaacgggacataacagcactccttctcttacagagggcaccgggagggcacccctgtggtgcccgttccccgctgcctgtgggctgttcaccgcgtccggtaacgggtcaggccgaccgtggaataccgcagccgtcgtctttctgacggcaaggctatgccgcgaaagcggcttgaagggcgttcatcagaaaagggctcccggctggcgtacactgtcaccaacgccagccgggagcggtaaaagcgcccgtcccgtgcccggccggacgcgggacactgaccacaggcagcgttcctgccgcgccgcgtcagccggcgcagtaaaaagaggagcccggcgacatcttttgtcacccgccaaacaaaacccaaaaacaacccacaccaaacccaataaaacaccaaaacaagacaaataa

SEQ ID NO: 33095 - DNA, 963 bp, Escherichia coli
atgttgctctgcccgctcctgtccggggcgaatcacccgggtctgctgtccgtccgacagcgtgacactgtcaccggaaaccgctgtcaccgtccagacgctgttggccacataaccgcgctcccggtcactcttcgtgaagcgcatccggtcaccggtccccacccggatggtgtccggggtgtacagtgtgacgccttcagccaccgcctcccggggcgaaatcagccgcgtgttaccttcagcatcctgcagggttatcagcctgtcatccttgctgataccggcaatccggtgatacacattatccaccagggcaagggcatccgggttattctcccaggtggagagacgacgcagctccccgtcacgtatattcgctgtgttcaggacaggcaccatgacctgctctttccccagctcaccggccttttcccgtgcatcatgaatcatgctgttcagtacgcgccggtcctcattcaggtgcgtgacaatcagcgtctgctcccgtgcttccggcgtcctgccggtatagtcgcggacaatggcttcatacagtgtcatggggacatccgggaaagcctcgcctttcagcatcgccttctgctgcgcttctgccagtttcgcttcctggctgtgactgaactccgtcacggagtgctccggtgcccatgcgccctccagacgtggcacctgagacggtttcacactctcaagcccggacagtgccctttccacatcccggttaatcaggctgtataccgcctcccgcagttccggcgtctgacgcacaatctccttcatgatgaccacatcggcagcactgcgcgtctgctggagacggaaaggctgaccgggcgcgatggcctgcagctggtccgtgtcaccgctggccacagcacgaccgccaccggccgcaatcagggcgtatgcccgtgccatgtcggtattgcccaccattga

SEQ ID NO: 33096 - DNA, 135 bp, Escherichia coli
atggaagccgataaatatataatgataatcaaatacttatcagacaactctcacaaactaaccccgcttgtcttggcggtttcggttcttgtcgcctttctatcaatcctgtttattgcaatgcgcatggggtaa

SEQ ID NO: 33097 - DNA, 705 bp, Escherichia coli
atgaagccttgggtaaaatttccttcaaagttcgtactagatggacgcttaaaagagcttttatggactgatgacaaggtaggaaaaccgtcacataaggtcgcagccttaaaactgtatatagcgctgtccatgagagctgaaagtaaagaggctttctgtcattacatagatacctacataacatattattcagctcaggcgacctatgaggaactctcggaactgacagccctgagcagatcatcaatatcatcaggcattgatattttagagagacttgggctgttatcagtagataaagttaggcgaaaaaatatctaccgattccctgggtttgatggttcgaaggactggtgcaaaatgccttgtagagcgttgttatctcgtgatggcaaacggattgaagcattccataaacttaagttaagaagcaagattgagctttatgcgctaaagatgttcatctacttatgtgctgttcgagacaatcacagtcattatacaagcgcttcatttgaaagaataaacttgcagacttctattccagaagcggacatacctaggacgcatgcctacctgagcgggataggactcatagctttagtagagaaacgaaaagatgggtttggcggcatgaagaaaaaccctccaaattcctactttgttactggtcataatgacttttttataggaaagcgataa

SEQ ID NO: 33098 - DNA, 1101 bp, Escherichia coli
atgttgtatgagggagcacagtacccaattcctccaaaggataaatttggtgcatttagtgattcctgcccggatcgttgggggcgtatgctaatgaagcgtcgttttgagagggatattcgagacgggttatgtgataaagactcccacctttatgagtctgattatctactaggtgttcatgatctttatcgggttggggctcttcgatacaaacgtgaagacgctggagagtttcttgataatcgcattgatgttgcagccccaccatttaccgaaatagcgagtctggaaagggctagccgggcaattgaagaagatcctgataataaagagctaatggggcaaaaatggttaagaatgctaatcgctccggggggatcattaggggggacacgtccgaaagccagtgttgttgatgaagctgggcatctctacatcgctaaatttcccagtgtaaaagatgagtatgatgttggtggatgggaaatggtcgttaatgcacttgctgttggctgtggactgaatgttgcacctgctcaggcgcataaatttgccagcaattaccattgttttatggttcgtcgttttgaccgcactaatgcgggaaggcgtctgcattttgcttcggctatgacactaaccaggcatcaggatggtgaagatgcctctacaggtgtgagttatctggaattagcagatgttcttatcagacatggagcgcagactaatactgaccttaaggaactctggtccaggattgtttttaatattcttgtttctaataccgatgaccatttacgtaatcatggatatatcttgataccgggaaaaggttggcggctttctgaggcatatgatttgaatcctgttgccaggtctgacggtctaaaactcaatattacagaaaatgataatgcacttgatttggaattagctcgagaagttgcggagtattttcgacttggtttgacagaagcagatgacattattgctaattttagagggattgtcagtcagtggcgaatcattgccgagcgtcttcgattacctggtcgtgagcaagagttaatggcagaggcgttcaggggggcaatttag

SEQ ID NO: 33099 - DNA, 282 bp, Escherichia coli
atgcgacttgcgctccgtctggggcgcaccttatccgaactgcgccacagtctgagtgcgagcgaggcgatgatgtggatggagttcgacagggtgtccccgctgggcgatgagcgcggggatatccgtaatgcgcagatcgtgaaagcggttttcggggcgcaggggatgaatgtttcactgaaggacgccatgctctgctggggcgaggatgaggacaagccggaagcggatccttttgcgggactggaagacgcgctgagccttgctgcacagtcataa

SEQ ID NO: 33100 - DNA, 336 bp, Escherichia coli
gtggtggcagcaacgttttcactgcgtctgaaaggcaaaccggtgtcctatgtggtaccgctggcgtttgttaaaaagccggaggcgaagcttaccgtgaataccggtgcgctgctgacaatgtcagtcagtgtcaacgggggaacgccgccttataaatacgcctggaagaaggatggtcagccggtcgagggacagactactgacactttcagtaaagccaatacgcagtcaggtgataagggggcttatacctgcatggtaacggattctgcagaacagccgcagagaattacctctgacgcgtgcacggtaacggtaaatggcgcaggttga

SEQ ID NO: 33101 - DNA, 720 bp, Escherichia coli; identical to SEQ ID NO: 14122

SEQ ID NO: 33102 - DNA, 681 bp, Escherichia coli
atggcaacgacgaacgcattctgtctggcgtcaccgccactggcacacatctgccttcacggggatttgcaacgatttggccgccgcctcagcctgtatgtgaacacggcagcggaagccatccgtgccctgtcgttacaggtgccgggctttcgccttcagatgaacgaaggctggtaccagatacgtattgccggtgaagacacggcaccggaggtggtgtacgcccgccttcacgaacagctgggtgagggaacggtcatccacattgtgccgcgactggccggggccggaaagggcggactgcagattgtgctgggggcggcagccatcgtgggctctttcttcacggccggtgcctcgatggcgttatggggttcagccctggcagccggtggtttttctgccaccacgatgctgttttcacttggagccagcatgattctgggcggtgtggcccagatgctggccccgaaggcaaaaacaccggattaccgcgtaacggataacggcagacagaacacgtacttttcctcgctggataacatgattgcccaggggaacccgatgccggtgccttatggggaaatgctggttggctcccgccgtatatcccaggacatcagcacccgtgatgaaggcgggggcggaaaggtcgtggttatcgggcgacagggataa

SEQ ID NO: 33103 - DNA, 678 bp, Escherichia coli
ttgaaaaatataaatttaaccgtgcaaccgggcgaacggatcgttctatgtggcccttcaggttccggtaaatcgacaaccattcgttgtattaatcatctggaagaacatcaacagggacggatcgtggtagatggcatcgaacttaatgaagatatccgcaatattgagcgcgtcaggcaggaagtgggaatggtctttcagcatttcaatctcttccctcatctgaccgtgttacagaactgtaccctggcaccgatttgggtacgcaagatgccaaagaaagaggctgaagctctggcgatgcattaccttgagcgggtgagaattgccgaacatgcccagaagtttcccggacagatttctggtggtcagcagcaacgtgttgccatagcacgttcgctgtgtatgaagccgaaaattatgttgtttgatgagccaacgtcggcgctcgatcctgagatggtgaaagaggtgctggatacgatgattgggctggcgcagtcgggtatgacaatgttgtgtgtaacacatgagatggggtttgcacgaaccgtcgctgaccgggtgatttttatggatcgtggggaaatagtggagcaagctgcacctgatgacttttttgcgcatcctaaatcagagcgtacgagggcatttttatcgcaggtaatccattaa

SEQ ID NO: 33104 - DNA, 360 bp, Escherichia coli; identical to SEQ ID NO: 5772

SEQ ID NO: 33105 - DNA, 243 bp, Escherichia coli; identical to SEQ ID NO: 7816

SEQ ID NO: 33106 - DNA, 252 bp, Escherichia coli
atgcgcgactggtggcagccgacgaaagcaaactttttcggacacctgaaaaagccgcagattatcgcagccctgaatgaggcaggactatccggtgccgcacgggacgcggagaagatgaagaaaggcgatgcggctgaacatgcagagcaccatatgaaagacaaccgctgggtgcctggctggatgtgtgcaccacgcccacagacggatgccactgaacgcaccgataacctggctgatgccgcctga

SEQ ID NO: 33107 - DNA, 141 bp, Escherichia coli
atgaaagaaaataaaattccggtttcacaggaaattaaaaaacatttattaaccggcatcatcgtggatgataccccttattgtggccgccgggatatgtattgcgttggggcaagttcttggcggtacagatgttggtga

SEQ ID NO: 33108 - DNA, 174 bp, Escherichia coli; identical to SEQ ID NO: 20951

SEQ ID NO: 33109 - DNA, 639 bp, Escherichia coli
atgcatgaaattatcggggaaaggatcaagtcccttagagaagctaaaggacttagccaggctcaattggccaagctttgcggctgggctgcgccttcacgcctggggaactacgagttaggaacaagaaaggttagcgcggatgacgcgctggttcttggggcggcactcggcgtatctccggcaaaaataatgtttggcgaggattcagacgctgtatttcgccaatatgagtacccgttattttcttcagtgcaggccgggccgttttcggaggttggaagctacacagcaagcgatgcaaaggcatgggtcccaacgaccacaaaagccagcgaaaaagctttctggcttgaggtgaaaggccattctatgactgcgccacagggcgtaaggccgagttttcctgagggtatgctgatactcgttgatccggccgagccggtagagtctggggatttctgcgtggcttctgcaaatggtgattcagaggcaacgttcaagaagtatgagaaggatgcaggggttagttacttggttccattgaatccggcatacagaaccctggactgcgatcacacatgccgcatcataggcaaggtagttaaggctcagtggcctgaagagacgtttggatga

SEQ ID NO: 33110 - DNA, 558 bp, Escherichia coli
atggtacaattgatgattagagatattgcaaaaaaatatagcgatactaattttttgtgtctgagatattttaacccaacaggtgctcacgagtcgggaatgatcggtgaaagtcccgctgatataccaagcaatttagttccttatatattacaagttgctatgggtaaactagaaaaacttatggtgtttgggggggattaccctacaaaggatggaaccggtgttcgtgattatatacacgtaatggatttagcggaagggcatgtggctgctttatcttaccttttccgtgataataacactaattatcatgtttttaatttaggtactggtaaaggatattctgttttagagctggtttctacctttgaaaaaatatctggggttagaattccatatgaaattgtttcgagaagagatggggatattgctgaaagttggtcatcaccagaaaaagcaaataagtatctcaattggaaagctaaaagggaattggaaacaatgcttgaggatgcctggcgctggcaaatgaaaaacccaaatggttatatttaa

SEQ ID NO: 33111 - DNA, 3801 bp, Escherichia coli
gtgaggcgattgccggggatattactgcttactggagccgcgctcgttgtgatcgctgccctgctggttagcggcctgcgtattgctttaccgcatcttgatgcctggcgtccggaaatcctcaacaaaatagaatccgcgactggcatgccggtagaagccagtcagctctcagccagctggcagaattttggcccgacgcttgaagcacacgacatccgtgcagaactaaaggatggcggcgaattttcggttaaacgcgttactcttgcgctggatgtctggcagagcctgttacatatgcgctggcagtttcgcgacctcactttctggcagctgcgctttcgcaccaacactcctatcaccagcggcggtggtaatgatagcctggaagccagtcacatcagcgatctgtttcttcgtcagttcgaccattttgatctccgcgacagtgaagtcagtttcctgacgccatccggtcagcgcgccgagctggcgatcccacaactcacctggctgaacgatccacgtcgacaccgtgcggaaggcctggtaagcctctccagccttaccggacagcacggcgtgatgcaggtgcgcatggatttgcgcgatgatgaggggttgttaagcaatggtcgcgtctggctccaggcggatgacatcgacctgaagccgtggctcggtaaatggatgcaggacaatattgcgctggaaacggcgcagttctcccttgaaggctggatgacgatcgataaaggcgatgtaaccggtggcgacgtctggctgaaacagggcggtgccagctggttgggcgagaaggaaacgcatacgctgtcggtggataatctgaccgcgcatattacgcgtgaaaatccgggatggcagttctctattcccgatacacggatcacgatggacggcaaaccctggccgagcggagcattgacgctggcctggataccggaacaggacgttggcggcaaagacaataaacgcagtgacgaactccggattcgcgccagtaatctggagctggcaggcctggagggcatacgcccgctggccgcgaaactttcacctgcactgggtgatgtttggcgctccacacaaccgagcggcaagattaacactctggcgctggatatcccgcttcaggcggcagacaagacccgttttcaggcatcgtggagcgatctggcctggaagcaatggaaattattaccgggtgcggaacacttctccgggacgctttccggcagcgtagaaaatggtttgcttaccgcatcgatgaagcaggcaaagatgccttacgaaacggtattccgtgcgccacttgaaatcgccgacggccaggcaacgataagctggctgaacaatgacaaaggtttccagctggatggacgtaatattgacgttaaagccaaagccgtccatgcgcgcggcggttttcgttacctgcaacctgctaacgatgaaccctggctggggattctggctggcatcagtaccgacgatggttcacaagcctggcgctatttcccggaaaacttgatgggtaaagacctggttgattacttaagtggcgcgattcagggcggtgaagcggataatgcgacgctggtttatggtggcaatccgcaactcttcccctataaacacaatgaaggtcagtttgaagtgctggtgccgctgcgcaacgcgaagtttgccttccagccggactggcctgcattaactaaccttgatattgaactggactttattaacgacggtttatggatgaaaaccgatggcgttaatctgggcggcgtgcgcgcgagtaatctcaccgcagtgatccctgactactcgaaagaaaaactgctgattgacgctgacattaaaagtccgggtaaagccgtcggcccttactttgatgagacaccgctgaaagattctctgggtgcaaccctgcaagaactccagctcgacggcgatgtgaatgctcgcttacatcttgatatcccgctgaacggcgaactggtaaccgcgaaaggtgaagtgacgctgcgtaataacagtctgtttatcaaaccactcgacagcaccctgaaaaatttgagcggtaaattcagctttatcaatggcgatctgcaaagtgaaccactgacagcaagctggtttaatcagccgttgaacgtggatttttccaccaaagaaggggcaaaagcctaccaggttgcggtgaatctcaacggtaactggcaaccagcgaaaaccggcgttttgcctgaagcggtgaacgaagcattaagtggcagcgtggcgtgggatggtaaagtgggcattgatctgccttatcatgctggcgcgacctataacgtagagctaaacggcgatttgaagaatgtgagcagtcacttaccttcaccgttagccaaacctgcgggtgaaccactgccggtaaacgttaaggttgatggcaatctcaacagctttgagttaaccggacaggctggtgcagataaccatttcaatagtcgctggttgcttggtcaaaagctgacgctcgaccgtgctatttgggcggcagacagtaaaacgctcccgccgttgccggaacaaagtggcgttgaactcaatatgccgccgatgaatggtgccgagtggctggccctgttccagaaaggcgcggcggagagtgtcggtggtgcagcgagtttcccacaacacataacgttacgtacgcctatgttgtcgctgggaaatcagcaatggaataacctgagtattgtttcgcaaccgactgcaaatggcaccgaggttgaggcgcaagggcgtgaaatcaacgccacgctggcgatgcgtaataacgcgccgtggctggcgaatatcaaatatctttattacaacccaagcgtggcgaaaactcatggtgactcaacgaattcatcacctttcccgacaacggagcgcattagcttccgtggctggccggacgcacaaatacgatgcgcagagtgctggttctgggggcaaaaattcgggcgcattgacagtgatatcaccatttctggcaatacattaacgctgactaatggactgattgatactggtttttcgcggctcactgccgatggtgaatgggttaacaatccgggaaatgaacgcacctcgctgaaaggaaaactgcgtgggcagaaaattgatgccgccgcagaattttttggtgtcacgacgcccatacgccagtcgtcatttaatgtggattacgatttacactggcgcaaagcaccctggcaaccagatgaggcgacgttgaatggcatcattcatactcaactgggcaaaggcgaaattaccgaaatcaataccggacatgccgggcaattgctgcgcttattgagcgttgatgccctgatgcgtaagctgcgttttgatttcagagacacctttggtgaagggttctattttgactccattcgcagcaccgcgtggattaaagacggcgttatgcacaccgacgacacgctggtggatggcctggaagcggacattgccatgaaagggtcggtaaatctggtgcgtcgcgacctgaatatggaagcggttgtcgcaccagagatttctgcgacggtgggcgtggctgcggcttttgcggttaaccccattgttggcgcggcagtgtttgccgccagtaaagtgctggggccgctgtggagcaaagtctccattttgcgctatcacatttcgggtccgctggacgatccgcaaatcaacgaagtgttgcgccaaccgcgtaaagaaaaagcgcaatga

SEQ ID NO: 33112 - DNA, 264 bp, Escherichia coli; identical to SEQ ID NO: 25905

SEQ ID NO: 33113 - DNA, 147 bp, Escherichia coli
atggttaagtcaatatttacaaaaaatgaaaatattgcttttttgatagaagaaaaagacattcagtttcataaggttattggcaatataacgttcaattcttacttgcattttatattagccaggaactttgccctgaggtgttag

SEQ ID NO: 33114 - DNA, 366 bp, Escherichia coli; identical to SEQ ID NO: 29545

SEQ ID NO: 33115 - DNA, 579 bp, Escherichia coli
atgatgcccctgcgtggccgccagcccggcggcatacaccggcggcaatcctataagcggatgaaaaaaacagttaaaccggtcgtggatcacttcccgggcaggcaccgtcaccgcctccgtgatcccgcagttccggtccggcgtgatgcggtagaacacctcgccgtcatccgccaccagaggttcaacccggctccagtccagaatacgcagttctttgatctgcccccgggcattacggattttcagcaccaccgtattgccgtgacgcagtttggcgttcagccacagttcaaaaaactggatgcggttctgctgggcgttgggacgacgacagaggcgggcaatatccccccggcgcgtttccctgcgtatcccatgcgcatccgtctgcataagacgcagccgcattttggcgatatcctgggatatcagcgaaatacatgcaaacaccgcatgaaaggagaggacggcttcaggatcggctttcacgccctgctgccaggcgccggaaaagggctcagccaccgcctgaaacaggctggtccagcccgcctctcttacgtcacgtcctga

SEQ ID NO: 33116 - DNA, 438 bp, Escherichia coli
atgaaccagctacctcgccgtgcgctttcgcgttatggtctgacttttcagggaaatatcctttcagtaaactgtcagtgccggatgctcacccgtgtccggcgcacgcactccacctcacccgtggagaactccttaatcaccaaccctcaggagggtgaaatgtcgactgaaaatgatgaaatcattaactccctgatacgccagattaataattttgataaagcattgcaacatgctgcggcgcgtagtgatataactcttttagcaatttcatttcttgcatctgttatggataaaaatgaagtcgtacgacagagtcttgttgattatatcgactcgcttcaacccggcactttcaatcatgagagcttcaatcatgagaaagagcatgttaagtctgtaattaattctcttattttgaatcaaaagaattaa

SEQ ID NO: 33117 - DNA, 411 bp, Escherichia coli
atggcaaaagtatttacacaagaagagcgggaaaaaattaaagggcaggttgttgaacttgtacgtctgagcggtcgcgagacgttgcggcaactggaagccaggacaggtgcgacaagatatctgatgagtgttctcgccagagagctggttgccagtggcgatgtatacaactctggttacgggttattcccgtctgaacaggcgcgtaaggactggcaaaatgctcgcaaaaaactctcaagggcaaagctgaagaaaccatctgcggttgatccggaccttatctggtcattacctgatggagaaatacgtcgttatgacaggcgtcagaacataatctgtagcgagtgccggaagagcgaagttatgcagcgcgtgctggcgttctatcggcgacgttttaggtag

SEQ ID NO: 33118 - DNA, 216 bp, Escherichia coli
atgaagagtttacgcattgggggggggaggataatgagtttggatatcgtctctacagagaaggatgttactttcggtctgttgaaggagcaatggcatatcatcaagaaccacccgggaaagaaaacgagacggatcgtgcggcagggaaaaatattactgttcaattgttacagcaaaaagttccttatttctatagaaaaaaagaaaaaatag

SEQ ID NO: 33119 - DNA, 381 bp, Escherichia coli; identical to SEQ ID NO: 6187

SEQ ID NO: 33120 - DNA, 147 bp, Escherichia coli
atgaaatcattaaccctcttcaatcaaccaattcgtatcggtgaagatggcatgatctgcctcactgatatgtggaaagccagtggtaaaagtgaatctgaaccgccccgggaatcctggagactaaacttcctgagaaagaggtaa

SEQ ID NO: 33121 - DNA, 1179 bp, Escherichia coli
gtgggcgttcatgcgtttaacggcgaaatctttgtgcagccggtctgggatacggagagcacgcaactgtttcgtacgcgttttaaagccgtgagtccgaaacgggtggacacgccaggacacggtatggggaaccgttttctgcgggccggtgtggaggtcgatcgatatggtcgtgccgttgcgtaccatatctgtgaggatgattttcctcgctccgggagtggacgatgggaacggatcccgcgtgaacttcccaccgagcgtccggccatgctgcatattttcgagccggtggaggacgggcagacccgtggagccaatcagttttacagcgtaatggaacggctgaagatgctcgattccctgcaggcaacacagcttcagtcggccatagtgaaggcgatgtatgcagcgacgattgaaagtgaccttgataccgaaaaggcctttgaatatatcgccggtgcgccgcaggggcagaaggataatccgcttattaatattctggataagttctccacctggtatgacacgaatagcgtgacgctgggcggtgtcaaaattccgcaccttttccccggtgatgatctgaaacttcagaccgcgcaggattcagacaatggattttcggcgcttgaacaggcgctgctgcggtatatcgccgccggtcttggcgtttcctacgaacagttgtcccgtgattactcgaaggtcagttattcaagtgcccgcgcatccgccaatgagtcgtggcgctattttatggggcggcgaaaatttattgcgtcccgactggccacgcagatgttttcctgctggctggaagaggcacttcttcgggggattattcgtccgccacgggcacgttttgatttttatcaggcgcgatcagcctggtcacgggctgagtggattggagccggaagaatggccattgacgggctcaaggaggttcaggaatcagtgatgcgcattgaggccggactgagcacgtatgagaaagagctggcgctgatgggcgaggattatcaggacattttccgccagcaggtcagggaatctgcagagcgggaaaaagccggactctcacgtccggtgtggatagcgcaggcgtatcagcagcagatagcggagagtcgcaggccggaagaggagacaacaccacgtgagacgtaa

SEQ ID NO: 33122 - DNA, 1218 bp, Escherichia coli; identical to SEQ ID NO: 22409

SEQ ID NO: 33123 - DNA, 2274 bp, Escherichia coli; identical to SEQ ID NO: 17657

SEQ ID NO: 33124 - DNA, 423 bp, Escherichia coli
atgaaaaaatggttccctgcttttttatttttatccctgtcaggctgtaatgatgctttagctggatggcacaatgtaatgttttatgcttttaatgactattctggttatgattctggtaatatgacaatttttgacaggggacaattcactattccatggaaaacaggagcagcatccgcaatctatagctcatgtcagactccagaattcgtgagcggtgtttactttcaggaatatatagcatgggtgttagttccgagaagtgcccaacccactgatgaatatactgtttttttgatgtctacagtaaatatggctggaatcaggaaaatacaggtgattatgggtattattatttcctcaacggatatgaatgggatacttggacaagcgatggggggcgggtgtgtgctccggtag

SEQ ID NO: 33125 - DNA, 189 bp, Escherichia coli; identical to SEQ ID NO: 23067

SEQ ID NO: 33126 - DNA, 189 bp, Escherichia coli; identical to SEQ ID NO: 17374

SEQ ID NO: 33127 - DNA, 708 bp, Escherichia coli; identical to SEQ ID NO: 17605

SEQ ID NO: 33128 - DNA, 600 bp, Escherichia coli
atgcgtaaattatgtgcagccattttgtccgcagccatctgtctgtccgtatccggtgcgcctgcatgggcgtctgaacatcagtccacactaagcgccgggtatcttcagacccacactgatatgccaggaagcgataatctgaacgggattaacgtgaaataccgttatgaatttacggacacgctggggctgattacgtctttcagttatgccgacgcagaagatgaacaaaaaacgcattacagcgatacccgctggcatgaagattccgtgcgtaaccgctggttcagcataatggcggggccgtctgtgcgcgtgaatgaatggttcagcgcgtatgcgatggcgggtgtggcttacagccgtgtgtcgactttctccggggattatctccgcgtaactgacaacaaggggaaaacgcacgacgtgctgaccggaagtgatgacggtcgccacagcaatacctctctggcgtggggggctggcgtgcagtttaacccgaccgaatccgtgaccattgaccttgcttatgaaggttccggtagtggcgactggcgaacggatgcatttattgttggtatcggataccgtttctga

SEQ ID NO: 33129 - DNA, 600 bp, Escherichia coli
atgcgtaaattatgtgctgttattctgtccgcagtagtctggctggttgccgctggtacaccagcgagcgcagcagagcatcagtccacactaagcgccgggtatcttcagacccatactgatatgccaggcagtgatgacctgaagggcattaacgtgaaataccgttatgagtttacggacgcgctggggctgattacgtccttcagttatgccaatgctgaggatgagcaaaaaacgcattacagcgatacccgctggcatgaagattccgtgcgtaaccgctggttcagcatgatggcggggccatctgtacgcgtgaatgaatggttcagtgcttatgcgatggcaggtgtggcttacagccgtgtgtcgacgttctccggggattatctccgcgtaactgacaacaaggggaaaacgcacgatgtgctgaccggaagtgatgacggtcgccacagcaacacgtctctggcgtggggggctggcgtgcagtttaacccgaccgaatccgtgaccattgatattgcttatgaaggttccggtagtggcgactggcgaacggatgcatttattgttggtatcggataccgtttctga

SEQ ID NO: 33130 - DNA, 216 bp, Escherichia coli; identical to SEQ ID NO: 10053

SEQ ID NO: 33131 - DNA, 354 bp, Escherichia coli; identical to SEQ ID NO: 24141

SEQ ID NO: 33132 - DNA, 198 bp, Escherichia coli; identical to SEQ ID NO: 31982

SEQ ID NO: 33133 - DNA, 216 bp, Escherichia coli; identical to SEQ ID NO: 5262

SEQ ID NO: 33134 - DNA, 564 bp, Escherichia coli; identical to SEQ ID NO: 5308

SEQ ID NO: 33135 - DNA, 1362 bp, Escherichia coli
atgacattagcagcaatcaccatgaccgccccagaagccgccagccctgtgcagatgtaccgcgcgacctactcaccggatgacaacaaactgcgcctgtatgctgcgtcacgtcttgacccggagacgtataaaaaagtgcatgatgccggttttcgctgggcaccaaaacaggcgctgtttgtggctccagcctggacaccgggccgggaagacgtgctcctctcacttgccggagagattgaggatgaagacagcacgctcgctgaacgtcaggaagcacgggcggagcggtttaccggatacagcggaaagcgggccagtgaatccgcacaggcacttgatgaagtggaaagactggccgcgatgatcccgcccggtcagcccattcttgtggggcatcacagcgaacgccgcgcccgtcgtgatgcgcagcgtattgaaaacggcatgaaacgtgccgtgatgctcgttgaacgtgcggaatactgggaagagcgggcgcggtcggcactgcttcacgcgaagtataaagaacgtccggacgttcgctggcgtcgtatcaaaaaaatcgaagctgatttgcgcaaggctgaaaagaccatcgcgcagtcgcagaaatatctgacgatatggcgggctgaatcgctggatctgaatatggcaaaactcatcagtagtcatgaccgtatcagtgcctgtttcccgctggatacgtatccgcgcccggcagaaaaaagccagtatgaaggaagtcgatcgttatggtcggccctggatgatgacatcatcaccacggagcaggcccgcgaaattgcgatccgctgtcataaacggcagattcagcatcagcaacgctgggttaaccactatcagaaccgcctgatctatgagcgtgccatgctggacgaaagcggcggcgtggttacccggacacaggattttgagccgggcggacaggttttcagccggggcgagtggctgaccatcatccgcgtgaacaaaagcaacgggacggtgagttcagtcacaacgccgaattacagttttctcgggtacagtggcacgatgaaagtgacgcccgatcgcattacggactacaaagcaccatcggcagaagaggctgccgtcgccagtcaggccgctaagcgtccgcctgttgtcaactatccgggagaaggtttccgggaaatgacaaaggcacagtgggctgccctgccccgggactgtaaggccgtgcgcagtgtggcagaggcagaagaccacggggcatatcgttaccgccgcacaatggacaataatttccgcctggtgaatgtgtatatcaccgacatgaagattacggaaatcccacagaaataa

SEQ ID NO: 33136 - DNA, 231 bp, Escherichia coli; identical to SEQ ID NO: 19231

SEQ ID NO: 33137 - DNA, 627 bp, Escherichia coli; identical to SEQ ID NO: 3005

SEQ ID NO: 33138 - DNA, 987 bp, Escherichia coli; identical to SEQ ID NO: 3004

SEQ ID NO: 33139 - DNA, 270 bp, Escherichia coli; identical to SEQ ID NO: 3003

SEQ ID NO: 33140 - DNA, 585 bp, Escherichia coli; identical to SEQ ID NO: 3002

SEQ ID NO: 33141 - DNA, 528 bp, Escherichia coli; identical to SEQ ID NO: 3001

SEQ ID NO: 33142 - DNA, 1158 bp, Escherichia coli
atgtcagggactgttgttgatccaaaaatgttagatgataaagattacgtttataactggaatgatttttataacttgcgttatagcaaacgtggaaaatttcaggctagtgtatcgcaacctttcggtaactacgggtctatgtatttatcggctagtcagcaaacatactggaatactgataaaaaagattctttataccaagttggttataacaccagtattaagggtatctatctaaatgttgtgtggaattacagtaaatcaccagggacaaatgcggataaaattgtctcgctaaatgtctcattacctataagtaattggttatcttccacgaatgatgggcgctcatcatcgaatgccatgactgcaacgtatggttatagtcaggataaccacggacaggtaaaccaatatacgggggtatctggttctctgttggagcagcataatctcagttataacatacaacatggttttgctaatcaggataatagcagtagtggttctgttggtgttaattatcgtggggcatatggttccttgaattccgcctacagttactataatgaaggtaatcaacaaataaactatggcatcagtggtgctcttgttgtacatgaaaatggtcttacgttgagtcaaccattaggtgaaactaatgttttgataaaagcgcccggagcgaataatgtggatgttcagcgggggacaggaatatccactgactggcgtggatatgcagttgttccttatgcaacagaatatagacgtaataatatttcattagatcctatgtcaatgaatatgcatactgaactggatatcacttccactgaagttattccgggaaaaggtgcgttagttcgtgcagagtttgctgctcatatcggtattcgtggtttgttcacagttcgttatcgtaataaatcagtcccattcggtgctacagccagcgctcagattaaaaacagtagtcaaattaccgggattgtcggcgataatggacaactttatctctcaggattgcctttagaaggtgttattaatatccagtggggagacggtgttcagcaaaaatgtcaggctaattacaagctccctgaaacagaactggataatcctgttagctatgcaactctggagtgccgctaa

SEQ ID NO: 33143 - DNA, 1509 bp, Escherichia coli; identical to SEQ ID NO: 31242

SEQ ID NO: 33144 - DNA, 204 bp, Escherichia coli
atggctcgtgtacgagcatcgctggctgaagtgcgtgatcaggtgactcataaaacctgtctcaactacgtgctggaaagtccgtactggaacgtaaaaggtaactttttctgttatctgaacgatcataacgagaacaccattgttgacccttcggtgatctatttcgatttcgctaacccgctgcaggctcaggaggtctga

SEQ ID NO: 33145 - DNA, 1521 bp, Escherichia coli
atgaccctgccctctgaaaaaccagccacagatgtggctgcgcagtgcttcctgaatgcactgattcgtgaaaccacagactggaaactgacagaatacccgccagacgaattgctcatcccgctggatgagcagaaatcgctccatttcagagtggcttatttctccccaacccagcatcaccgctttgcatttcctgcacgtctggtcacggcatcaggcagttatcctgtcgactttaccactctctcccggcttattattgataagctacgccatcaactgtttctgcccgttcccctctgcgaaactttccaccagcgcgtgctggaaagccatgtccatacgcaacaggcaattgatgcccgtcatgactgggccgctctgcgtgaaaaagcgttgaattttggcgaggctgagcaggcgctgctgacaggacacgctttccaccctgcgcctaagtctcatgaaccgtttaaccggcgggaggctgaacgctacctgcctgatatggcaccccacttcccactgcggtggttttcggtggataaaacgcaaatcgccggtgaaagtttgcatctcaaccttcaacagcggctgacgcgatttgccgcagagaatgcgcctcagttactcaacgaattaagtgacaaccaatggctgttcccgttgcacccgtggcagggggaatatcttttgcagcaggggtggtgccaggcacttgttgctaaagggctgattaaagacttaggtgaggccggcacgtcgtggctgccgaccacctcttcccgttccctctactgtgccaccagccgcgatatgatcaagttctccctgagcgtacggctgaccaactccatccgtactctgtccgtgaaagaagtgaagcgtgggatgcgcctggcacgcctggctcaaaccgacggctggcagatgctacaggtccgcttcccgactttccgggtaatgcaggaggatggctgggccgggctgcgcgatcttaacggcaacatcatgcaggaaagtctgtttgccctgcgtgaaaatctgctggtggatcagccgaaaagccagactaacgtactggtctccctgactcaggccgcacctgatggcggtgattcgctgctggtttcggcggtaaaacgcctgagcgatcgcctcggtatcactgtgcaacaggccgcccatgcatgggtcgatgcatactgtcagcaagtgctaaagccgctgtttacggctgaagcggattacggcctggtgctgctggcgcatcagcaaaatattcttgtccagatgcttggggatctgccggtcggatttatttaccgtgactgtcagggcagcgcttttatgcctcacgcgacagactggctcgattctattggcgaggcgcaggcggaaaatattttcacccatgagcagttgctgcgctatttcccttattacctgctggttaactccacttttgctgtgaccgctgcgctggggctgccgggctggacagcgaatcgaatctga

SEQ ID NO: 33146 - DNA, 2820 bp, Escherichia coli
gtgactacgttaaataaagctcccatgcctgatttttcatctgtggataggctattgggcgttgccacacttgttaacccacaatatgtcgtcagtgttaagcataatggtggctatagtagagtacggtttggtacgagtaattatactttagtagacagaaataactactcagcaagagatttccatacgcctaggttaaataaactggtaacagatgtggttcctgtagaggttaccagtgcaggaacagcgcagggaacatataaaaatgtaaccaagtttcctgttttctataggataggtacagggacacaaatatataaaaatgaacaaggatattatactctgaacggtgcttacagttatcttactggggggattgttcctacgccatcaatttcagattggtcatttgtgacaaatgctggcaacggtgctcttgcgtcgtatggaactcccggtgacagtggttcaccgctacttggatgggatacaactctaaataaatgggctcttgtgggggtactcagagcatatgcaggaaccacagggagtaccaactggtatgttgttataccaacagtgcaaatcaccgcaaatataaatgctgatactgataaacctgttaccagtgaggccgggagcggtgatattctctggactttcaacagtgtgacaggaaccggtcagttagttcagggagataattcctgggacatgcatggtcagaaggacttagatctcaattatgggaaaaatctgacattttctggaggcggtacaattgttttagaaaattcggtgactcagggggctggggcgctgacttttaatgatgactatgtggtgaaacctctggatgatcagacctggattggggggggtgtcattgtcaatgatgggcacgttgttgactggcaggtcaatggtgtgtcaggagatgcgctgcataaattaggcacgggtacgttgaaaattgatggctccgggattaatggtggaagcctgaatactggtgatggcgcagttattctggctcagagacccgatggcgaggggaaagttcaggcttttagtagggtatctcttgttagtggtcgctctattgtaattctttctgatgaaaatcagattaacccagataatatttattggggatatcgtggaggtacgcttgatattaatgggaatgatctgactttccacaaattaaatgcttttgatgacggtgcaattattacaagtaatggcagattggccagactgacactgtccttaaatgaaaaaacagcaactatttatcatgggaattttaagaatgatttgtctgtgacaaataacaccaccaataattcaggtgattttattgttgatggtggtataaatataaatgataattttgagcaaaatggtgggaaattgttttttcaggggcatcctgttcctcatgcggtgactagtcagtcagtagcaaatactctcaaaaaactaggagatgactcagtattaacacaaccagtgtcatttacacaggatgattgggagactcgccaattcagtttgaagtctcttgttctgaaagacaccgcgttttatcttggacgaaatgcgcagctcactactgatattagtgcagataactcatctgtcacccttggcagtgaagatgtctatattgatctgaatgacagtaatgaaaagaaagtacaggttattccgcaacaaggtcaatcaaaagcgacaaaggactcagataaaagtacattttatggaaatgtatctctgaccaataactctactttaaatattaatgaattttttacgggtggaataaatagtacagatagtactataaatatatcttcccctggtgcaactatcagtgagtacagtacgttgacccgttcggcactgacagtcaccgataatgcacagcttacaagcaaggctggtttactatcggatgacaatgttgtgctcggttcaggggctaccctctctttgttgaatgagcaatcgacgatgccagcgttttattcagcggcagcctgggatttgcaaggttctggatcaacgttgaatgttggttccggtacgatgatgagtggtgatattactgccggctcaaaagcgacaattaatattggtgttagtacgaaccaaggttctccattaggcatctactattccggagatatcaaagcacctggggccaatgttagtattgaccagacattgtggaagcttaactcgtcttctcaaatgcaaaatctggcactatctaacagccagcttgtgatgaccaccgatggtaaaaccagcagcaatattacggttctcgataagttaatcgcagagaacaatattctgtatgtaaaaccgaccagaccacttaacgaaatgtctgtcggtgatattccgttgatcacggcaaaaaatggaaccaacaatactcaggcgtttaaaactgtgcctcaacagatgggttttcactcaatggctcctgatgttgaggtggtaaatactgacggtgccacacagtggcgtctgaaaggattcgatgttcagcgtaataatgctgcactcaatgaaagtcaacgttttatggatatccgttacagaaacttcttatctgaggtgaataaccttaaccgacgtatgggtgatctacgcgatacacaaggagaagccggtgcctgggctcggtttatgaccacttctggttcgggtgaggggggattcactgatcgccatatgcatctgcaaattggtgccgacaaaaaacatcactttgatggagtaatgccagtcagttaa

SEQ ID NO: 33147 - DNA, 393 bp, Escherichia coli
  misc_feature (346)..(355): n is a, c, g, or t
atgcattcggaaaatattgcggcttacgtcgggctggatgtgcataaagaaacgttggcggttgctattgctgcacctgaacggcttggcgaagttcgttattatggtacgattaacaacgaagcccaggctgtacgtcgattatttcagaaattgcagggactttacggaaacattctttcctgctatgaggctggcccctgtggttttgggctatatcatcaactcacagcgatgaatataaaatgccaggttattgccccttcccgcataccaaaatcaccgacagacagaatcaaaaatgatcatcgggacgcaatttctctcgccaggttactgcgggctnnnnnnnnnnggctggagaacttacccctgtctggatccctgacctga

SEQ ID NO: 33148 - DNA, 744 bp, Escherichia coli; identical to SEQ ID NO: 9153

SEQ ID NO: 33149 - DNA, 279 bp, Escherichia coli; identical to SEQ ID NO: 11573

SEQ ID NO: 33150 - DNA, 432 bp, Escherichia coli
  misc_feature (405)..(414): n is a, c, g, or t
atgcgttttttattttttgatttccagccatttggtacggcaatgactaaagtcagcggacgcaccattgatcccgcttatgaaattcacctcgcgctctatcaggctataactggcccggaggaagaccaaaaagcgtttaaacaagtcgcaccagaattcttcgatctgatcgtgatcgacgaatgccatcgcggcagcgcatccgaagacagcgcctggcgagagatccttgattatttcagttcagctacccaaattggcttaaccgccacgccaaaagagacgcatgaagtctccagcacggattacttcggcgatccggtttacgtctactcgctaaaagaagggatcgaagacggcttcctcgccccttataaagttgtccgtgttgatattgatgtnnnnnnnnnnaaccaaagggcaaactga

SEQ ID NO: 33151 - DNA, 249 bp, Escherichia coli
  misc_feature (191)..(200): n is a, c, g, or t
atgaaacaaaagaaagcctggagtttttttcagagcctggggaaggcatttatgtatcccattgctctgctaagtgtatgtggcatgatgctagggctgggaagtggtttagccagtgatgatatggcaaagttaattccatttctggctattccaataattaaaaccatacttgatttcattgttagtcnnnnnnnnnntacctgtattgtttgcgatagcgattcccttaggattattaaaagataa

SEQ ID NO: 33152 - DNA, 324 bp, Escherichia coli
atgagtttagataacaaggttactcagcttcgtccaaatcaaaacatatctcgcccaattggacactatccaactgatgatgcatactcacggcatggtggcggcaatggcggaggtgatgatgtgcttcaaagagtgaaagaactcgaaaaagatgttcagcaaatgaaaaccgacctggctgtcatgcgctcgaattatgcaaccaaatcagacgtaagcgacgcgaaaacttcgataattctatgggttgtaggtgcggtcgtatcctcacaactcataccagcaatccccaaaatacttgaagtgtttttccataaataa

SEQ ID NO: 33153 - DNA, 246 bp, Escherichia coli; identical to SEQ ID NO: 22777

SEQ ID NO: 33154 - DNA, 435 bp, Escherichia coli; identical to SEQ ID NO: 9005

SEQ ID NO: 33155 - DNA, 147 bp, Escherichia coli
atgaagcgagttcttattcctggcgtcattttatgtggcgctgatgtggcgcaggccgtcgatgacaaaaatatgtacatgcatgtttttgaagagaaagcatcgagcgtttaccgaccgggaatggcaatatcagcgatctgctga

SEQ ID NO: 33156 - DNA, 318 bp, Escherichia coli
atggctctgctctggaaccaggccgcaggaagtatcaatctggagtttatcagctactggaattccggtgtattggcagaccctgataatcacctgacccacgaagagcgctctgttttgcagaaaaaagtcaataaaactatggggcggtttggagacaggagatgccatttaacgattataggacgttctgatgaagtccatgattttacctccgccttaattaactgttttctttctgaagaagaaattgtctggtggcaatcaggtggcgttttcgcggatccctggcccgttaatatatcccggctgaactga

SEQ ID NO: 33157 - DNA, 555 bp, Escherichia coli; identical to SEQ ID NO: 22334

SEQ ID NO: 33158 - DNA, 441 bp, Escherichia coli
atgaaaaaactaacctttgaaattcgatctccagcacatcagcagaacgctattcacgcagtacagcaaatccttccagacccaaccaaaccaatcgtagtaaccattcaggaacgcaaccgcagcttagaccaaaacaggaagctatgggcctgcttaggtgacgtctctcgtcaggttgaatggcatggtcgctggctggatgcagaaagctggaagtgtgtgtttaccgcagcattaaagcagcaggatgttgttcctaaccttgccgggaatggctttgtggtaataggccagtcaaccagcaggatgcgagtaagcgaatttgcggagctattagagcttatacaggcattcggtacagagcgtggcgttaagtggtcagacgaagcgcgactggctctcgaatggaaagcgcgatggggagatcgggctgcatga

SEQ ID NO: 33159 - DNA, 216 bp, Escherichia coli
atgaaatccatggataaaatttcaacgggcattgcctacggcacctccgcaggcagtgctggctactggtttttacagtggcttgatcaggtcagtccgtcacagtgggctgcgattggtgtactggggagtctggttctgggcttcctgacatatctgactaacctgtatttcaaaatcagagaggaccgtcgtaaggctgcgcggggagagtaa

SEQ ID NO: 33160 - DNA, 264 bp, Escherichia coli
atgtacgaacaggacacgctcagcgcactggatgccatcaccgaagcacagcggattgcctttgctcctatgcttttccaggcagctttgtgcctgcgcaatgcaggaatattagattatttggatcaacagggtaaacagggagctccccttaatgcgattactgagcacacagtcctgaatgaatatgccgtgggtgtgttactggatatgggcttaagcgggcgaattattacctgtaaagagggaatttattacctgtaa

SEQ ID NO: 33161 - DNA, 483 bp, Escherichia coli; identical to SEQ ID NO: 2383

SEQ ID NO: 33162 - DNA, 1017 bp, Escherichia coli
atgcctagtctcgtgggctcggagatgtgtataagagacaggaatatatttgcttcgggggctattgaggcggatgtgcatcggagtgaatcagaagctgaatattatcattataaaatggaagaaacaggagaggagacaattcgctcgtttgtttcattatatcttgatgcactcagggaaaaacaatccattgaagtacttaaacagagtctctcccggcataacgcaattcttaatgatctgaatactatcagtattcatgataccgggcgggagtctgagtttgttcaggctgaagccagaaggttaatggtccggcagcagataaattcccggagcagagtacttaaaaccacgctgggaaaactgtccacctggacaaaaaatccggtaaccgaaagtgatcttgaaaatcctttttcccggatgacagaggccagattgttaactgactttacacaggcacctcagaaaggtaacccgtcgtggcttgccagccgggctgatgtggagagtaaaaaagcagcactgaaagcgcaagagcttgccagatatcctcgggtggatttgacgggatctgtaacccgggatgacaggcagataggtgtcaatctgtcctgggacctgtttaatcgtaatgccagttatggtgttacggaaaaagctgcgcaaatagtggcagctaccggacgactggactctgtcgccagaatgattgatgaaactgggcgattatctctgataacggtcagacaaagtcgggtggaaatggaaacgctcagatgtcaggaacaggcttcagccagagttgtggacttttatcgtcttcagtttcgggtggcaagaaaaacactgattgaattactgaatgctgaaaacgaactgtacagtgtcggactctcccgggttcagacggaggatcagatgctccacggtatgctggattatctgtattcccagggaatgctcctgaaatggagcggagtgaatctttctgatgaagaagaaaaataa

SEQ ID NO: 33163 - DNA, 771 bp, Escherichia coli
atgaagaaaaaacgttttttgtctgacagtgatgcccattacgtggtgaaagatgcagaaaaaatccttgcgccggacagacgtcgtttactccaacaggggctgacgcttgggggaattatgatgctgactggctgtgatataagcaataatgatgatattgaaaaagcattgttccgtatatccagatttaatgaccggattcaaagttttctgttcagcaaaaacagtgtggcaccagaatatcttccagaggacattaccactccattcccttttaatgccttctatggagaagaagagatcccagtaattgatggccaggattataaattggaaatacgggggctggtacgtgataaccgtaactggtttttgtctgaattgtataacatgcagcatgtgagtcagataacccgtcatatctgtgttgaaggatggagtgcaataggaaaatggggagggataccattccggcatttcctgacgctgattggtgccgatatgcgggcaaaatacgtcagttttcgttgcgtcgatggttactacaccagtattgatatggcgacagcactacattcacaaacattgctgacattgacatggaataacagggtattgccaaaagaatatggctatcccataaagatacgtatccctactaagctgggatataaaaaccccaagcatgttcaggttatagaggtcactaatcattttccgggggggtactgggaagaccagggttataactggtttggtggttgttga

SEQ ID NO: 33164 - DNA, 1482 bp, Escherichia coli
atggaaatcaaagaatttgtcagccagtacaaaaaccacccagttctttttataggcacaggttttagtctaagatatctgcaaaactcattcagttgggatgggttattgatgaaaattgccgttgatttaactggcaaccctgaattttattatgatcttaaatcggaaagtattgaaggtgacgaatacagatacgacattcttgcaacaaaattagagaatatcttcaataagaaactcgccgaagacagaaacggaaagtttgaaagcatcaatgatattttctacgagaacatgagtcatggaaaaaaacttagccgattcaaaatatacctaacatcaatattaaaagactcacctctcaaagaagatttaagagatgaaattaacagcttaataaaaacaagaaagaatattggctcaattattactaccaattacgatcaacttatcgaaaatttattcgatttctctccgcttattggcaacaatatattgctaagcaatccatatggctcggtatataaaatacacggttgtgttagtgaccccaataacataatcataacatctgatgattataataactttaatgacaaatatgagttaatacgtgctcaactattatctatattcattcacaaccccattatttttttaggatatagcatcagcgacaagaatattaaatacctcctgcagacaatattttcatatgtagatctaaatactgaactagcaaaaaaaataaaagacaactttctccttgttgaatatgatgaggggaacatgtctacaactatttctgaacatgatattaacattgaaggtttatccattataagaattaacaaaatcaaaacagacaattacaaagccgtttacgatgccatatctaatttaattctccctgtttccgcaatggatataagaaaagtacaaaaagtctggaatacaataaaaagtggcggtgaaatcaaggtaaaaatcacggaaaacctcgatgaattacggaatgaagaaatggtaatcgctgtaggctcagaaagaactgttacctacgaataccagacaaaatctgaaatgattcaaaattactttaaaattgtcgatgaagctaacgcacaactcattgcacttttgaataaacaaactatcacaaatcatgagcactttccaatttacgcatttagttctgtatgccctgaattagaaaacgttcagctatacaaagacagacaattggataagataataaatcaactcactagaattaaagcgtgcaaatgtgatgcaacaacaatagatgagatattagaaacaacaaaagaatataaagtagccaatacaatcatgtattgtgtacttaatgacacaatttccttagcacaactcagaaaatatcttatctctatatcacacaaaatagatactcattaccgtaaattattgtgcctgtatgattttctatcatactaa

SEQ ID NO: 33165 - DNA, 1245 bp, Escherichia coli
atgaaattgatacatttaaaagtaaaaaaactatttggtctccttgattatgaaattcccttggataacaatgaaattactatgcttactggtccaaatggatatggtaagacaatgattcttaaaatcatcaatagtattcttacaaatgaattaaatgctctctgtaaacttaattttgattttattaaaattgattttcaaggtggctctgtttcaattactcatgacaccaataaagatggtttaatattgaatcatctggataatagctcaggaaacagaacggaagaaagactcaagttacagacagatgaatctattatggaagagttattttatgtaagcttgcataggggggatgttaaaccaaaacaaaaattacgaactgataaaccattatcttcggatgtgttaagtcatattacatcgaaagaagacgtatcttttatatgtgcagatcgattacaagtcaaagctgttgatgaaacagtcattgacttatgtgctagaaaattaaaatatttaatgaaaaatgcacaagatgattccgctgcattatcacaaaaattagacgctacatttcctattcgattatttgagcgtttagagcaatcaaaacgattttcatcagaaaatattcaagatcgcttaaatggtattcaagataaacgtcgacattatatgcgttatggccttattcaggctgataacgagctaatgcctcaaaaaagcacaagtttttatagtagcaatgaatatctaagtgtgttggatctatatattgaagatgcccttggaaaattgtcaccgtttcagacattacatcaaaaaattgatttatttgaatcaattttgaaagaaaaggttttagcttttaaaaaagtgatgattgatagagataacggattttatttcaaaagtcacaatggcgatgttattgatcgtaatttgctttcatcaggtgaacagaaccaaatagttcttctttttaatttgattttcgattttgtttcacaaaaagtaattcttatagacgagccagaaatatcattacatgtcgcctggcaacaaactttcttggattctctcaaaaaaatacaaaagattaacaagtatgaaaaggtcattattgctactcattcaccacaagtaattagtaagaattgggaattaacatacgatctatatgaaatgattagaaatagaaatgaaagccaacagctttcagaaggaaacgagtaa

SEQ ID NO: 33166 - DNA, 858 bp, Escherichia coli
atgatgtcattacgcaatgctgttcgcgaagatgattggttgagtagtatgatgcttttattcagaaatgaaatgtatcaacgttgtatattgattgtggttgagggcatttcagatatccgatttttcaatgcatatcggcttgataatagaatcatttatgaatcacctgaaaatggaaaacgtgaagtaatattggctgttagtcaattacgtcgtgcaggtaataatgctgtgtatggtgtatgtgacgcggactttgatgagttaagcggaataaatcacgaggggattttttatactgatgctcatgaccttgaaatgatgttagtaaaaggtggtgcggttgataaattcattatgtcacatacagatagaaaattaattcaaggggaattggccgatatattctgtcaggatgtaaagatgaacatcctttgtgcatgctataaaatcggacttctcaaatggtacaattatcttacacatagcaatcttaatttcaaaggaatgaattacaggaattttgtaagtattaacaggacagatgttgtagttgatgaaaccaaatatataaatcatgtgcttagcaggagtcgtactgataaggattttaatgcgaaaaatttatataatgaaatgcgtaaattagaattaatgtcgccagatcatttttctatatgcaatggtcatgactttacatgtatattaaaaatgatgtatgaaactgatatatctgtaaataagaacatgcgtctggatgagatagatagttatatgcgtatgagttacgatcatcatacatttagaaccacaaaattacataagcgtctgaatcaattgttaattttacattaa

SEQ ID NO: 33167 - DNA, 144 bp, Escherichia coli
atgtataacagcttctacctgctggtacagattaccgcagtggaaatatacatagctgttgcagtaccgccccagtacagattaccacctcatctgcaaattctaggcaatgaatatcttttggctccccgtgagccgatataa

SEQ ID NO: 33168 - DNA, 297 bp, Escherichia coli
atgggggctgagtatgcagggatttcggtcgaaatattacggattatgcttatagggtatatttttaactgttattcacaaatctcttttgccaacatacaggcctttggaaaagcaaaatacactgcatacatccatatgatggaatttattccttatttgataatgttatatataatttcaaaggaatatggggttattggtgttgcgtggttatggacaattcgagtaataattgattttttgatgcttttatatatgagttatcgttgtaataatcttatgaaaaaagggtag

SEQ ID NO: 33169 - DNA, 585 bp, Escherichia coli
atgcaaggcacagccttagataaaagtcaagagtttcaacttgttgggaatgatgatgttgccgagctgtcaacaattaatgcaactcaagaaataaaagacagtgttactccagagattataatcgcactttgtgggccaattggttcaccgctacatgagactgctgagcagatatcattctcgcttaaaaaatatggctataaaacatacgacatacgcttgagtgatctaatccggattaattcaaaatatacatcaattaatattgatgaaagcactaatctaaagaaattcaagtcacttataactgtgggtgataaacttcgtgaaatttatggtagtgatattcttgcaaaattagctattgctaaaattagcgccgagcgtaaaaaaaactttggtgaatttgatgatattgttaatgaatccagcaaaggggaagcgagtaagattaaaaatcaaaaaatttgtcatattattgactcagttaaaaactcttctgagcttgagattgttgaaatcaatctatggaaaaatgattttctctataggtgtattttcccctttagaggcaaggcgtga

SEQ ID NO: 33170 - DNA, 228 bp, Escherichia coli
atgatgttatcgcgtaagaagaaagcaccgaacccttgtcgtacagctgctaaatatctttttgctcgcgccttttttaagaacgtaaggcccggcattcaaattggcattattgctggacgagagcaggttaaaaattacatgtcaggtgcatggtggaataacgatccggttactacagcccgtaacattcatattaactggggtgggattcattatgatggctga

SEQ ID NO: 33171 - DNA, 324 bp, Escherichia coli
atgactgaaccgaaacagaccggtcttaaaaaagggttcctctttgggatcagaaccggagagcagaataaaacttacacgctaagcgtggatgccagttgcccaaccgaggcgattgcagaactgagaaacgcgctgacggcgcttgaaacgcgaagcagccatttcgccagcggagaaaacaacgtcatgatgattggcaatgtggcggcgacatcacgatataaagccgtacctaatcctactactcagttatccggcgaccaacgaagactggaagcggaatcagcagttcccagaacggttcttcctcaccagtcttaa

SEQ ID NO: 33172 - DNA, 252 bp, Escherichia coli
atgaaagaataccgctattccggcccggccagcggcgtcacgctgtcggacggaaccgaaatcctgctctggccggggaagaatgtttccctgccggaggagcatgactatgtgaaggtactggtggcgctgaagcatctgacaccggtatctgaagagactaaacccgccagcacaccggttgtgcagtcaccaaagcgcaggaacgccggcgacaacgatgtgaaaacggaggactcccatggcagctaa

SEQ ID NO: 33173 - DNA, 1881 bp, Escherichia coli; identical to SEQ ID NO: 5009

SEQ ID NO: 33174 - DNA, 927 bp, Escherichia coli
atgaaagttagaagcataggatttacaataaataacaataacaaaaatattaataccgttgacgtaatgaatgcttttatcaacgcatcaaacagagaacacagtcgcacagactatactcgtaaaattctcatttcggatgtgaatgatttctattatggattagttgtcacattcagaaaccaaaaaaagaactgtaagtcgcaatttgttgatggtaaattccagcttaaaattgaagatcttcaaggaagtgacaaacttgctaatttcaactttttcttaattaaaaaatctaatctttctggtctctatatgtatcaccacggttcatgcagtctgaacactctcttttctcatttagaaacaataagtaatgaatttatcagaaatcaaaataaagaagaaataaaaaaacttggagataaaccaaaacaaaaagaagtaactgcaataaataaaaaatacaaagaaagactgactttcagccttatgacaaataaaaacaacattcagagtgttttatgtcaattcaaagagattaaaagcacaagctttaaatttaattatatagattttaaaggtgggccaatgactgcgcttgaacaatttgttaacaccaccacaatagatatgaattttaattctagcgacagaacaaaagtgcaacaactatctcagaatctttcaaatatttataattctatgagtggagttgctaaagcacaggttattgcagtaaaccatgcaggaatagaaaaaaccattgattttatgaactgccctgttttttttgaaacatacgatttcgatataattgccgataaagtcaatggattgacaaacgataattatacaacaaaccctgtttttgatatgataaaagaagaaatgctgaacgggacgaataaaaatgcctttatatga

SEQ ID NO: 33175 - DNA, 225 bp, Escherichia coli
atgaagaaactactggtaaccataaagccatttaacggaacaatcccattccggattttacagcgtggacgtgttctggttgaagatacattcagtggtaaatgcactgagggttattcacgaacatatgaagtgagtgccatggatgaagaaatctccgtggagtgtgatctgaattcaaatatggcggagattgtatcagctacattgctgcctgtttattga

SEQ ID NO: 33176 - DNA, 216 bp, Escherichia coli
atgtttgtggaaaataacctgaaggcagatcctgataatcaaggatgggttcttggttgggctgtagtacgttacaagccatggcatcttgttggtgtttatgaaacggaaggcgatgcgaagtctaaatgctctgaattgaatggggagtatgaagttcgttatggctctcattgtttaggcagtgatgattttatatttgttgaagtcaactaa

SEQ ID NO: 33177 - DNA, 546 bp, Escherichia coli
atggaagtcaacaaaaagcagctggctgatattttcggtgcgagtatccgtaccattcagaactggcaggagcagggaatgcccgttctgcggggtggtggcaagggtaatgaggtgctttatgattctgccgccgtcataaaatggtatgccgaaagggatgctgaaattgagaacgaaaagctgcgccgggaggttgaagaactgcggctggccagcgaggcagatcttcaccccggaacacttgaatttgagcgccatcgcctgactcgtgctcaggcgacggcgcaggaactgaaaaatgccaaagaatcggctgaagtggtggaaaccgcattctgtactttcgtgctgtcgcgtatagcaagggaaatatccagtattctcgacggtattcctctgtcggtgcagcgacgttttcctgagctggataaccggcatattgatttcctgaaacgggatatcatcaaagccatgaacaaagcagccgcgctggatgaactgataccggggttgctgagtgaatatatcgaacagtcaggttga

SEQ ID NO: 33178 - DNA, 225 bp, Escherichia coli
atggccggattaactaaagagcaaagagcacagcgtgaagccgcgcaaaaaaatgcagtggtggagcaaaatgtggagcaaattcaggagccacaaaaaacgcaaattgagttagtggttatggtgaccgattatcagatgtttcccggcgcaccaactatcgctaatgttcatcctgatgaagttgacaactggaaggctctgggctggaaaactcaggagtaa

SEQ ID NO: 33179 - DNA, 435 bp, Escherichia coli
gtgttcgacggtgagctgagttttgccctgaaactggcgcgtgagatggggcgacccgactggcgtgccatgcttgccgggatgtcatccacggagtacgccgactggcaccgcttttacagtacccattattttcatgatgttctgctggatatgcacttttccgggctgacgtacaccgtactcagcctgtttttcagcgatccggatatgcatccgctggatttcagtctgctgaaccggcgcgaggctgacgaagagcctgaagatgatgtgctgatgcagaaagcggcagggcttgccggaggcgtccgctttggtccggacgggaatgaagttatccgcgcttccccggatgtggctgaaatgacggaggatgacgtaatgctgatgacagtatcagaagggatcgcaggaggagtccggtatggctga

SEQ ID NO: 33180 - DNA, 1797 bp, Escherichia coli
atgatttacacaacaggcacgatagctgttagcggaaaaacagttaccggaacggggactgaattcaacgccgcattatctctgatcagagtaggttgcactcttattgccattagcgatccagtgcagattttttcaatcacagaggtaaaaagcgccacaagtttgtcagtaactccggcggcaagcccggctattccggctggtactaaatttagcatcctgctttcagattcgatctctgtggatggtcttgctcaggatgttgccgaaacactgcgttactatcagggcaaggaatcagaaatagctgacgccgttgaattttttagcgacaacaaagatgttatttcagcctcaaaattagcatcacaatcagctaccactgcaaccaacgcggcaacaacagcgacaagcgccgccgattcagccaagacatacagagacgaggcccacgaatacgccaatcagacagcgcagccttacgcgtatgttttgcagccgctgccggatgtatggataccgtttaacgactctctcgatatgatcactggctacggccctggcactaaaaaagtaaccatcgatggggcagaaaaaacaatttcatcagataaggttatttctttctcccgcgccagcacagcgacttatattaataagtccggtgtgttaactgtggctggtatcgacgagcctcgttttgagaaagaaggcttactgatcgaagggaccaggataaacacttttgcaaactctaatgagcctgaattatggaacacagcatcacagttgagcgtaacgcaagcaacagatagctatgggttcacttatggggttgttggcatcacggaagcgacctcagacacgggtcgttataccgtttgctcaactggctacgggcgcgttattgccctggcggctggcgagtcatgcactatctcactccgtgctaaaaaatcggctggtgatggtgtgttaactatatatatgcgtatcgcttccgttaacaatgatggcgcaagtaacacgctggtttctaacgcttatgtcaatgcggagactggcgaaatattaggtaaaccaacaggcggcgacgcaacaactgtttacacaaaaaaagaggaaaacggatggacgttcatgtcgttaacatacacaacggcaacggctggttcgttctatggtcgatttgaaatcgcggcagacgaaagagacgtcgccattggtgatgaatggcacatcactaccccgcaatttgaaaacgggaacacagcatcgtctttcatcatttcaaccagcgcgactactacccgcgctagtgatctggtgagtatcccgaccaaaaacaacctgtttaaaccgccgttcagcttcctgcttgaagcccacaaaaaatggacgaccgcaccgaacgccgcgccgcgcatttgggatattgccgcagccaatactgggcaagcaattattgccgctgttaaccgtggcaatggcaaatattacatgtctctatctaacagtgcggggacttacatcaattctgccgccgccgccgagttaccgactgaatcagtcagtgtaggcgcggtagtcaaagatgatggcactttccatgttatccaagatggtgtggctgttagtgatagttcttgtgtctacggcggtgtgactcaggacaaaaccatccgtttcggtggtcagacatccgatggaacacgccacctgttcggacacatccgtaatttccgaatctggcacaaagcattaactgattctcaattaagcgagattgtttaa

SEQ ID NO: 33181 - DNA, 4455 bp, Escherichia coli
atgagtagcggcggcggcaaagcaaaaacaccaacattaataaatgataacctttatcacaaacagttttatcgtgtgctggatattatttcggaaggcccgatttatggccctgtcaataccagtgcgccattaaatagcgtaatgcttaatgacacgcctgtaactgacgcgaacggtaataccagcatcccaggcgttagcgtggcgtggcgtaatggtacgttagatcaatcaccgattaacggttttaatgccatcgaatccacggtaatggttaacgcacaggtgaaacacgacacgccgctggtaaggaccgtatcagatccgaacgtgacgcgagtccggttaaatattggtgtggattcactggtggaaagcgatagccaatcaaaccagaaagaaacatctgtcattatggcgatcgacgttaaaccgtcctcatcctcaacatggtcgtctattaaggccgtgcaaataggtccaggtaaaatcagcggagaataccttgaagcgcatattattgatgcgccagatgaaaagccgtttgatattcgcgttcgccgcgtaaccgctgatagcacaagtgatctattgcagaatgatacgcggtggagtagctacagcgaaataatcgacgataatttgtcttatcctcacactgctgtagcaggcgcggtaattgatcacgatcagtatactgacacacctacacgcacttatcacctgcgtgggcttattgttgacgtgcctgataactacgacccggaaacgcgcacttattccggtttatggcttggcggatttaaacaggcttacactaataaccctgcgtggatctttcgttacctggttaaaaacgagcgtttcggccttgcccgccatgctggttatatcgacgttgacgacggcgcattatacacactttcccaatactgcgaccagttggtcgatgatggttacggtggccttgagcctcgcgtgacgcttaatgcgtacataacagagcaaatgagcgcccgcgatttgctggacaatatcgccgggatgttccgtggcatcgcgttatgggacgggcaacgtcttaccgtaatgattgatgcaccgcaagatccaatcgccaccattacgaatgcaaacgtcgttgatggcgcgttcactcgttcgagtatcgcccgtgcggaatgctacaacgccgtgatcgtatcctggactgacccggaaaacgggtgggagcagtcaaaagagtatgtagcagatgatgagctaatcgcccgcgatggttacaacgaaaccacgatggaggcgttcggctgtacgtcacgcgggcaagcgtaccgcgcgggcaaatggcttatagaaacagcaaaacgcgagccgtcaaaattcacgtttaaaatggcccgtgacgcgattcactttacgccaggggatattatcgagatcctcgacaataaccgcgcaggtgcgcgtttaggcggtcgtatcgtggcgaataatgggaacgtgataacagttgataaggttgacagcgagtacatcacggcaggcgacactatcagcctgcttgatagcgatggcaaatttaaaaaacatcagatcactggtatcaacgggaacaaaatcacactggctgcggcccctgcatggattagaaacggtactgtttttgctgtatcaaccgaagcagcaaaacccgttttatgcagaatcaccagtgtagccgaaaccgaaaataatagcgtgtataccatcgaagccgcgcaacatgaccctaacaaacaagcagtagtcgatgaaggcgcgatatttgaaatcaacaacgacacgcttaatcacttccgtgtaccgaatattgaaaatctgaaagtggtaaacatcggatctgaaacggttcaatgccgcgcaacatgggaaacacagacaactacgcatcgcatgacattcgagatccgcatatacaataccgatggtgcggtggttaaaagctacgaaacaacgaaatacagctatgatttttatggcattgacgctggcgcgtattcgttaggcgttcgtggaagaaacgatactggcatgaaaggtgctgaaagtattgttgatcttgttattggtgctccagccgcgccagttggcgtaaattgggttcccggcgtattccaggcgaccgtgtacccgataagcaaaaccacgcttactaccgatacgtcgtatgaattctactatgctggggaaaaccagatcacagatcctgcaataataaccacatcggcacagtttaccgggcgcgggtatcaatggacgttcggcggcatgaatacgggccatacttattacgtttatgtgcgcactcgcaatgcttttggtgtgtctgatttcgtcgaggcatcaggtaaaccgacagaagattttgacgaaatcactgattacgttacgaaggatgtaatggaatcagcacaatttaaggagatgattagcgacatcaaagatcttgacaatcgcactgatattatagaaagcgctacaaacgaccttaaagccgccacaagcgaccttaaggctgatacagatacgcttaaaaaagacacggaagacctttataaaaaagtcaaggaaaacgccgacgaaataggcaaacatgaggtaagaatagactcattagaggtgtcaagcgaaaacgccaataatgaactggcgcaggcgaaagcaagcctacaaaacgcatcgcttgcgcttattaataactcacttgctcaaactaacacgcgggtaactcttaccgctcaatataagaaaggtcgcaacgaaacaaaggcacagatcgaccgcattgataacgttatcgcagaggagaaaaaagcgacagcggaatcactggaaaccattacagcagaaatgaacgcaatggactccagcatcaaaggagaaatcgcccgcgtggacaaagcaatagcaaccgaaacgcaggcaagaagcgacgcaataacagaggttaaagctgatttaaccacgcttgaaaatagcacaaacgccagcgttagcagacttgatcaggctatcgctgacgaatcaagcgcacgtgctcaggccataaccggcatcagcgcggagcttggtcttgttgaaaatgaggttggtaaaaacagcgacgaaatagaacaggcgaaagcaagtctacaaaatgcctcgattgcgcttatcaataactcaatagcacaaagcaagatgggcacagttattgaggcgaagtacagaaaaggacaaacaaaaacaaaagcggaaatagcaaggatcgacaccgcaatagcagacgaaacccaggcccgcgcggaggctatagcatcgcttgaggcaaatattaatgaaaacatttcagcaaaaataacggatgtttcaacggcactcgcaactcacgaggcatcaagcgctgaaaaatttgtccagatctcggcgtctttcgatgatgtaaactcaagcatcacggaatggtcacagtctatggcaacggcagacgaggcattatcaaccagaatcgaccagttgaaagtaactattgacggaaacacaacggccatagagacaacatcgaaagcgttaacggactttaaggggaatgtcgatgcatcatactctattaagatcgcgacagacagccggggcgtaaaatacgctactggtatgtcacttggccttactggtagcggaactaacgtgcaatcgcagtgtattttcctcgttgaccgcttcgtgttaatgactgcggcaaacggttcatatcagaccccgttctatgttactaacggcgcttgctacattcgtgaagcgtggatcaaagacgcatccatcactaccgcgaagatcgcgcagcaaatccagtcaaccaactatgcatctggttcggctggctggatgctaaacaaaaacggtaacgcggagttcaataacgtcactgttcggggtacggtatacgccacaaacggtaaatttactggtgagattcaggccacaagcgggacgtttaaagggactgtacaggctaacaaatttgtcggtgatattgtggctattcacactttccctgattccagcactgtctataactcaagccagcgtgtagcgcgtttctgttatcgctatgtggactcaacatccaatgggacttataaaaacgttatgttccaggcaaggttatcaggggctaccggcaactcacatatcaatacctggatagcaggtactcaggtattggtcggtaagaaatacggtaacgaaaactcaaacggcatgttctgtttcggtagggatggtgtaacaaatcagacggtcgatgttattatcgagatctacactccgtggtcaacaggtaacatcaccgggattacgttaagttgcccgactatgtttatcggtcgcagtaacggcacatggtcgaaatgggaagaatcacacgactaa

SEQ ID NO: 33182 - DNA, 180 bp, Escherichia coli
atggcgcgatgcagtaagtacggtggtaagttatggagactgacggttttcatgactggcaatgaaaatataacgtctgatttcgataatcctgatgatgcgatagatacggcttttgaactcatggagaaagataaccgcgttatcggataccggatcaggccagtaaaagaaaggtaa

SEQ ID NO: 33183 - DNA, 414 bp, Escherichia coli
atgtttcgttttcgtcgtgtaaatattgatggtaaatccattaccgaaacacgcgcagcaggtgctgaattaaaaccggggacgctggtggtgttgaaagacggtaagtttgtgaacgctgtcgatggtgaggctggcgagagtgccaccgctgccagtgattataccgctggtgctcgcttgtatatcgttaatcctgcttatcatgaaggtaaaggtattggtgatgccatcgcagcaggtaacacagtagttgcagattatgtagagcagggccgagagttcgccatgcgccttaatactggtgcatataaaaaagaccaggccattaaacttggtgaggtcactgtcgcttattgccaggaagatgtaaccctggaagcggttgatttcgtccgtgttcgcgtcgcataa

SEQ ID NO: 33184 - DNA, 144 bp, Escherichia coli
atgtctgaattcctcaatctgctaacgttcttgctttgcgcaggtctgcttattgccgcgttaatgttatgcgcatatgtgattgtaatgattgcattgcttatttacagagaagcaaaacagagatttaaggttaaacaatga

SEQ ID NO: 33185 - DNA, 543 bp, Escherichia coli
atggcaaggggtaaaggcttaaaattgcctcacttcaaagtgccgctctttgagcacaccactgttttcttctgcccgacgcgcgaaatcttttatgacttttgcgagcgtgcaaacatcccaatagaacctgatttcgaactggctggcggcctgacattaacctgtactggtgagaatggtggcaacttctatgtagtggctgtattcgaccatgaaatgggtacgctggtccatgaagtagcccacgcaactttccattgcttaagtgatgttggagtgctggccactaccagtccagaacacccggcgaatgagacttacgcttacatgatcggacgcatgtttgacactttcttcccaatcctggctgaatcaaacgaagcacaggtggcagcacaacaggtggcggatgttgtagaacaagcattagaacagacaaaacagcagcaggaggaaggaaaaccagcgaagaaagggaagcgtaagccgaaagcaaaggaggcgcttgtaccgcgtgtaatgagctttaaacgaggctga

SEQ ID NO: 33186 - DNA, 471 bp, Escherichia coli
atggacaaggtgaaggcgttaatcatcgccgttattgtttgcattattgccggacttaccgccgtaacgtgttattaccagggtgaggcagcaaggttacaggaagaagtcacgaccacgcaaggcgcacttaagacagcaagtaacactattcagcagatgaaggagcgaaacgccgaactgtcaaaacttgataagaggtatcacgatgagattaaagctatcagatctgacattgccgatctgcgtgctggcattgacagcggtgctatccggttgcacgtcaacgccgagccagtgcgattactcgacaataccggaaccgccagccgcattgatggagccacctgtagactcactcccgacgctgaatcggcttatctatccctcagagaacaactaaaagagaaagacgcgaagatcaccggattgcagagctacatcaaaacgcagtgcttacgcaaagaataa

SEQ ID NO: 33187 - DNA, 168 bp, Escherichia coli
atgatcgaagatggtatctatgtgcataacttatttgatattgcttacttgctgaaagaggaaaaggtttttgttatgtcgagtgagcatcctttctggactggcgtaaacatggatcgtgaacagatgcaaatattgcttgataatggcctgataaagaagaaatag

SEQ ID NO: 33188 - DNA, 201 bp, Escherichia coli
atgattgaatttcttatcgctgcaattatctttctttatatcgctggcgctatcttaatgtcttgctttgttagaagtaacgatctcggcccggcttaccttgaagttactttctggcctgtagcagtcttttacgcttttgtagacgctacgcgcatacagatcatgcgagctattaaggagcgtaaaaatgggaaatag

SEQ ID NO: 33189 - DNA, 132 bp, Escherichia coli
atggaagaatggtatcaaaatttacttactctattccttgctgaaaattgggcgctgtttgagcgtttttgtgaagaacacggggaagatcctaacgatatttatcatgagcttgggggcgaagatgattga

SEQ ID NO: 33190 - DNA, 249 bp, Escherichia coli
ttgagcgcatcaaataaaccttacaaaatccgttgtaaaggcgaatacctgggctttacgactggacgcgaatacctgggccacattgggtatggcccgtttggtgagatggggatgaatacaatcgacgacgagggtgacagccggacgcttgatcttgatacggatgatttcgaatacatcccgccagttacttaccgcgccgtcgatgaattcctgactgaacaagaagacgaggacaatgattaa

SEQ ID NO: 33191 - DNA, 324 bp, Escherichia coli
atgactaaatttatcagcgttaaagttttccgtggcactttcccaaaagaagaaagattagagcaattctccgggcaacctggtgcatgtttccgtgtagccacggaagacgacgatcatgttaaatgcttccacgtatcggagccgccttttgatgtgaaacaccttgaagatccaaataaagtcagaggctttgtttatgcctcgctggtgcttaattcttcccctgatgttgaaatggaattgcttggcgcggaagtggtcgcggaatacaaaataacagaagcagaaaacggagactctaaaattgagcgcatcaaataa

SEQ ID NO: 33192 - DNA, 267 bp, Escherichia coli
atggttgtgatcagactatggcgcggagttagtaggcttgatggcacatacagccgcgtgattgaggatgttaataatcgtcggttttgtgaactggaatacagcgagcaaaaggagaaaaattatcttgatgagtcaattcccatgtggagaaaaatagctgggcttacctggattgttcgtcgcggattttatacagactataacaccttaattgatgccgaactggtggcaacactttacgaaggagaaagaggaattaaataa

SEQ ID NO: 33193 - DNA, 285 bp, Escherichia coli
atgaaaagtgctaaattcattgcttgctgttttgttgaagtgcctaacgatgatgttttctgcaattatgaatttaaagatagtgccggaaccgttcatacagtagtaggcaagcgtggtgactggttatatatcactgataaagacagaatattaacaactaatcaactgcatttcatcaaacgcggttacgatgattatgagcttttaaataaaatagcaaatgatgtttttaataatggctgtgtagaaacagcaagatctctacctggtgcggagtattaa

SEQ ID NO: 33194 - DNA, 207 bp, Escherichia coli
atgtatgttcgatgcactgaatcaaaatcatcatgctttgaggttggcgggatatataccgtagaccacctgactggcgatgaaaataacatccaatacattaaagacgaacacggcgacgtgtggcgctattgggattgttacgcacggggacacgttaccagtcatttcggtacggaagcgatcgcgcgttttgttaaatggtga

SEQ ID NO: 33195 - DNA, 207 bp, Escherichia coli
atgaaaagtaaccgtaaacgcctggtaagggcatatgacaaagcgttaaaggcttttgatgatctgcgacacaataagcgccagcgccgcaaatgggcgcgtatgctagtcgatgaatggcatgagcctgaaaaaatgacagcctttacttgtcaagaagacgccgacaaattagctgacgataacgtttattatatgatgtggtga

SEQ ID NO: 33196 - DNA, 198 bp, Escherichia coli
atggacaaggaattggatctaacagtggaagacttgagcacgattgcggaatacatgcgcggcgatgattctgataagcctgtcacggttgacatgaaaaaattaaaagaaaaatacatgacaagctcgcggctaatttctttgcgggcgatcatgtatgcgcgggcgcaatggaaaaatagcaacggtgtattatga

SEQ ID NO: 33197 - DNA, 657 bp, Escherichia coli
atgagtaaatcaaaagcaatcggtgtgattagccatcgcactaaccctgaatgttactcatcgtttgaagtatcgacatgcagggaggaatatgattttggaacatgctatttagttggtgtccgcgctgatactcgcggcacttattctgttatggcggcaagctggaaatttgataagtacgccaatttatctaataaggatgatgatggcatgaataaagaaagcgaaatcgttgacgaattaatcgaagatgagcgtcatgattgcgataagccgaaagtcgaggaatggcagccaggggaaaggccgccgttagatgtatggctcgaattttacccaggtgactttgcgcctgtatactgcgtagctaaatatatttttactggcgatgaattagggatatttgttagaaggactggaaaatgtgaagaaacagcaagatggaaccgttttaggtatcgccgctggatagatccgaaagaaaaagcactggcgcaaattgcgtttgcgcttgctactaaggttattggtgaagacgcggcaaaagatattaattttaaccgcgacaacgaattttcgtgcgattatcgcaatatggcgcaagctattatcgacggatgtatcggacacgttgaatacacgggggataaataa

SEQ ID NO: 33198 - DNA, 180 bp, Escherichia coli
atgccaacctcggatgaaaagggtgcaaagatgtctggtgcaagcggagggacattctcagtaactaaaaagtttggggatgtggttataccttcaggacataaaaaagctttcatcgagctggagaaaaatgctgatggttggtggtacggtaaatatcaagaaggggatacggcatga

SEQ ID NO: 33199 - DNA, 315 bp, Escherichia coli; identical to SEQ ID NO: 12230

SEQ ID NO: 33200 - DNA, 1056 bp, Escherichia coli
atggagaacatgacctcgcccggcacgctgcttagtggagataacgcgacctggcttgaagagtactaccagacctggttgcgtacgccggaacaactcccggaagactggcggcgtttttttctttcacctgaactgactgtccaaagcgtatccggtgataacaacgtcagcggtgcgacgttaaaaaaacaggctgcggtaatacaactgatcaatgcctggcgcacgcaggggcatctgcgcgcaaagcttgatccacttggtttgaatcccccggctgacgttccctccctccagcctggtttttggggattaagcgaagaagacttgttgcaggaatttagcgtcacctttggcgcacacaccacgcaaatgccacttaagcaactgcttaacctgctggagcaagcctgggcgggtagccaggcttatgaacttgctcatctggaaaatcgtgaagaaatcaactggttgttatcacggattgagagcagcaatgcgccacaagcagatgtacaaacctgtattgctcgttttgaaaaactgatggcggcagagacgttagagcgttatctgcatacccgttatgttgggcagaaacggttttctctggaagggggcgaaagtgcaatcccggcgctcgatacgctgacaaaacgcctgcgtgcgcaaggtgtggaggaaatggtcattggcatggcgcaccggggaagacttaatgttctggttaatctgttgaataaagacccggcacagctttttgctgagtttgaaggcaagcagacgatcggcagtggttcaggcgatgtgaaataccacatggggtattccagcaatctggaaacacctgccggttcgctgcatgtggcgctggcgtataacccctcacatctggagatcgtgaatccggtggtgctgggccaggtgcgagccaggcaggaacgccgtggtgaggatggtcaggcaaaagtggtgggcgtacttattcatggggattccgcgttgggcggcctcggcgtcaaccaaaccacgtttaacttatcgcagacttag

SEQ ID NO: 33201 - DNA, 840 bp, Escherichia coli
atggttgatattgctacagcatggcgccaaggccaggttcttaggcatgaggatgcagtttctttgggtattcttaccgaagaggaaataggcgttaaagttgtcgtgatcagtcatgattgtgacttgcaaagctcttctgaacccagcgttgagcttattgctggccctctcattaagggggccagcaattatgcacgtgctaaacatcccagagttctgcatttgcatttagagcaagcgcgtgacgcgaatcaaaatgcaattgaactaagacatgacaacaaatttcgtattgataaagaacgtttcacgtgtgtgggatgtgaccctacttgccaaatatcccctgaggaaaagcaaggtttaaaacaatggcttgctgcccgctatgggcgacctgcctttcctgatgtttttgagagtaggctaagagctttcgacacaaagaaatttagattcgaaaaagaactcgcaaagataattagcaaacattcagtctatttgataggtgtattctttgatttaggcgaagatcgtttcaatgatttagaggaaggtgtaccttacgaactgaatattcatcttgtctatgattctatagatggtgggccggatgcaagagcagaggcagagcaggcggcaacacaaattgaagagttctttgtaacgtaccatggtgatgcgtctgaaagtgaactcattgcgcttatgtcttgtaacgcagttcctgacgttgaattcagtctgtatgcgttacggcgaatggaccagtggcgggttgagtacattagtctacaaggtgatgacgtgggtgattatatcaacccagccatctaa

SEQ ID NO: 33202 - DNA, 642 bp, Escherichia coli
atgcgtcaatccatgactggtagttgctatgggactcctggtttagctcctattgctggagcgttatttgttgcaacctctatgttcctgagtggaacaggagcgagctattctgtgaaggatgtaaaccagtggcgtggttttgtacaacctaaagtccattttgggttatctaaacttgaaaatcatggggatacagataatgaccctgttgatatcaggacaatttcagaacatttaagtaatgttagggatactctttctccatcaatgtcagaactggctaaagatttgggtattactaggcaagcattatacaaatggttatccggtgacagtcagcctgatgatattgggaaagctggttacatcattgaactcagtagattagccgatcgctttaacaaagcaggagtagaaaatgctaagttgatgtcaaaaatgaaagcgtttgacggcttatctattattgatttgattaagcgaggcgatgactggaagtcgtctgtgaatctcttaatcgatgaagctcgccagcttaaaattgcaggtgtaaaagcgaatttaactgggagcaaaagcacgccaactgacgggtggatgtcgtctgtttctatacctggttcaggaatgaaggagtag

SEQ ID NO: 33203 - DNA, 807 bp, Escherichia coli
atgagtgacagcaatcgcatgtccaatgcacccgtatactatgtgctggcgcaagttaagtttacgcctatcaaggcgatgaaaaagtatgtcgatgacattcaggaagcattgcgtttaaggggctatccactctttgaaagaagagaggcaatgcaaatggtgtttgatgttaatacgcccggtgaatcgcctcagccatcttttgaaatggtccagcagtggtatatgtctgacatcactaagacttcaggttttgtcttgggtaacgattttattactttccagacgactgattacaaagaacatgaaccgttctttaaagcattgatggaaggattgtctgtcgtaatagaacatgctaacccagcccttttgacaagacttggtttgaggtatctggatgccgtaatacctagtgagggtgaaaagattgagcagtacctttgcaatggcttacatggtgtagatttggatttatctccgatacaatcggttaacgagatggttttccaaacaaatgttggtcctgttataagtactggctttttagtaactcgtttgcataagatgtttggtcagttgagttttcctccagatatcttgccctttggggttgaaatgcttgagcggttcaggagcgacaaggctctttggcatggaattattgatacagaccattatgttgaaggaaacatgccgccagaaatagattcaattgagcaacagttcaattcactacatgatgttgtaaaggaaagctttaataaaatggtatcccaacatgccattaataggtgggtataa

SEQ ID NO: 33204 - DNA, 231 bp, Escherichia coli
atgtgtattaaagctgaaaaatatattgaatgggttaaacactgtcagtgccacggggtgccgctgacgacatataaatgccccggatgtggtgaacagattatgacgcaatgctcacccgaaaaggaaattcgggattccctgacatgttgtccgtggtgcagcgcggttttctttaagcaggtaaaaggcgcgaaggtaaaagccagcgcagttattcagaatcaataa

SEQ ID NO: 33205 - DNA, 309 bp, Escherichia coli
atgaataatggcgtatttacaaaatccgaggagctgacagcgttgttgacggcggctggttttcctgaagatgtgatcggtaactttgtggcggcggtatatgccccgtcttataaccgtgcaattgatgaggtcatggcgtaccgactcggcattgttgctgagtcactgagtcctcactggattattgaaaatctccgcgctattgctgatggcaacgataaatcagcagccgttgctgcactggatgtgttacggcaaatgagtctgaaattttatcctgaatttattctgaggaccgcaaaatga

SEQ ID NO: 33206 - DNA, 231 bp, Escherichia coli
atgggtaaaggctggaatgcatcctttcatcttggcagacgtgagcggctgtgtcaggaggttttgcaccgtgtcgccggtgggccacggcctgcgccccgcgactataccggtcatgatggcacccacggaagttattacatgaaaggatggcagtcggttgatatgccggaaattcttcaccactgtcaacgttataaggaaaaatattgtgtacagaaaattcagtga

SEQ ID NO: 33207 - DNA, 414 bp, Escherichia coli
gtgaaaaacaatgcacagctgttgatgccgcgcgaaaaaatgctgaagtttggtattagcgccttaacggatgtcgagctgttggcgctatttctgcgtaccggaacgcgcggtaaagatgtattaaccctggcaaaagagatgctggagaatttcggctctctttatggcttgttaacctctgaatatgagcaatttagtggcgttcatggaattggcgtggcgaaattcgcccagttaaaggggattgccgaactggcgcggcgttactacaacgtacggatgcgtgaagaaagcccttttactcagcccggagatgacgagggaatttttacaaagccagctcacgggcgaggagcgggagatctttatggtgatctttctcgactcccaacacagagttataacgcatag

SEQ ID NO: 33208 - DNA, 126 bp, Escherichia coli
atgcgtacacgaattgactatctggcggataaatactgctttacagaactgaatgagtctccccgtcttcgtcggcagtggcaggatatcctggaggagtgccggcagacagaggccggaccataa

SEQ ID NO: 33209 - DNA, 336 bp, Escherichia coli
atgagagaacttacaattgttgaaattaatgaagtagtcggaggtattgggctgggtttcggacaggaagccggttcattactgggtcagggaattggtgctgttgttgattggtcaaatggcaccacaacagccactgcaccaggcaccgctctgggtgccgggattggggctacggtagatgctggcgtggcaggccttacatcgctggctgaatggggcgttaatcttggcgggcatactgctgataccgtcacatcatcaattgggaaagggattacaaatatcggtggtgctatcatcggtctgattaatcctctgaacctgctgaaataa

SEQ ID NO: 33210 - DNA, 1299 bp, Escherichia coli
ttgtttcgtaaggaagccgttaagcatcagagaatgagatggcggggaagagctttgctgctgcctggaattccggtgtggctgattaccggactttgtacttttttcctcatcacctttctgctgtttatcatcacagggacctatacccgacgtgtaaacgtcacgggagaggtgataacaaatctcaggccgatcacaatttactctggggttcagggattcgttgtcaaaaaatttgttaatgaaggccagcacgtcaaaagtggtgatcccatttatcagattgatgtcagccgcagcacccggagtggtgttgtcagtgacaatttaagaaaagatactgaaaaccagcttttgcagataagtaatattattgagcgtatagaaaacagcaaggaatcaacgctggcggcgctaaaaaaacaaaaagcccagtatattgccgcgtttgaaaaatcttctgatattgtcaggagggcagaagaaggaataaaaataatgaaaaaaaatatggagaattaccgacactatcagcaacagggactgataaacaaggatcaactggccaatcaaacggcactttattatcagcagcaaaataatttactgggccttatcgggcaaaatgaacagaatgccctgcacataacaagccttgaaagtcagatcctgacacaggcggctgaatttgaaaaccggatttatcagatggagatgcagcgttatgaacttcagaaagagatggccggtaccgatgccagcggggagatcctcatcagggcattatcagacgggaagattgattctcttagcgtaacggtcggacagatgattaatgtcggtgacagcctttcacagataatacctgcagggatcagtaattatcagatggttatctgggtgccgaatgataccatcccctatatttcggcaggagaccgcgttaaccttcgctacgaggcttttcctgccgaaaagtttggccagtttgcaggggaaatcgagatgatttccagaacacctgcatcgctacaggaaatgcagacttatccaggtgcacctaaaaatagtcaggctgcttctgccccttggtacaaggtcattgttaggcctgaaaaacagtttatcgtctatgacggaaaaacattaagcctagataacggaatgaaagctcaggcaaccctttttctggaaaaaagaaaaatttatcagtggatgctatctcctttctatgacatgaaacacagtgcgacaggaccagtaaatgatcgggatgtcattcagaaccatcattag

SEQ ID NO: 33211 - DNA, 2109 bp, Escherichia coli
atgatcgggatgtcattcagaaccatcattagtaaacttgattccgggttacaccatcgcgttcccgttattcatcaaaccgaatcctcagaatgtgggttagcctgcttggcgatgatttgcggatattacggaaaaaatgttgatatgatttccctgcgccagcagtttaatctttccacccgcggtgccacgctggctggtgccaaaactatggctactcaactgggtatggcaacgcgggcgctctctctggatctggatgagatcggtgttctgaaaaagccctgtatactccactgggactttaatcattttgtggtgctggtgagtactaggagacagcggtttgtaatccacgatcctgccagagggcgccgtacggtcggcctgtccgaactgtctgagcattttaccggcgtggcgcttgaagtctggccggacagtgattttgccgagaaaaccgtcagaaacaggatcagcctcatcacacttatcagcaacgtacacggcattagaggagccttgctcaaaatattcagtctgtcagtagtgattgaatccatcagtctggtgatgcccgtaggtacacaactggtcatggaccatgttatcccagccagtgatcgggggctgttgacgcttatctgtgtggggctgctgttttttattttgctgcgggcagcgacaggcatggtgcgttcttggtcatccttggtcatgagcactctcatcggcgttcaatggaaaagcggtctgttttctcatctgatgcgcctgcccttgggatattttgaacggcgtaaactgggtgatatccagtcccgctttggttcgcttgatacgctgcgctccacatttacgggcagcctggtcggtgccataatggacggtattatggtgctcggtgtgctgataatgatggtattgtatggcggatacctgacttggtttgttctgggatttactctggtttatgtttttatccgccttatcacctacaactattaccggcagctttcagaggaagcactagtcaggggggccagagccggttcttattttatggagacgctgtacggaatagccaccatcaaaatgcaagggatgacggagagaagaagtgttcactggcttaatctggaaattgataccataaatacgggtatcaaagtgactaaaatggatttacttttcggggggcttaacacgtttattgccgcctgcgatcaggttgtcattctgtggctggggacatcgctggttattgataaccagatgaccatcgggatgtttgtagcctttggcgctttccgggaacagttctctgctcgtgtcacctctctgaccagttttatgcttcagttaaggatgatgagcctgcataatgaacgtatttccgatattgcacttaatgaaacggaaagcaaaaagccggacattccctgtcatgtcggtatgaaaccggtatcgctggaaattcgcgacctgagttttcgttatgacagccagtctccggctattttcagccaactgaacatgacggttaaagcaggagaaagcgtggcgataaccggtccgtccggggccggaaaaaccacgctgatgaaagtactgtgtggtttatttgaaccggagtcagggaaaatcattgtagacggtcttgatatccggcagctcgggataaacaactatcataaaatggtagcttccgtcatgcaggatgacaaactgttttccggttcaatcagggataatatctgtggatttgtggaagaacccgatgaagcttggatgacggaatgtgccagagccagccatatccacgatattatcatgaaaatgcccatgggatatgaaaccctaatcggcgaattgggggaaggattatcaggtggacaaaaacaacgtatttttattgcccgtgcactttaccggaaaccggggattttgtttatggatgaggcaaccagttctcttgataaagaaagtgagagcctcgttaatcaagcgatcaggcaattaaatatcacccggatcatcatagcgcaccgggaaagcacaatagcctcggcagaccggatagttaccctggggacagtgaattag

SEQ ID NO: 33212 - DNA, 165 bp, Escherichia coli
atgatcccgttaccttccgggaccaaaatttggctggttgccggtatcaccgatatgagaaatggcttcaacggcctggcttcaaaagttcagaatgtcctgaaggatgcccccttctttgatcacctgtttattacagcgggggtaccaagccacgtcaaatag

SEQ ID NO: 33213 - DNA, 939 bp, Escherichia coli
atgttctgtaaacagcgcgtttttaaagcaggcaccctggcgatgtccgtcgttgctgcattgctgtcctccggtgtttcagctcaggatgacacaataacccgtgcagaccttgataagcttgagcagaaatatagaagcgaaggggacagtcttcgcggagagatcggtggcgtgaaacgtgattcgtttgctcgcactgaccagacagcagaaaagttgcgcgaagaaatgagaagcgaaggggacagtcttcgcggagaaatcggtggcgtgaaacgtgattcttatgagcatacagacaagaagtttgctgaagcaggaaaagctatccgctcggctgctgcacagtccgcgaattacaccaatgaggtggcaaaacgtctcaatgacaaacaggagaagtctgagcagaatactcgtctgctagttgacgagtcctttaagcagacaacaactatggtcggcgaaaagtccagaatggacagagcatataccgagcaactggcttctgaaaaccgcaggagaattgataccgttaacagtacttccggggtaaacgcacgcgcagtggcagaaaaccgtcaggctattggtacaaacagccgggccattaacaccaaccgccaagccattgccgccaacaccagaacgctgcgccagcatgaagcgcggatgaatgacatgagtcgtaagattgatgataataacgacgaaatgagacgggccgctgcgcagtccgctgcattatccggcctgttccagccctatactgttggggcttttaacgtcactgcagctatgggcggttacagtgacaaacaggctgtggccgtaggggccggctaccgcttcaatgacaccgtggccgccaaagccggtgtggctgtcagtgacggcgatccgtcatggaacgttggcgtgaacctggagttttaa

SEQ ID NO: 33214 - DNA, 474 bp, Escherichia coli
atgaaaattgtggtggcaacgaagaatcgttatttggaatgcggtctgatgtctgtgcttgaggattatgatgtcattattgccagagagtttttcactccggcgaagcgcttccggagtctggacggtgaagaatcgtggtttattctctgtgacgaacggactgggggactgatgcgctgcctgtttcacgggcggcatttcattcaggtcagcgtggaaagcatgaaaacgctttcgcagatacaggaaaaaatccgctcaggcctctggacgtataacaggctgagcggcacattatccttgtcccagatggttgttctgtttggttatatctttcaggaatacagtcagggaagacttgccagaatgctgggtataaactcgggaacggtgcatgcctttttaacaacggcaatgtcgcgcaatggtttgcagggcgtaaacgcaaaatatctggccggtcttcgttaa

SEQ ID NO: 33215 - DNA, 342 bp, Escherichia coli
atgcttcatactaccaatcccgttatcaaacacaaagtcggtctgctcaacctcgccgaggaactcggtaacgtatcaaaagcctgtaaaatcatgggggtgtcacgcgacactttttaccgctatcaggaactggctgaggaaggcggtatcgatgctttggttaatcagaaccgcagagtcccgaacatgaagaaccgtgtcgatgaagctactgaacgtgcagttgttgagtacgtaattgcgttcccggcttatgggcagcactggaccagtaatgaactgcgtaagaaaggcgtatttatctccggcagaaaaaaatctgagccagatttaatctga

SEQ ID NO: 33216 - DNA, 336 bp, Escherichia coli
atgttaagtgaagatgaatttgcagaactaacagaagctttagaaggtcgtaacctgcaggcaaattggtgggcaactgaaagcttcgcaagcgatttcagtattagaagaaaatttttcttctggatatttgagcaccttctgaaagaagggcgtatcaaactcgccaagcacggtaagtttctggaaggaagtgttgatgagcaggttgagcgttttcgacgagcatttccgaaaacagaagaagagatggaagacggtatctggttttttgatgagagttgcccggggggagctgtttgggtgcttgaagatggctctctcgaatggacctga

SEQ ID NO: 33217 - DNA, 138 bp, Escherichia coli
atgctaggtgccgtggaaaaacgcttcggagataaggttccgaaacagccgatgcagtggctgacagatgacggttcggcctatacggctcatgaaacacggcagttcgcgactgagctgaggagccctgcacaatag

SEQ ID NO: 33218 - DNA, 993 bp, Escherichia coli
atgactataaaaaaaacatatgtaacaccaacagaaatagtgaaatatttttatggcaaaccggaaaacgataacgtaaaagagagaaaaacaattgagagcctgacccgtctcaaacctgagtgggaaaatactctcgatatgatgaagttaatacgcaattgtgaaaagctagcaactgaaggtattttaatggaattatcttcaggacatactctttttgaccgttgctatttcgcaccgaatttcaatgaatcagatgcgaaatatggaaagtatgattttatagctgatggatttgagtcaatcatagaccgccttagtccttccgttttacctgttgttgttgaaaaaagtgatggttcacatgatcttggtactagttttattgttgggaataaccacacgatatttacagccagacatgttattgaagacatgaagagtatcaggatacttagagctggtggtgaggctttaccaatacataaaatctttgtatctaacgatgaacgtattgatatcgctttagttctcacaaccattccgaatgaagataatattcaaccacttaaggtctcaaccaaagcctcggtactggatgaaattttatcaataggatttccacccattccaggatttgatgcattaaagttatatgacgtttcgcatataaattcgtttgtccgactgtcaaaggggcgaattgttggttctggtcactcttacttagattcacaagactttttattattcaatgctagggttaagggggggaatagcggtggccctataattaacaaatacggctttgttgttggtatgcttgtacaaataccaatatcatctgaggacagttcaaagattgataaccttggatatggtatagctgtaacaggaaaaagcctgctggatgctattacatttacagaaaatggccgcgaattaacactcaccgaccgaggaaatggagaatattcaactctagcataa

SEQ ID NO: 33219 - DNA, 231 bp, Escherichia coli
atgctgaaggccaaaccccatccggaactggcttaccgtgcagttctgggtctgctggcacttcagaaaaaatactgtcaggaaaggctgacgctgctggttgatgacgagcttctgagcagggaaaccagtcgtgtggctcggttgagaaaaaatgccggcctgaaataccaggcaacaccggaagggctgcgttgtccgtcctcaagaggtctggggctgaacagatga

SEQ ID NO: 33220 - DNA, 498 bp, Escherichia coli
atgagggaactgctgaacggccactacataatccacaggaaaaacctgctgataaccggtccgacaggatgtggtaagagctggatagccaatgcgccgggcgaacaggcatgtcgacagaaacacagcgtccggtactgtagaacctggcgattactggaacagctggctcagggacgtgttgatggcagctggctgaaatatctgaaacagttgcaaaaaatacaggttctaatcctggacgatctggagctggaacagttaagtaacgcccagtgtaatgaccttctggagctcatagaagatcgttacggtcaaagcagcacgatagtggtaagccagttcccggtagataaatggcatggtctgatggagaacccaacaacagcagatgccatcctggacagactggtacataactcacacagactgctccttcagggagagtccctgaggaaaaatcccccggtagtggaaagcatcgaaaaaacgagttaa

SEQ ID NO: 33221 - DNA, 492 bp, Escherichia coli
atgccaacccgtgatcgaatagagcggaatacgcagttatttttatcatcggctgcactgaaagccggtgataaatacgccacgatacgtacgatgctgacagatatctttaacagtaactaccagtattatggctatcgtcgcctgtatgcgatgctcggaaatgaggggctacggttatcagagaaagctgtacgcagagttatagtggaggaacagcttgtcgtcagccgtaaccgtcgtcgccgctacagctcatattgcggagaaatcggaccagccccagataaccttattgccagagattttaaggcagagcaacctaatcagaaatggctgacggatatcacggagttcctgctccctgcaggcaaagtctggttatcaccggtggtgggctgcttcgatggaacagttgtgagctggtctctcagtactcatcccgatgctgaactggtcaacaccatgctggataacgctgtcaaacgttaa

SEQ ID NO: 33222 - DNA, 213 bp, Escherichia coli
atggtcgcccgctataaaattacagcaacaataattaagccgggtagtcttccggcgcagtggatccgttactcggagagaaggatgactgaggttgagtgtcaaaaaatgttttctcctcccagggagccgggacgctcttttggtgataaagtcaatctggagaatttttgttgtgaaatgatagagaaagaaaaaggtcgtaaaaagtaa

SEQ ID NO: 33223 - DNA, 342 bp, Escherichia coli
atggacgaaaagtccctctacgctcatattctcaacctgaccgctccatggcaggttaaatctctttctctcgatgaaaacgctggttctgttaccgtcacagttgggatcgctgaaaatgcccggttagcctgtccgacctgtggtaaatcctgttctgttcacgatcaccgtcatcgtaaatggcgtcatcttgatacctgccagttcaccactattgtcgaagccgatgtgccccgctttatgtgccggagcattactgccagacgttgccagttccctgggctggccccggaagccggtatacgctgctgttcgaatcgttcgttctctcatggctga

SEQ ID NO: 33224 - DNA, 753 bp, Escherichia coli
atgaatgtgaatgaggtcgcctttaaaaaaggacatcgttatataacggtgatctccgatctcgatggtcgtgcgctggccttaacggacgatcgtggcacagagagcctcgccagctatcttcgcacgcttactgacgggcagttgctggctatcaaaacgctctcaatggacatgaatgcaggctatataagagcagcgcgtatccacttaccctgtgcggttgagaaaatcgccttcgaccgcttccatgtagcaaagcaacttgacgaagtggttgataaaacccgtcagaatgaacatctgcacctccctgttgaaagtcggcgtcaggcaaaggggccccgcttcctgtggcagtacagcgataaatggatgaccgaatccaggcaggaaaagctgatatggctgcgagcacagatgaagctgacaagccagtgctgggcgctgaaagagctggcaaaggatatctggaacaggccatggagtgaggaaagacgtaatgacagggagagatggctggctctggcggccaacagtgacgttcctatgatgaaaaacgccgcgaaaacgataggaaaaaggctttacgggatcctgaatgccatgcgacaccgtgtctcaaacggaaacgcggaggcgcttaacagtaagatcaagctactgaggataaaagtcatgagataccgcaatagggagcgctttaagccgggcttgatgttccactacgggaaactgaatatggcgttctga

SEQ ID NO: 33225 - DNA, 567 bp, Escherichia coli
atggcttgtattttccgtccgctactggtactgccgaacccagcttgttcacgaaaaatttttgccgaatcgcttgctcccttcgctggttcacatcatcagtctttacaggcgttacaaaatttacagcttcaactgggattaatagccggaggtgaggctggaaaacgggcagcaacggcagtgggtctccgtttcagtgcagatactcttcttcgcagggttatcaataccccggagacaaaaccgtcaggctcgatccatgtcggtattgatgagtgggcgtggcatcggggctaccgttacggtacgttaatagtcaatcttgatactcaccgtcccctcgtcctgcttcccgaccgcgatcagcgtacgctggcgacctggttcagaaaatatccggaaatacaggttgtctcgcgtgatcgcaatggagtctatgcgacagcagcacgtgaaggtgcacctcaggccagacaggtggtcgatcgatggcacctgctaaaaaatattggcgatgcgcttgaacgaatgagctactctcgggtaccacaatttcaccgataa

SEQ ID NO: 33226 - DNA, 633 bp, Escherichia coli
atggtgcttataacaacgacaaaaaatatttatctaatcaaagcattagaaaacgtgttctttgctgctttttctgatggttgcgttatctctgttgatgaattttcttttctggagagtgaggccggtacacacttattgcgtaacaggcgagttgtacttttacctgtgtttccggatgatgatcttacgacaagtctgttgtctttgcgttttgtaaaccagtggctggataaacggctccggaactataaatataatattccctgtgtgatttggggaaatggaggtggactgattcatagcggggtgccttgcattccctggaaattgacgtatgagaagttatgcacaagcctggcaaactatataactaactggaattcgggagttaattatcgcgttgtcaggaaagtttcgtttattgatttgcaactctctcccagagaacaaaccgtattcctgtataccagagaagggaaagacctggaatggatttctcatactttaggtatatccagtaagaccgtctggacgcatcgtcgcagagtcatggataaactaggtgtcaggcggctacatcagttgatgaatatccccctgtctcttatttcagtaaaaacgcagttgtga

SEQ ID NO: 33227 - DNA, 486 bp, Escherichia coli
atgataaatgtgaatagtatcgcaaaggatattgaaggtttagaaagttacctgactaatggctatgtagaggctaactcttttaacgacccagaggatgatgcgttagagtgtctcagtaatttattagttaaagattcggggggagggctgtcattttgtaaaaaaatacttaattcaaataacattgatggtgttttcattaaaggttcggcgctgaattttttattattgtcagaacagtggtcttacgcctttgagtatttgacaagcaatgcggataatataactcttgcagagcttgaaaaggcgcttttctatttttactgtgcaaaaaatgagacagacccttatcctgtaccagagggtttattcaaaaaactaatgaaaagatatgaagaactgaaaaatgaccctgatgcaaaattttatcatcttcatgaaacgtacaatgatttttcaaaagcttaccctctgaataattag

SEQ ID NO: 33228 - DNA, 609 bp, Escherichia coli
atggaaaaggagtacggtacagcggtggcacaggagcttgttactgggttactgtcaggacaggactatataaaacgtaaccctgatactgaagcaatggcaaaggctcaaagcattatgaatacttgggggtatcataaatctaatgcaagtattggtgatgctcctttgttgtttgggggaagcgtactggggttaacagtgaaaggtatggcgactaatgcagcaattggtatcagcgtaaactcagttgctcagcttgctggaaaagatccattcagttatgtggatgcgataatggctggggtgacagctgcagctacaaccggtaaaggcatcatcgtctcaactcccatcaatatgggcggtgctgcaatcggtagtagtatcaagggagaagatccaactaactcagttattggtgctggagttggctcgatcttcggcggtggtattggaaaaattgctacagaacaactgaaaccgattattaaagaaggtagtgctgaggtaattggggctgttacgggggctgtctcaggagaagttactggcaaccaagtaaaagataaactggacaaggtagggaataaaaatgggagcaattaa

SEQ ID NO: 33229 - DNA, 210 bp, Escherichia coli; identical to SEQ ID NO: 7980

SEQ ID NO: 33230 - DNA, 369 bp, Escherichia coli; identical to SEQ ID NO: 7979

SEQ ID NO: 33231 - DNA, 375 bp, Escherichia coli
atgattagcggcgtgctgtacgccctgttagcagggttgatgtgggggcttatatttgtcgggccattgatcgtgccggaatacccggcgatgttacagtcgatggggcgttacctagcgctagggttaattgcgttgcccattgcctggctgggacgcgtgcgtctgcgtcagttggcgcgtcgcgactggcttaccgccttgatgctcaccatgatggtatcgttccggggaactcatattgacgcgtttttcaggcgcgcgtcatcggcggcgcatacgaacgatcgtggtctgataacggttgatttattttgttgcacaggggcgatcgccaggcaggtaccggaggctggctctgaagtactgagttag

SEQ ID NO: 33232 - DNA, 234 bp, Escherichia coli
gtgtgtgaacgggccatcaaaaacgtggtcctgggcagaaaatcgtggctgttcgccggttcgcagatggcgggagaacgcgccgcgcaaataatgagcttgctggaaaccgcgaaacgcaacggtctggagccgcatgcctggctgacagacgtcctgatgcgtctgccggagtggccggaggagcgactggcagagttgctgcctcttgagggatttaccttctccgggtga

SEQ ID NO: 33233 - DNA, 456 bp, Escherichia coli
atgtggggaatgttagataccggtggtggaattcgggcacaactcgcggaagacaacaaagtaggaaactgtgggcgggagtggcacgttggttttttctttgatggcgtggggcgcaatattgatcaggatgcttcagaacaacgcttaagtaatgtggctcgtttatttcgggcttatcctgatgaagattccaatactgattttgtttgtcacaataaattttatttttccggtatgggaacaccctataacgaagaattgatctcaaagttatatacaatcatggatcagtctctggaaagtatgaaggaggatttaaacgatttcgcaaaagagacacatgaagaaatcagcaaggaaatccgtaacagaaggggatcgtggaatgaaaccttaaagaaaatccagaataaacttctggaccctaaagaacttagaaaaaaaaagaaatga

SEQ ID NO: 33234 - DNA, 330 bp, Escherichia coli
gtggcgaattcaattttttatactttgcaaaaaactaacgtggcattatggctatatcttgaaatgtttgctctggtggcattcattaaactgtatacaggaaaaggttttgaattcataaagaacatgtgtgtatttatcgattatgagaaagggataataaaatccacacacgaagaactgctgggtgaaattaagcgtaacattcaagtgaatttgaaggtgaatcctgataattttccagaggtaatagacatatacaattcatgctttagtgaaaatatattgtcatatgatattcaggatggtgattttaaatggcgttcatga

SEQ ID NO: 33235 - DNA, 915 bp, Escherichia coli
gtggaactgagtcgttcactcctgtcgggctgggttgatgcatgttgccggctgctgtccccactggaagaggcgcttcggaactatgtgctggctgacggcaagctccacgccgatgacacgccagtcccggtgctgttgccaggtaataagaagacgaagaccgggcggttgtggacgtatgttcgtgatgatcgcaacgccgggtcagcgctggccccggcggtgtggttcgcgtacagcccggacagaaaaggcatccacccgcagacccatcttgccggcttcagcggtgtgctgcaggtggatgcatatgccgggttcaacgagctttaccgcaatggccggataacagaagccgcctgttgggctcacgcccggcgtaaaatccatgatgttcacgttcgcactccctcagcactcacggatgaagcactaaaacggacaggcgagttgtatgccatcgaggcggaaataaggggaatgccggcagaacagcgccttgccggacgtcagcagaaagctaaaccgctactgaaatccctggagagctggctgcgtgaaaagatgaaaacgatgtcgcgccactcagagctggcgaaagcgttcgggtacaccctgaaccagtggccggcactgacgtactatgcagatgatggctgggctgaagcagataacaacatcgccgaaaatgccctgcggatggtcagcccggggcgtaaaaacttcctgttcttcggctctgaccatggaggtgagcgcggtgcgttgctgtacagtctgatcgggacgtgcaaactgaaaggagtggagccagaaagctacctccgctatgtccttgacgtcattgctgactggccggtaaaccgggtaggtgaactgctgccgtggcggatcacactgcctgccgaataa

SEQ ID NO: 33236 - DNA, 3381 bp, Escherichia coli
atggctaaaaaaccgaccaccggtaaagcagttaaaaaagagactaacagcaagctgagctttcataagcagttggttttaaaccgctttatgttccatttttttaaagatggcacattgcaaggtttgaagaatcggttaggcgaggatcgctttgaaggcatccatgaagatggccaaagcttattcttccatgagctgagtaactatttattcgaggtcgatcttatcgatctcgatgaactgcgtcgttacgatctcaatatcgtgcagcactggcagcagataaccgagcaccgtaatcgtaaagaagacacagtgctgaacatgaaatattttcagtacttgtcgcttctgtttaccgagatctacctggactggtacttcaaccgtaaacagcaattactcgatgggctaaataacgagctggcagcatacaatgctgaaaatgataaaacagcaaaagaccgggctaatcagttcaaatcatacgttctggatgatttgaataaactggcatactggaacgctactggttctggtaagacactgctattacatgtcaatattttgcaatatttacattatttccagaacggtaatagccatcattacccggataaaatcatcctgcttacgccggatgaacgcctgtcgaagcaacatttagatgaactggaaaactcaggatttacccaataccagttattcgataagagtaaatccgcgccatttaaaggcacgattgaagttattgatatcaataaacttgccgatgaaatgggtgacaaaactgttgccgttgaggcatttgaaggcaacaatctggtcctgattgatgaagggcataaaggcacaggaagtgctgctggtgcctggatgcgccgtcgtgacaaattaacgcgtgacggatttgcgtttgaatattcagcaacttttggccaggcagtggccggtggcaataatgttgaggcagttgaaacagaaattcagaagaaaaaagcaaagctgctttttgaaacaactgccttaggtaaactgagcgaagaacagttagcgcaaatagcattaaccagcgaagaacaacgtgatgcgcgtattcaggcgacacgagaagtctatgggaaatcgattctgttcgattactcctataaattcttctatgaggatggttatggtaaagaatcactgattcttaaccttaatcctgaagaggataaaaaagatgagcgtcggtatgagtattttaccgcgtgtttgctcagcttttatcagcaacaatatttattcaataagaataaagaaaaattaaatgaatttaatatcgaaaaaccgctatgggtttttgtcggtaacaccgtaagtggtgaagattcagacattcacgcagtactgcgttttttagcatggtttttaaatcatgaatcgcaggcaaaatcgtggattaaagatctcattgaaaataaagcgcgaattcttgataccaaagagcgtaacatttttgaaaatcgctttaccgcactaatgaacggcccggaagatatctacgcagatattctttctcgtttgtttaacaccactcactcaggtcagagactgcgagttctgaatttaataggcagtaaaggtgaactggcattacaggttggtgaggccgaaccgtttggtcttatcaatattggtgatgcaccgtctctttacaaaatgtgtgaagaggatacgacatttgattatcagagagatgattttgcgaagtcactctttcatacgttaaatgacaaagactcgcgactacatattttgatcggctcgcgaaaatttactgaaggctggagcagttggcgcgtctcaacgatgggattgctcaatatgggccgtggagaaggttcacagatcattcagttatttggtcgtggcgttcgccttaaaggtcgcaattattctttgaaacgcagtacacccggtgagcgtccgaaagggttgcatctggaaaaattagagacactgaatgtattcggtgtacgtgccgattacatggcaacctttaaacaatacctggaagatgaagggattacgccaagtgacgagatccttgagctgaattttgaaactcggccaaatatgccagcaaccaggcttaaaacacttaagcttaaagatggttataaagataatcaaagactcggctttaaacgtgtctattttcccgaattgtatgaagttcctgctgattttcaggggaaaattaagcagccgcatattaagctggacctatacccgaaacttgagtcgattgataccagcagaaaaggggacaatactccggttaacgtgcgtaatgaagcgaagttagattataaaatcattagtgcgtttgattttgatcggctttatctcgccattcagaattataaactacaacgcggctggtcaaatttacgtgtggataaacaacgtttgatcgacttttgtaccggtaagacaaagatcggaaatagttggtatacccttttgattccagcttcagagcttgagattaagcaatatgcagatattgctaagcaggaagatattatgcttcgtctgctgactgattatactgatcgtttttacaacacattgaaaaatgcttatgaaggtcagttttatgaaatcacgcaggtgaaagaagatgattctggtatgatcaaaatgtaccatttcgagatcgaagaaactgatgatgggttggcttatgccagtcggctggaacaattacaacaattggtcatcgacggcgaaatcggtaaagcaaaatcctggagtgcatccgggatggttgctattacctttgataaacatctttattacccgcttctttcgattgaaaaaaatgccaacataccgctaaaaatgcgaccggcagcacttggtgcgccaagcgagattacttttgttcatgatcttcagtcttttgttgattcggcaaaagggcagaaaattattggtgataaaagtttatacttgctaagaaatgcggattctaaaaaaagaggcctgggttttgctactgcgggtaatttttatccggattttttgttgtggttagtcgatgataaaagtggtaaacaatggctgagtcttattgatccaaaaggcattcgcaatcttaatcttgatgatccgaagttcgggttatataaagaaattaagaatcttgaacataaattatcggatgataacttatcattaagtgcatttattgtttctgaaacttgttatgttgacttagtaaacgtacctgactcaaaagagaacctggaagccagaaatgtgctttttattgaggatactggtccagtttatctggagaagttattcagtaagatggttagcgagtaa

SEQ ID NO: 33237 - DNA, 237 bp, Escherichia coli
atgagcctgtttgcccgcggtaatactgacattaccggcagtggagccgatggtactggcactctgactctgcgttgtcccggcttcgcggcggtcgtgcgatgtcttactgctgccaatggtgaaaccaataccgccggtacccgtcagaccggatttcttcgtttccttaaagcgccaggacgtatctgtactggtggcagcaagaacatcaacatggttacccgccgccagtga

SEQ ID NO: 33238 - DNA, 972 bp, Escherichia coli; identical to SEQ ID NO: 30533

SEQ ID NO: 33239 - DNA, 555 bp, Escherichia coli
atgagttcatcccgcttgtcggcgatctcatcttcaatgtcaaaaatttccatacgttggcgcttctgctgccgttccagtagattaagcttttcctggttttgcttttgttcttcgatcgattgcgccagtctggcttctcgcttcaacgaattgatttgcattttggtatcgcgtaatgcttcttccgccgcaaagatcatatcttcagcccatttttccagcttatctatttcagcttcaaaaaggacattgttctgctccaaaacttccacaagtctggcgtcaatttgcctgttcttgagtaagatcaagtcatcaggtaatgcatctaaacttgccgaattatccagcttttcgttggttattgcagacaagttaaacagacgtttacaatcttcaccatctaccacacgtccgttgtcagtttttgcggtaaagactaaaaattgctgcctgttaaacgcatcaacagtaagcaaatttagtgttaaccaccctgattgccctttcagctgctcagccaccgagactttcgttgtgtggttactataa

SEQ ID NO: 33240 - DNA, 1233 bp, Escherichia coli
atgaactgtgatatctccacagtaaaaatccttacaggtaaagttgttctgagcgcggtaatagcccgtattgagtggatttttgaaacattttcatcaatatgcctgtctttttccggtggtaaggattccactgtgcttttccatcttgtggcagatgtggcccgcaggaaaaaacgtcgattctcagtattattcattgactgggaagctcagtaccagtgcacaattgcacacattctgaagatgagggagatgtatcgggatgtgacggagactttttactgggtggcactccccctgactacggtaaacggtgtctctcagtttcagccggaatggatatgctgggaaccaggtgtggagtgggttcgtcagccaccagatgacgctattacagatatgtcgtatttcccattttatcggtatgccatgacgtttgaagaatttgttccggcattttcttcctggtttgccggtaaccggtgtggagtggcaatattgactggtgttcgtgctgatgaatcgctcaatcgctttatgggactggtgtctcagcgcaaactgagatatgcagatgataaaccctggaccacagcgtcacctgaagggttttattacaccttgtatccgttgtatgactggaaagcccgtgatatatggatatataacgccagaacccgagctatctacaatcccctgtatgacctgatgtaccgtgccggcgtgccgttacgcaacatgcgggtctgtgagccttttggcccggaacagcgtaagggactgtggctttaccatgttctggagccggaaacctgggccaggatgtgtgagcgggtgtcgggtgctgccagcggggcgctttatgccaatgagagcggtgcctattttgccctgcgtaagcgtatcacgaagccgcctcatcatacctggcgtagctatgcgatgttcctgctggatgtgatgccggaaagaacggcagaacattaccgtaataaaattgctgtctacctgcgctggtatcagacgcggggcttcccggatgacatcccggatgaacaggagaatgacctggggagccgggatatcccgtcctggcgacgtatctgtaagacactcataaagaatgatttctggtgccggactctctccttcagtccgaacaaaccccggcactatgaacgttatctgcagcgtatgaaagaaaggaggaaggaatgggggattctgtga

SEQ ID NO: 33241 - DNA, 1497 bp, Escherichia coli
atggtggcaggtagtctgatatttctgttcattattctgctgacatttttctggaaaaaagcagagctggtgaatgacagccagatcagagttaatttcgcacttggctatatagaaaacattctcaatcagaacaacagcatcagccaggaagcagaacatttgcttctgaataactgtaacgcagatactcagcatgaattaagcaatctgctgctgaaacgcccacaacttcgtgcactgagcctggcaagacaagaggctgtattttgtagcacccaccccggtttgcctgtcggtccagttgctgaaaaggaacagtggcggcacgatatgctgattcgttttcctgaagatacaggtactctgccctggatcctgttaagaacaccttacaaaaacggcacggtcattaccgccacggattattattttattcaggacatcatctctgtggttcatgcggttcctgcaatacgattccgtttgggaaacacggtcctgtcagccagcggaaaaaatgtcactctgctcccggacgacagcggtatacaaaaagaaagtcattcaaaaaaatatccgttctccctgatttatatcatcccggtgaaaatgcaacttacctacgcctggaaacaggcctggtatatgatccctgttgccatcttcggtggaatactcacagcctttctgctgtcccgccgacgtccatcttccccgctcgatatgctgaaaaatgcacttgctcacggagagttcagaccttattttcagcccatcatttccgctaaaaatcaccagctaaccggctgcgaagtactgattcgctggcatcaccccgtcagcggaattatcccaccagatcagtttatcccgctggcagagttcaccggattaattgccccgataacgcaacagttgatgtctcaggtcgaacatagccttaattctgttgcgcattttttaccgaatcaatttcatattgggatcaatatttcaccagcgcattttctgtctccgggactggaggatagctgtatgaagtttctatccaccttcccgaaagggaaagtgaaactggttctggaactgacagaacgaaaccagctatccgtcacagcagaatcaaaagcgttatttgcgaaattacatcaacagggagtattgtttgcactggatgattttggtactggctatgcaacccacagctacctgcagtcgtttcctgtcgattacatcaaactcgataaagggtttgtacaaatggtcggcgtggatgaaatctccgggcatatagtagaaaatgttattgagctggctcgccggttaggtattgatatcattgccgaaggcattgaaaccgaatcacaggaattgttcatgacagagaaaggaagctgctatctgcagggataccgctatgcacctccactacccgctgaacagtttattgctgagtgggtatacaacagcggaaacggcaaaaaccagagataa

SEQ ID NO: 33242 - DNA, 2478 bp, Escherichia coli
atgtgtataagagacagtaataatccctatactcataccgtcgattattttatcctgaaaacaagtagttatggctggttccctaccggtcaggtcagtaacgagcactgggaatatgtcggacatgaccagaacagtgcacaggcgctgcttgcaaacagaattaataataaagggtatctgtatcatggcaagttgctgggaaatattaatttctcaaataaagcaaccccgggtacaaccggcgcattggttatggacggctcagcgaatatgtccggtacatttactcaggaaaacggtcgtctgaccattcagggccacccggttatccatgcttcaacgtctcagagtattgcaaatacagtctcgtctctgggcgacaattccgttctgacacagcccacctcatttacacaggatgactgggagaacaggacgttcagctttggttcgctcgtgttaaaagatacagactttggtctgggccgcaatgccacactgaacacaaccatccaggcagataactccagcgtcacgctgggcgacagtcgggtatttatcgacaaaaaagatggccagggaacagcctttacccttgaagaaggcacatctgttgcaactaaagatgcagataaaagtgtcttcaacggcaccgtcaacctggataatcagtcagtgctgaatatcaatgatatattcaatggcggaatacaggcgaacaacagtaccgtgaatatctcctcagacagtgccattctggggaactcaacgctgaccagtaccgccctgaatctgaacaagggagcaaatgctctggccagtcagagttttgtttctgacggtccagtgaatatttctgatgccaccctgagtctgaacagccgtcctgatgaggtatctcacacacttttacctgtatacgattatgccggttcatggaacctgaagggagacgatgcccgcctgaacgtggggccgtacagtatgttgtcaggtaatatcaatgttcaggataaagggactgtcaccctcggaggggaaggggaactgagtcctgacctgactcttcagaatcagatgttgtacagcctgtttaacgggtaccgcaatacctggagcgggagcctgaatgcaccggatgccaccgtcagcatgacagacacccagtggtcgatgaacggaaactccacggcaggaaatatgaaacttaaccggacaatagtcggttttaacgggggaacatcatcgttcacgacactgacaacagataatctggacgcggttcagtcagcatttgtcatgcgtacagaccttaacaaggcagacaaactggtgataaacaagtcggcaacaggtcatgacaacagcatctgggttaacttcctgaaaaaaccctctgacaaggacacgcttgatattccactggtcagcgcacctgaagcgacagctgataatctgttcagggcatcaacacgggttgtgggattcagtgatgtcacccccacccttagtgtcagaaaagaggacgggaaaaaagagtgggtcctcgatggttaccaggttgcacgtaacgacggccagggtaaggctgccgccacattcatgcacatcagctataacaacttcatcactgaagttaacaacctgaacaaacgcatgggcgatttgagggatattaacggcgaagccggtacgtgggtgcgtctgctgaacggttccggctctgctgatggcggtttcactgaccactataccctgctgcagatgggggctgaccgtaagcacgaactgggaagtatggacctgtttaccggcgtgatggccacctacactgacacagatgcgtcagcaggcctgtacagcggtaaaacaaaatcatggggtggtggtttctatgccagtggtctgttccggtccggcgcttactttgatttgattgccaaatatattcacaatgaaaacaaatatgacctgaactttgccggagctggtaaacagaacttccgcagccattcactgtatgcaggtgcagaagtcggataccgttatcatctgacagatacgacgtttgttgaacctcaggcggaactggtctggggaagactgcagggccaaacatttaactggaacgacagtggaatggatgtctcaatgcgtcgtaacagcgttaatcctctggtaggcagaaccggcgttgtttccggtaaaaccttcagtggtaaggactggagtctgacagcccgtgccggcctgcattatgagttcgatctgacggacagtgctgacgttcacctgaaggatgcagcgggagaacatcagattaatgggagaaaagacggtcgtatgctttacggtgtggggttaaatgcccggtttggcgacaatacgcgtctggggctggaagttgaacgctctgcattcggtaaatacaacacagatgatgcgataaacgctaacattcgttattcattctga

SEQ ID NO: 33243 - DNA, 672 bp, Escherichia coli
atgccgcgtggcaatcttcgtggccgtaatggggcgtccaactatacctacgttgaagcgtgcgaaggtcaggacatgatgtcatggttaaatgtccacagccattgcctgaccttcctgggcggcgtaccaaagctgctcatccccgataacctcagaagcgcagtgaaaaaggccgatcgctatgagcctgtcatcaacgacagttatctggcgctggctgagcactatggcacggttatcatcccggcccgaccacgcaaacctaaagataaaccaaaagcagaaaacggtgtcctcatcgtcgaacaatggcttcttgctcgcatccgtaatgaaaccttccacacgctcaaggcgctgaatgcacgccttcgggagttactgacggacatgaataaccggccaatgaaggggtacggcaatcaaacccgcgcagaacgcgtccgtatgctggatgcgccagcactctctccactgcctctggcgccttatgaatacacggaatacaaagctgtgaaagttggccctgactatcacgttgaatatgcccgtcactggtactccgttccacacgaactggtcggtcagcgtctgtcactgaaggcggggcagtcggtggtacagctctggcacaaagggcagtgtgtggcgcaagcgcagcacacatga

SEQ ID NO: 33244 - DNA, 450 bp, Escherichia coli
atggaaacttgttttaagatccttcagctcaagttcgacaagaagctgactaaccgttgtatcggactgacgttacacatcagcgcctcaaccgtttttgaggttcttgcccgcttcaaagcctcttctctgtcatggccattacctgctgatatatcccatgaaacgctggagaaactcattttcccgcccaaagacacctctgcgtcagagcttgtaatgcctgacatgctgtacttcgatatggaaatgagaaaaccgggtatgacgcggcaactgttgtggatggaatacaaggcacaggcgagtgacaaagcgatgggatactcgcacttctgccgttgctaccgggagtggaaaaaaaacgcgacgcctctccatgcgccaggagcatcgtgccggcgaaaagctttttatcgacttctgtggtcctacggttcctgttattaa

SEQ ID NO: 33245 - DNA, 720 bp, Escherichia coli
atgtttactgaagagcaaaaaatccgcgccattgagctttatttcaaatatggtaagaagcaggctcccgttgtacgcgaactgggctatccttcgaaaagaaatctgcggcgttggatccgttcatgggaagcagctggcggagcaaaagaatccattcgtcataagccccgttacacagatgagcaaaaacaggttgctgttgaacattatcttaaccacggctgctacctggcgtttaccagcagaactctgggttatctctgcaccgatgtgctcgctgctagttgggttaatgaactttatcccgacagacgatgtatacttaccagtaagagcaatccggttgcgccctttgaaccagaagtcaaacgtcaggctgtcatggcactctgtacacgacaagtatcagccagtgaaattgcctggcatattggtgtcagtcgtgcggtattgtataaatggaaagatgaaattatcggcaacagtgcttaccagactatacgtaaacataacgaaccttcccaggaggcagaacgcgatgcgttgcgggaggaagtcgcccgactgaatcaggaaatacgctgccagcagatggagctggatattcagaaaaaggcggaggaaatcatgaaaaagccctgggcatcagtatcagtcacctggacaacagagaaaaaacaaagttcgctgatggcctgggacaaacatatcccctga

SEQ ID NO: 33246 - DNA, 1131 bp, Escherichia coli; identical to SEQ ID NO: 10957

SEQ ID NO: 33247 - DNA, 624 bp, Escherichia coli; identical to SEQ ID NO: 7934

SEQ ID NO: 33248 - DNA, 1782 bp, Escherichia coli
gtgggcgatattgtttacctgagaataatcggtgagaagcagggcgatatttcttcaggctgtgggacgtatgcgtcggttggtaatcgctggcaggttggccatgaagatgaaatttttgcctttgcactcaccaacgccattaccagtactggtaatggcgttaatctacaggggctacaattttgcaaactcattgataaaagctcaccgctactgtctaatgccatcaatcagaatgagcggttatttattgaaatcgatttgtatcgtataaataaaagcgggcgatgggaacggtattattatattcagctaagaaatgcttcattaactgctattcatgtaaacatttctgacaataatcttcctaccgaatgtgtaactgtcgattatgactacatattatgtaaacatctcatagccaatacagaatttgactggttggcctttcctgctggctataatagcttatttattccgcctaaaagtccacctgccagtaatcttaagcctgaaccgctaccagttgttaaccttccactctcttcaccagcggttaacccggtctatgccaaatcctgtctgaaggtgaagggatgtacagatgccggaacggcagaagaacccgctgaaaacttcggtcaagtagcgattttcgctcagccagtggttgatgactgctgtggataccaccatcccgaggctaacgttatcggggaacccgcagaagctcaaaccatgctactgttcccgagtagtgtgttggcgactcaaatatggggaaaatggtcgctcagtggcgtactcagtgcaacccgcggctcttacatcggtgcgttggcatctgctctgtatattccctctgcgggtgagggcagtgctcgtgtgcctggacgtgatgagttctggtatgaggaagaactgcgccagaaagcgcttgcaggcagtaccgccactacccgggtgcgttttttctggggaactgacattcacagcaagccccaggtatatggtgttcatacgggtgaaggtacgccgtatgaaaacgtccgcgtggcgaacatgctgtggaacgaggagaggcagcgttatgaatttacccccgctcacgatgtcgatggccccctgattacctggacgccggaaaatccggaacatgggaatgttccgggccataccggtaacgacaggccgccgctggatcagcccaccattctggtgacgccgattccggacggtacagatacctataccacgccgccattcccggttcctgatccgaaagaattcaacgattatattctggtttttccggcgggatccggtattaagcctatctatgtttacctgaaggaggatccgcgaaagctgcctggtgttgtaacagggcacggcgtcccgctttcatcaggaactcgctggctggatatgtcggtatccaataacggcaacggcgcaccaatcccggcgcatattgctgataaattgcgcggacgggagtttaaaacctttgatgagtttcgcgaggcgctgtggctggaggtgagtaaagactcagtgttattggcacagtttataaaaagtaatcagaataacgttagtcaaggatattccccctatgtccctgaggaggggtattattacggaccaaatgagatagttaagaaattccagatacatcatgtagttgctatagaacatggtggtggagtgtatgatattgataattttaagattgttacgccccgactacatgatgaaattcactacaggagataa

SEQ ID NO: 33249 - DNA, 1371 bp, Escherichia coli
atgccgggtggcatgatatccgccggaggtcacagcggacatgcggaaggaacgactcaggccgcagtggcagaaggcactatcaccatccgggacagggacaatcagaagcagaatctggcgaacctgagccgtgaccctgcgcacgctaatgacagtatcagcccgatatttgacaaggagaaagagcagaggcgtctgcagacagtggggcttatcagtgacataggcagtcaggtggcggatattgcgcgtacacagggagaactgaatgcgttgaaggccgcgaaggaagcaaccggcgaaacacttcctgctaatgcaacagagaaacaacgtcaggaatatcttgcgaaactgcgtgacacgcaggcttacaggaatgaaatggcgaagtatggtaccggcagtgaaattcagcggggtatccaggccgcgacagcggcgcttcaggggctggcggggggtaatttagcaggtgctctggccggagcttcagcaccggaactggcacatctgctgaaatcaacagaaaaagacccggcagtaaacgccattgctcacgccattctgggcggcgcagtggcggcaatgcagggtaataatgtcgctgccggtgcagcaggcgcagcaacgggagagctggcagccagagcgattaccggaatgctgtatcctggcgtgaagcagtcagacctcagtgaagagcagaagcagacgataagtacgctggcaactgtgtcagcagggctggcctgcggtcttaccggaaacagcaccgcatcagcagcagtgggagcacaaagcgggaagaatgctgttgagaataactcactcagtgatggctggaacaatatcctgccatcaggaacacaggattacggacaggccgtagcctcgtggaatcagtatgctcaggacaataatctgacaccggagcaggttcaagaagggatgaatcgtatagctattggtgaagggccttcttgggggacaacatataaagtacacccggtagttcaggctggcggtgatgttagctttatccggggttatactttaagcggaactatagatgacaatcatatttcagttaatcaaggggatatttatagtataggtgctcatggcggagcctcgatcggattatcctttggcccgtatttcccgggattaataaattcaaatgataacgattattcgataaatggtggttttggcgttggtgcagtggggctttctacgggtaaagatggtgttagtttcacttttggttttggcccaagttggggttggagtgcaactgaaattaaaggcgttgacgttaatggcacttcaacaagtgaggtttatcgatatgattttaaataa

SEQ ID NO: 33250 - DNA, 1143 bp, Escherichia coli; identical to SEQ ID NO: 31243

SEQ ID NO: 33251 - DNA, 570 bp, Escherichia coli; identical to SEQ ID NO: 12745

SEQ ID NO: 33252 - DNA, 513 bp, Escherichia coli
gtgcaaataaccgaagccttaatttcagagccgggagacatccggcgttttgttcagcaggcggtggaccactggccgcatttgctggcattttacttcacactccattcggcagaaggaaacatcaacgggcaacagattcatgcattctgtactgccttttaccgacaggtgcaagaacatattactgagcgtaatcacactgccagtccagcaccgccggtggtattacgctggttgcgggaacaacatggaggagcaacaatacgatgcctgttgctgctcagccaggcgagcatttgccatctgcgggtcagtgccacagttgatgaagaatgttcgcaagtggtggatttattgcagcaggcctggcgggggataaacgctggcggacaatgtcgggtggaaaggtgttttcgggttacccggcctgatacatcagagcaatacgttgcgttaaaaacagctgttcagtctctgatgccactggttattgcaacaattatccggtga

SEQ ID NO: 33253 - DNA, 1551 bp, Escherichia coli
atgagtcatcagtgttcactttctgaactgaatgaaaacctggtgcctttcactgccaggcagatcaagtcctcattaatctggtgtgcagaggatgtcagaaatccagacgagctgcaaaatgcctgcagttatattatcgatcctggcagtacagcttctgccaaagtgttccatgcagagcgctatggtggcagtggtattcagcgtaatggaggtggtgcacgttgtgggtttgatggtaactaccaggttaaaggaataggaagtaatccgttggttggcgaaggtactgacgaacgtcattctaatggtgcactcggcgctgttcatgcaatatatgaggctttgtggggagaagtactggctcaaatattaccttatagtgctgtgcgggttcgggcgattttacttacagatctctatactgaaaaggcatttgagcgctccggtaggaaatcacgaagagccctgttggtacgtgagcctgttgttcgcccggcgcattttgaacgggcaccttacttccaagtaaaaccggagtattccagtctgttaattcacgatgcctgtcgggttagatctgtgatccacaagctgccaggatatctacctgtaccaccggaagaaattgatgctgaagcacgaactgatccccggatttattgcattgaggggttatgtgaactggcacgtcgtgaggcctggcaaatggcattttgtcgaacacgtttcctgagattgacaacttctccttctaatattgcaatggatggcagattaatggattttaacggactcagttgtctgtttccgggagattccccagctgattttgggtataaactaagattagctgaactggcaaaagaaccgatggtacttatgcaagggctgtctgatctctgcttgtatatcggaaaatatatgtttgaccctgacttcactcttgcagcccgtttgaaggttgaggagatatttcagaaaacttttcatgaagcatgttattactgttatctagaactgttgggtattcctggagaatttataacacaaaaagagatacctgatatattgaaagaactggttaacagttttgttgcattactcaataaatactacgagaaatcacatgcccaagatattgtcaatcaggatggttcaccattgcaaaagttggttgtgacgctaatccatcataggcataatcaaaagcaggcactgaatagtagcatcaagaatgatgtttatttcaccgttgcacaacagtgtttttcccaggccatccactggctgacgcaaggcagtaccagacgtcagataaatgcctcattactcctgaaagaaattgaacatcataccatgaaaaggctgcaacccagggaagagctgaggaaagagaatatgtgcgaaaaaattgccatcctgctggataatcatggcgatgatcccctttttttacaagaagcaatttctgatatgaaaaattttatgcttaagttttccagagatgcatttggatatcttgaaccgataagaaacacagtgtaa

SEQ ID NO: 33254 - DNA, 966 bp, Escherichia coli
gtgacggagactttttactgggtggcactccccctgactacggtaaacggtgtctctcagtttcagccggaatggatatgctgggaaccaggtgtggagtgggttcgtcagccaccagatgacgctattacagatatgtcgtatttcccattttatcggtatgccatgacgtttgaagaatttgttccggcattttcttcctggtttgccggtaaccggtgtggagtggcaatattgactggtgttcgtgctgatgaatcgctcaatcgctttatgggactggtgtctcagcgcaaactgagatatgcagatgataaaccctggaccacagcgtcacctgaagggttttattacaccttgtatccgttgtatgactggaaagcccgtgatatatggatatataacgccagaacccgagctatctacaatcccctgtatgacctgatgtaccgtgccggcgtgccgttacgcaacatgcgggtctgtgagccttttggcccggaacagcgtaagggactgtggctttaccatgttctggagccggaaacctgggccaggatgtgtgagcgggtgtcgggtgctgccagcggggcgctttatgccaatgagagcggtgcctattttgccctgcgtaagcgtatcacgaagccgcctcatcatacctggcgtagctatgcgatgttcctgctggatgtgatgccggaaagaacggcagaacattaccgtaataaaattgctgtctacctgcgctggtatcagacgcggggcttcccggatgacatcccggatgaacaggagaatgacctggggagccgggatatcccgtcctggcgacgtatctgtaagacactcataaagaatgatttctggtgccggactctctccttcagtccgaacaaaccccggcactatgaacgttatctgcagcgtatgaaagaaaggaggaaggaatgggggattctgtga

SEQ ID NO: 33255 - DNA, 1533 bp, Escherichia coli
atgtttactgaagaagaaaaaatccgcgccattgagctttatttcaaatatggtaagaagctggctcccgtcgtacgcgaactgggctacccttcgaaaagaaatctgcggcgttggatccgctcatgggaagcaggtggtggcacaaaagaatccattcgtcataagcaccgttactccgatgagcaaaaacaggttgccgttgaacattatcttaaccacggctgctgcctggcgtttaccagcagagccctgggttatccctgcactgatgtgctcgctcgctgggttaatgagctttatcccgacagacgacgtatatttaccagtaaggccaacccggttgtgccctttgaatcagaagtcaaacgtcaggctgtcatggcactctgtacacgacaagtatcagccagtgaaatcgccaggcgtattggtgtcagtcgtgcggtattgtataaatggaaagatgaaattatcggcaacagtgcttaccagactatgcgtaaacataacgaaccttccctggaggcagaacgcgatgcgttgcgggaggaagtcgcccgactgaatcaggaaatacgccgccggcagatggagctggatattctgaaaaaggcggaggaaatcataaaaaaagatccgggcatcagtatcagtcacctgaacaacagagaaaaaacaaagatcgctgatgccctgagacaaacatatcccctgacagaattactgcatgttctgggccttgcccgtagcagttatttttatcaccgggctgcactgaaagccggtgataaatacgccacgatacgtacgatgctgacagatatctttaacagtaattatcagtgttatggctatcgtcgcctgcatgcgatgctcaggcatgagggggttcggctatcagaaaaggttgtacgcagacttatggtggaggaacagcttgtcgtcagtcgtaaccgtcgtcgtcgctacagctcatattgcggagaaatcggaccggctccggataaccttatcgccagagattttaaggcggagcaacctaatcagaaatggctgacagatatcacggagttccagctccctgcaggtaaagtctggctgtcaccagtggtggactgcttcgatggaaaagttgtgagctggtctctcagtacacgccctgatgctgaactggtcaacactatgctggatagcgctgtcgaaacgttaaatgctggcgaacgaccggtgatacacagtgacagaggtgggcattatcgctggccaggctggctggaaagagtgaatgcggcaggtcttattcgctcaatgtcccgtaaaggatgttcacctgataatgccgcatgcgaaggctttttcggcagactgaaaacggaaatgtattatgggcgtaaatggtcgggcatcacgccagaaaagttcatgcagcaagtggatgcttacatcagatggtataacgagcggcgtataaaattatcgctgggtgccgtcagtcccaaaatgtaccaccaacaatgcgggctggaatga

SEQ ID NO: 33256 - DNA, 1083 bp, Escherichia coli
atgaaaaaattaacagtggcaatttctgctgtagctgcatcagtactgatggcgatgtctgctcaggcagcagagatttacaataaagacagtaacaagctggatctgtacggaaaagttaatgctaagcactacttctcttctaacgatgcagatgatggcgacacaacttatgttcgtctgggcttcaaaggcgaaactcaaatcaacgatcaactgactggtttcggtcagtgggaatatgaattcaaaggcaaccgtgctgaatctcaaggttcttccaaagataaaacccgtcttgccttcgctggcctgaaattcggtgactacggctccatcgattatggccgtaactacggtgtagcatacgatatcggtgcatggaccgacgttctgccagaattcggtggcgatacctggacccaaacagatgtgttcatgactggtcgcaccacaggtgttgcaacctatcgtaacaacgacttctttggtctggttgatggtctgaactttgctgctcagtatcagggtaaaaatgaccgcactgacgtaactgaagctaacggtgatggtttcggtttctccactacttatgagtatgaaggattcggtgtaggtgcaacctatgctaaatctgaccgcactaatgatcaggttatctacggtaacaacagcctgaatgcatctggtcaaaatgctgaagtatgggcagctggtctgaaatatgatgcgaacaacatctatctggctaccacctattctgaaacccagaacatgactgtttttggtaataaccatattgccaacaaagcacaaaacttcgaagtagttgcacaatatcagttcgacttcggtctgcgtccgtccgttgcttacctgcaatctaaaggaaaagacttgggtgcgtggggtgatcaggacctggttgaatatattgatgtaggtgcaacctattacttcaacaaaaatatgtccacttttgttgattacaaaatcaacctgattgataagagcgatttcacgaaagcatctggcgttgctaccgatgatatcgttgctgtaggattggtttaccagttctaa

SEQ ID NO: 33257 - DNA, 129 bp, Escherichia coli
atgttcgtattaaacggtctttgggtatatgatttaacagtaactctattaggcgctctggagcatcaaggtattcagcgcatccagtcgcaacacttctacgcagatcatgaggagaaaatggagtaa

SEQ ID NO: 33258 - DNA, 375 bp, Escherichia coli
gtggccttcacctccacccgtgcggcacgggaatggctgattctgaacatggcgggactggagcgtgaagaattccgggtgctgtatctgaacaaccagaatcagctgattgccggtgaaaccctcttcaccggcaccatcaaccgcacggaagttcatccccgggaggtgattaaacgcgccctgcaccacaatgccgccgccgtggtactggcacacaatcacccgtccggtgaagtcacccccagtaaggcagaccgccttatcacggaacgtctgatacaggcactggccctggtggatatccgggtgccggaccatctgatagtcggtggcagccaggttttctcctttgcggaacacggtctgctttaa

SEQ ID NO: 33259 - DNA, 357 bp, Escherichia coli; identical to SEQ ID NO: 30496

SEQ ID NO: 33260 - DNA, 354 bp, Escherichia coli
atgggattaattataaaagatgcacgaccaggaagctctaacctttatcgagtgcttgatattccaaaaggagaatcatcactacctgatccttctgagaaagaaaacgaatctaatgaaatattgaatgtttcagaaatcatcgttgaagaagaaatacaggaatcagagttccctgagcggcccgaaatttttacttggcttctttcccttgataagaagaaaccaccgcacgaagaaacagaagactacgaagcattagagcgttatcgtgatgaagtgctgacgctcaagacaccttttaacatcgtattgaatatgattaatgatgcattacaaggagaagccgcataa

SEQ ID NO: 33261 - DNA, 294 bp, Escherichia coli
gtggcgaaaggcgttgaaggggtgacctctgtcagcgacaaactgcacgttcgcgacgctaaagaaggctctgtgaagggctacgcgggtgacaccgccaccaccagtgaaatcaaagccaaactgctggcggacgatatcgtcccttcccgtcatgtgaaagttgaaaccaccgacggcgtggttcagctctccggtaccgtcgattcccaggcacagagcgaccgtgctgaaagtatcgccaaagcggtagatggtgtgaaaagcgttaaaaatgatctgaaaactaagtaa

SEQ ID NO: 33262 - DNA, 288 bp, Escherichia coli
atgactatgacaagactgaagatttcgaaaactctgctggctgtaatgttgacctctgccgtcgcgaccggctctgcctacgcggaaaacaacgcacagactaccaatgaaagcgcagggcaaaaagtcgatagctctatgaataaagtcggtaatttcatggatgacagcgccatcaccgcgaaagtgaaggcggcgctggtggatcatgacaacatcaagagcaccgatatctctgtcaaaaccgatcaaaaagtcgtgaccctgagcggtttcgttgaaagctag

SEQ ID NO: 33263 - DNA, 207 bp, Escherichia coli
atgaaaaataatataatgaaaaatggaactatcgacagccaggctctgttgaaaatggtgaatgaagcgcggagactgtgcggtgaaaaagaagtacgcaacaacgacttcattgcgcgcatcaaagatgaactcgagggggagggttacgaaattttcgtaacccccatggataagaaaaaggcggagcggatcaggtggttatag

SEQ ID NO: 33264 - DNA, 447 bp, Escherichia coli
atgaattacaatgaagagctaacctcatatcttaattatttagtgggtcttgaaaaatcccctaatttcgcagtaatgattgacggcgaatggggaagcgggaaaacatggtttgtccgtaaattaatgaatgaagaatcactaaaaggggaagttaagccattaatgatctcattatatggaataaaatccaccgaacaaattgacgaaataattttcaagcaaatgcatcccttcctttcatctaaaggcatgttgcttgctggcacactaactaaggcactaattaaaggcacacttaagattgatttaagtgattcattcgttacaagtgtagagggctccccagaactacccaacgtaagtattaaagacttttactactcaccagaaaacaccatattgatatttgatgatcttgaacgctgcgaattagattggaattaa

SEQ ID NO: 33265 - DNA, 510 bp, Escherichia coli
atgctctgcgattttgtcatcgacgtaatcctgcgtcgccatcactgtgctggcatcaatactcagctcaacggacgccacgttgctgagaataataaccatgcggcaggtctgcgcacgtccggagccttcagccagttctggcttatagctttctgccatgttggataccgcaatcagtgttccggcatcatcatacagaccaagctcacgcatccagaagccgcccacttctggcggaacaaccagttcagccacgatatagtttttattcttgttatccacactgactttattcagagcgtgacgccagacttcatgcaccagtttcgtctgaccggcatccggcaccggcaattggccattaccgtcacccacagccattgcagacaggtttacttttttcccgccgggaacagtggcggctgccagcttcgcggctccggcagtagtgataacggttttaaatttcgtgctcattgtttctcacttatccgggataaacagtaa

SEQ ID NO: 33266 - DNA, 180 bp, Escherichia coli; identical to SEQ ID NO: 18200

SEQ ID NO: 33267 - DNA, 177 bp, Escherichia coli
atgctgatgcaggaagatgatgtcgaaatatgcgagaggattttaagacagcaggaaaagttgctggaaagaatcgacgaacggagttctgaagagattgtacagaaatgcagaaccgcacagggaaaacttatctgcccatggatgctaccctatgtcacccattatcatttctga

SEQ ID NO: 33268 - DNA, 159 bp, Escherichia coli; identical to SEQ ID NO: 11309

SEQ ID NO: 33269 - DNA, 642 bp, Escherichia coli
gtgagcatatcacctctgttcaggtggccaaattcagtaaaccacttcaatgcagggctgatctgtaaaaatcctctccatacatactggcaggttgttgaatggcgtggagaactttatgagttagctgaactggctgattatgttgatttgtacgcaccaacagcggctaacgatgaacaggtatttgatatcgactttagttatgggcttgggcgcaattgttggctcttcaatctgacccgtatctggtcatatacagcaatccggcagggctggcctgatttcccgcaatggaaagaagcggtgattcagcgtgtcgaaatgtataacgtgcagttaagcgtgcctttgtctcacaaagaatgtgtatgcattggctccagcatcgccaaatggacgcatagacgcttcactgaagctggatttgagcaatatgtagctgatacccatacatcagaaattcaggctcgtagagggcgtaagaatcgctcagaagtgcaggctgctaaggggcgtaaaggtgggaaaatatctaaaagagggattgttgaggattctgcgcggagtttgaaaccgtgggtagagttagggatcagtcgggcaacctattatcgacgtagggcaaatgagaccaaataa

SEQ ID NO: 33270 - DNA, 417 bp, Escherichia coli; identical to SEQ ID NO: 27492

SEQ ID NO: 33271 - DNA, 354 bp, Escherichia coli
atgttgaaggcgggggatgtggtgtattgcgatccgccgtatgacggtacgttttccggctatcacactgacggcttcactgaagatgaccagtatcacctggcatctgttcttgaacatcggtcatcagaaggacatccggtcattgtttctaacagtgacacatccctgatccgttcgctgtatcgcaattttactcaccactacatcaaggcaaaacgcagcatcggtgtggcagctggcgagggtaaatcagcaacagaaatcattgctgtttccgggccgcgctgctgggtgggatttgattattcgcgtggcgtggatagttctgccgtgtacggagtacgtgcatga

SEQ ID NO: 33272 - DNA, 882 bp, Escherichia coli
atggataaaaataaattggttaaattttcactagtcgaaaacgccttggattctattgagctaggtttggagtatttttacgaagcaaaaaaagaattcacgccacgtaaatataaacaatgcctaattaatatgtttcatggctcggagttaatcctgaaagaaatattgagtaggataaatattatactcatattcgacaaaaactctttatttaaaatttgcaaagatcctttaagtcctactgaggatgagttgtataaattaaaatcaatagatattaatagcttatgtgatgaggttgtgaagcattatccggacgagtttaaaggaaagcttaatattgtcaagggcctagctagagaaagaaacaagatacagcattttgcaatcgaaatatcaccagagatattatcaaggttactctcaagtctttacattgatgtttttaagccatcctttaaaataattttatctgagcttgattatgttaatcaatacaattcgctgattgaaaggcagattataggtgctgaaaagacatttcttaaaatacaaggtgatactgataactatttagctctttgtccaaagtgcgagaaccattctcactttatattgtacaaaggtacgggttaccctgttgagacctattgtatttgctgtgattataaaaatacagatattgacatatcagattatctggtatgtcctgaatgcggattcccgtcattgatatttgatgaaaaaaataatgcaggagtctgcctcaacgagaagtgttactatggaatacaaggtggattcgtagaaatggaaccatgtgaaaattgtgatggctttattattgaaggttcatgcccagaatgtgatacggattga

SEQ ID NO: 33273 - DNA, 246 bp, Escherichia coli
atgtcaaatacataccagaaaagaaaggcaagtaaagagtatggtttatataatcaatgtaagaaactaaatgatgatgaattatttcgcttacttgatgatcacaattccttgaaaaggatttcatctgccagagtattacagttaagaggtgggcaagacgctgttagattggcaattgagttctgctctgataaaaattatatccgtagagatatcggagcatttatactcgggcaaatataa

SEQ ID NO: 33274 - DNA, 570 bp, Escherichia coli
atgattaaaaaaataatatttaccgtcacaccaatattttctataccgccaaaaggagctgcagcggttgaaacatggatttatcaggtcgcaaaaagactttcgattccagtaactatcgcctgtattcgaaacgaaggttacccaacctacacaaaagtaaatgatcactgtgatattcactacattggttttagtcgagtctataaacgacttttccaaaagtggactcgacttgatcctgtgccatattctcagcgtattttaaatacccaacctaaaaacactgatccgaaagactctgttattgttatccacaatagcatgaagctgtataaacagattcgtagcagaagccctcacgcgcagctagttatgcatcttcataatgctttcgagccaggtgagttagacaaaaatgcaaagataattgttcctagccagtttcttttcgatttctattcggaaaaaatgcctgatgcaaatattgctattgtgcctaatggtttttgttctgaatcgtatgaacaaaataatacggctttgttgaataaatcgaacttttgctga

SEQ ID NO: 33275 - DNA, 1560 bp, Escherichia coli
atgtttgataaatatagaaaaacactcgtagccggaactgtggcgataaccctgggtttgtcagcatcgggggtgatggctgcgggttttaaaccagcgccgcctgccgggcagcttggggcgattatcgtcgatccctacggtaatgcgcccttaaccgcgctggttgatttagacagccatgttatttctgacgtcaaagttaccgtccacgggaagggcgaaaaaggcgtagaaatcagctatcccgtgggtcaggaatcactgaaaacttacgatggtgtaccgatttttggtctttaccagaaatttgctaacaaagtgaccgttgagtggaaagaaaacggcaaggccatgaaagatgattacgtggtgcagacttccgccatcgtcaacaattacatggataaccgctccatctccgacctacagcaaaccaaagtcgttaaagtcgcaccgggttttgaagatcgcctctatctggttaatacccacacctttaccgcccaaggttccgatctccactggcatggtgagaaagataaaaatgccggtatccttgatgcgggtccggcaactggcgcactcccttttgatatcgcgccctttactttcatcgtcgataccgaaggtgaataccgctggtggctggatcaagacactttctacgatggtcgtgaccgcgatatcaacaagcgtggttatctgatgggtatccgcgaaacgccacgcggcacctttaccgctgtacaaggtcagcactggtacgagttcgacatgatggggcaggtgctcgaaccgcgcggatttgctgacgccactcatgagtccattgagacgccaaatggcacggtactgttgcgcgtaggtaagagtaactatcgtcgcgatgacggcgtacacgtcaccaccattcgtgaccatatcctcgaagtcgataaatctggtcgcgttgtagatgtatgggatctgacgaagatcctcgatccgaaacgcgatgcactgctcggcgcgctggatgcaggtgcagtttgcgttaacgttgaccttgcccatgcaggacaacaggcaaaactggaaccagatacaccgttcggcgacgctctgggtgtagggccaggccgtaactgggcgcacgttaattccatcgcttatgacgcaaaagatgactcaattattctctcttctcgtcaccagggtgttgtgaagattggtcgtgataagcaagtgaaatggatccttgcaccctctaaaggttgggaaaaaccgctggccagcaagctgctgaaaccggttgatgctaacggtaagccaattacctgtaacgaaaatggcctgtgcgaaaactcagacttcgactttacctacacccagcataccgcctggatttccagcaaagtgaaccgccccgggtttcctggagagtattttatctgtgaactcaggctgccagatcatcgtttccgatggaagcataataagctttttctgcttctgccggaggagtatggcccagcctttccagcaatcgtcgattgttataccagtccacccacgtga

SEQ ID NO: 33276 - DNA, 156 bp, Escherichia coli; identical to SEQ ID NO: 11556

SEQ ID NO: 33277 - DNA, 207 bp, Escherichia coli
atggttacagtcgctgaactgcaggcgctgcgtcaggcgcgccttgatttattaaccggtaaacgggtggtgtctgtccagaaagatggtcgcagaattgaatatacggcggcttctctggatgagcttaaccgggcgatcaatgatgcggagtcggtactggggacaacccgacgtcgccgtcgtccgctgggagtgaggttatga

SEQ ID NO: 33278 - DNA, 666 bp, Escherichia coli
atgcagcagcaccaggtggcaccgcatcacgggcagttcaggaaattcgggcagcacgtgagcagtgggaacgtgaaaacggatttatcagcgacggaaacggtctggaagctgtgggaactcatgggggaggtttattcgaaccgctggacccagaagaacggggccgcaccttcgaagctctggattgcacagattggcgcgatgactgagcagcaaatccgacaggtctgccgccagtgcatggaccgctgccgggcgggtgaaacatggcctccggacctggctgagtttgtggcgctgatttcagaaagcggggccaatccatttggcctgacggtggatgctgtgatggaggagtaccgccgctggcgtgatgagtcctggcgatatgacggaagcgacaaatatccgtggcctcagcctgtgctgtaccacatctgcctcgaaatgcgtaccagagggattgagcgccagatgacgcagggtgagttaaaacgacttgcggaacggcaactgacgaaatgggcaaagcatgttggtaacgggatgagtgttccgccagtgcgacgacaactggaaggggcgaaacacccgcaagggccaacgccaattgaacggctgaaacaggaatacgaacgccggaaggcagctggttttatttga

SEQ ID NO: 33279 - DNA, 153 bp, Escherichia coli; identical to SEQ ID NO: 11484

SEQ ID NO: 33280 - DNA, 183 bp, Escherichia coli; identical to SEQ ID NO: 11448

SEQ ID NO: 33281 - DNA, 369 bp, Escherichia coli
gtgtcagacacattctccgggacaacgcatcccgatgacaatcacgaccgcccctggtggggactgccctgcaccgtgacgccctgttttggttcccgtctggtacaggaaggcaaccggttgcattaccttgccgaccgcgccggtatcagagggcggttcagcgacgcggattcgtaccacctggaccaggcctttccgctgctgatgaaacaactggaactcatgctcaccagcggtgaactgaatccccgccatcagcataccgtcacgctgtatgcaaaagggctgacctgcgcagccgacaccctcggcagttgtggctacgtttatatggctgtttatccgacgcccgaaacgaaaaagtaa

SEQ ID NO: 33282 - DNA, 357 bp, Escherichia coli
atgaatttgcttattgataactggatccctgtacgcccgcgaaacggggggaaagtccaaatcataaatctgcaatcgctatactgcagtagagatcagtggcgattaagtttgccccgtgacgatatggaactggccgctttagcactgctggtttgcattgggcaaattatcgccccggcaaaagatgacgttgaatttcgacatcgcataatgaatccgctcactgaagatgagtttcaacaactcatcgcgccgtggatagatatgttctaccttaatcacgcagaacatccctttatgcagaccaaaggtgtcaaagcaaatgatgtgactccaatgggctttgttgaataa

SEQ ID NO: 33283 - DNA, 312 bp, Escherichia coli; identical to SEQ ID NO: 9190

SEQ ID NO: 33284 - DNA, 216 bp, Escherichia coli; identical to SEQ ID NO: 10053

SEQ ID NO: 33285 - DNA, 366 bp, Escherichia coli; identical to SEQ ID NO: 5339

SEQ ID NO: 33286 - DNA, 279 bp, Escherichia coli
gtggtggcgaaaacgtcttatgtggcagaagacggtaccgaaaaacgttatctgccggagggcacactggtcctggggaatacggcagcagagggcattcgttgctatggtgccattcaggatgcgcaggcgttgtccgaaggtgtggtggcctcttcccgttacccgaaacactggctgaccgtgggcgatccggcccgtgaattcaccatgacgcagtccgcaccgctgatggtgctgccggatccggatgagtttgtggtggtacaggtgaaataa

SEQ ID NO: 33287 - DNA, 381 bp, Escherichia coli
atgttaaaagcggcgctacgactgaaagacgcgctggtattacgctgtagcggcatgtctttgcagcatgggcacgacgaaaaaggcgaatggttgaaaatcacctattacgatgaagacggcgcggatgtgagtgagcgtttccgtctgcaaacgcccgcccagcgaactgccttcgagcagctttttatccgcccgcatacgcgcacaccgggcatcccgctgcgctggatcaccgccgccgatgtcctcgcccagcaagccttattgcgacacccggattttgtcgtcgcccgcatgaaaggccagtactggcaagtgcgtgaaaaagtgttcgattacgaaggtcgttttcgtcgggcgcacgaattacgcggttaa

SEQ ID NO: 33288 - DNA, 1272 bp, Escherichia coli
atgatttttacactccgcccatatcagcaagaagccgtggatgccacgctcaaccattttcgtcgtcataaaacccctgccgtaatcgtgctgcccaccggtgcaggtaaaagcctggtgatagcggaactggcgcggctggcgcgtggtcgcgtgctggtgttggcacacgttaaagaactggtggcacaaaaccatgaaaaatatcaggcgctggggctggaagccgatatttttgccgccgggctaaagcgcaaagagagccacggtaaagtggtatttggcagcgtgcagtcggtcgcccgtaatcttgatgcctttcagggtgaattttcgctgttgattgtcgatgaatgccaccgtattggtgacgatgaagagagccagtatcagcaaatcctcactcacctgaccaaagtgaatccccacttacgcctgctggggctgactgccacgccttttcgactgggcaaaggctggatctaccagttccattatcacggcatggtacgcggcgatgagaaagcccttttccgtgactgcatttatgagctgccgctgcgttatatgattaaacacggctatctgacgccgccagaacggctggatatgccagtagtgcaatacgatttcagccgcttgcaggcacagagtaacggactgttcagcgaagccgatctcaaccgcgagctgaaaaaacagcaacgcattacgccacacatcatcagccaaatcatggagtttgctgcaacgcgcaaaggggtgatgattttcgccgcgacggtcgaacacgcaaaagagattgtgggattactgcctgccgaagatgcagcactgattactggcgacacacccggcgctgagcgcgatgtattaattgatgattttaaagcccagcgttttcgctatctggtcaacgtcgcggtactgaccaccggatttgacgccccgcacgtcgatcttatcgccattctgcgccctaccgaatcggtgagtctttaccaacaaattgtcgggcgcggcctgcgcctggcccccggcaagactgattgcttaattcttgattatgcgggtaaccctcacgatctctacgcgccggaagttggtacaccgaaaggcaaaagtgacaacgttccggtacaggttttctgccctgcctgcggttttgccaacaccttttgggggaaaacgactgccgacgggacattgattgaacactttggtcgtcgctgtcagggatggtttgaagatgacgacggacatcgcgaatag

SEQ ID NO: 33289 - DNA, 1590 bp, Escherichia coli
atgacgcaaactctgttagcgattgaaaatttgtcagtgggttttcgccatcagcaaaccgtacgtacagtagtcaatgatgtttcactacagattgcggctggcgaaacgctggcgctggtaggtgagtctggttcaggtaagagcgttaccgcgctgtcaattttacgcctgctcccttgcccgccggttgaatatctctccggcgatattcgttttcatggcgaatcgctgcttcatgccagcgatcaaacgttgcgcggtgtacgcggtaataagatcgccatgatttttcaggagccgatggtgtcgttaaatccattacataccctggaaaaacagctttatgaagtgctttcactccaccgcgggatgcgtcgggaagcggctcgtggcgaaattcttaactgccttgatcgcgtcggtatccgccaggcggcaaaacggctgacagattatccgcatcagctctccggcggcgaacgccagcgggtgatgattgcgatggcgctgttaacgcgaccggaattattaattgccgatgaaccaaccaccgcgctggacgtctctgtccaggcgcagattttacagctgttgcgcgaactgcaaggcgagctgaatatgggcatgctgtttattactcataacctcagcattgtcagaaaactggcccaccgcgtggcggtaatgcaaaacggtcgctgtgtcgagcaaaataacgctgctacgctatttgcctcacccactcatccttacacacaaaagctactcaacagtgaaccatctggcgacccggtgccattgccagaacctgcctcaacgttgctagatgttgaacagcttcaggttgccttccccatccgcaaagggattttgaagcgcattgtggatcataatgtggtggtgaaaaacatcagttttacgctacgggcgggtgaaacactgggtttagtgggcgagtccggttccgggaaaagcacgacgggactggcgctgctgcgactgattaattctcatggcagcatcgtctttgacggtcagccactgcaaaatttaaatcgccgccagctgttacctattcgtcatcgcattcaggtggtatttcaggatccaaactcctcactcaacccacgactcaacgttttgcaaattattgaggaaggcttacgggttcaccagccgacgctttctgccgcacaacgcgaacaacaagtgatagccgtgatgcatgaagtgggattagatcctgaaacacgccaccgttatccggcggagttctctggtggtcagcggcaacgtattgcgattgccagggcgttaattcttaagccctcgctgatcattcttgatgaaccaacatcatcactcgacaaaacggtgcaggcgcaaatattgacgctattgaaatcattgcaacaaaagcatcaactggcctatttgtttatcagccacgatttgcacgttgtccgcgcgttatgtcatcaggttatcgtactgcgacaaggggaagtagtggaacaaggaccgtgcgcgcgcgtgtttgccgcaccgcagcaggagtatacgcgtcagctactggcgttgagctga

SEQ ID NO: 33290 - DNA, 687 bp, Escherichia coli
atggcatggcggcacaatccaaactaccgtaatggtgtgacctatcatgatcaggatatggcaaagcggtttcatcaaaccgatgtcaacggcggaatgagcgccacgcagttacctgctccaacacgcgacagccagcgtcaggcggcagcaagtcagtttcagcaacgaacacacaccgcccccgtcattacgcgagatacccaacgtcaggcagcggcacagcggtttaatgaagctgaacacaatgggagctatgacgacttccgcgacttcagccgtcgccagccactgacccagcaacaaaaggacgccgctcgtcagcgttatcagtcggcttctcctgagcagcgccaggcggctcgcgagaaaatgcagactaacccacagaaccagcagcgaagagaggcggcacgtcagcgtattcagtccgcgtcgcctgagcagcgccaggcggttcgcgagaaaatgcagactaacccgcagaatcaacagcaaagagatgcagcacgtcagcgtatccagtctgcctcgcctgagcagcgtcaggtttttcgagagaaagttcaggagagccgcccgcagcgtctaaacgacagtaaccatactgcccgattgaataatgagcaacggtcagcggtacgcgaacggttgtctgagcgtggagcaaggagactggaaaggtaa

SEQ ID NO: 33291 - DNA, 1539 bp, Escherichia coli
atggcaagagctgtacaccgtagtgggttagtggcgctgggcattgcgacagcgttgatggcatcttgtgcattcgctgccaaaaatgtggtggtggcagtaggatcgaacttcaccacgctcgatccgtatgacgcaaatgacacgttatctcaggccgtagcgaaatcgttttaccaggggctgttcggtctggataaagagatgaaactgaaaaacgtgctggcggagagttataccgtttccgatgacggccttacttacaccgtgaaattgcgggaaggcattaaattccaggatggcaccgatttcaacgcagcggcggtgaaagcgaatctggaccgggccagcgatccggcgaatcatcttaaacgctataacctgtataagaatattgccaaaacggaagcgatcgatccgacaacggtaaagattactctcaaacagccattctcagcgtttattaatattcttgcccatccggcgaccgcgatgatttcaccggcagcgctggaaaaatatggcaaggagattggttttcatccggtgggaaccggaccgtatgaactggatacctggaatcagaccgattttgtgaaggtgaaaaaattcgtgggttactggcagccaggattgcccaaactggacagcataacctggcgtccggtggcggataacaacacccgcgcggcaatgctgcaaaccggtgaagcgcagtttgctttccccattccctacgagcaggccgcactgctggagaaaaacaaaaatatcgagttgatggccagtccgtcaattatgcagcgttatatcagtatgaacgtgacgcaaaagccgttcgataacccgaaggtccgtgaggcgctgaattacgccattaaccgcccggcgctggtgaaagtggccttcgcgggctatgcaacgccagctactggtgtggtaccgccgagtatcgcctacgcgcaaagttataaaccgtggccttacgatccagtgaaagcgcgcgaattactgaaaaaggcgggatatcccaacggtttcagtaccacgctgtggtcgtcacataaccacagcaccgcgcagaaagtgctgcaatttacccagcagcagttagcgcaggtcgggattaaagcccaggtgactgcgatggatgccggacagcgggcggcagaagttgaaggtaaagggcaaaaagagagcggcgtgcggatgttctacactggctggtcggcttcaaccggcgaagcagactgggctctatcgccgctgtttgcctcgcagaactggccaccgacgctgtttaataccgcgttttacagcaataaacaggtggatgacttcctggctcaggcactgaaaactaatgatccggcggaaaagacccgcttgtataaggcggcgcaggatatcatctggcaagagtcgccgtggatcccgctggtggtagaaaaactggtgtcggcacacagtaaaaacctgaccggtttttggatcatgccagacaccggcttcagctttgaagatgcggatttgcaataa

SEQ ID NO: 33292 - DNA, 165 bp, Escherichia coli
atgctgcaaatcccacagaattatattcatacgcgctcaacgcctttctggaataaacaaactgcgcctgccggaatattcgaacgtcatcttgataaaggaacgcgcccgggggtttaccccataagcgctaacttaagggttgtggtattacgcctgatatga

SEQ ID NO: 33293 - DNA, 480 bp, Escherichia coli; identical to SEQ ID NO: 3493

SEQ ID NO: 33294 - DNA, 300 bp, Escherichia coli
atgacagtagtcattacatatctggatgacgataacgccagaaatcgccgaagagcacgcagacaggctcaacgtgaacagacaatgcaagagcagcgactggcacgaaaaattgcgctaaagctctctggttgcgtcagagcagataaagcagcatcgctaggaagcctttgctgcaagaagaaagaagaagtcgagcgtaaacagaaccgtatttactaccgcaagccacgcagtgaaatgggtgtgacttgtgttggtcgccagaaaattaaattaggcagcaaaccacttatttga

SEQ ID NO: 33295 - DNA, 465 bp, Escherichia coli; identical to SEQ ID NO: 15842

SEQ ID NO: 33296 - DNA, 1194 bp, Escherichia coli; identical to SEQ ID NO: 5190

SEQ ID NO: 33297 - DNA, 387 bp, Escherichia coli
atggctttaatgccagaaacggaaaggttaatagtggaatggctcagtttatctagtaccccattaaatctaaagtatcctgaactaaaatataatcgtttgtgtgtcggtaaagtatttgatggagtattgagtccagctcaaccactgataagaatatggacaggggaattaaatatttggttagataaagtcacagtctgccaatacgaaaacgctccaacgctgaaactgatatgtcaattcattttcgggtacattggcactattaacagaattatttatatcattctgattgagcgtatgaacattcctttgcttttcgatatgttgagtaaacatggttttgttatcagcaaaccttctttcgttagtaatatctattaa

SEQ ID NO: 33298 - DNA, 402 bp, Escherichia coli
atgtacgcaaaatcctttatcgctcttgatagcaacggacgtctgacgggcgcccgtactgcacaggccgcaccttatgctcactacacctgccacttgtgtggcagtgcactcagataccatccgcaatacgacactgaacttccctggtttgaacacactgacgacaggctgacagagcacggtcaacagtgcccttatgtcaggccggagcgcagagaaatacagttgattaaacgtctgcagcaattcgtaccggatgccttacccgtggtgcgtaaagccagctggcactgcagacaatgtcaccacgattattatggggagcagtactgcacacactgccagaccggaggattcagtattccccggacaactcaggaggaaatatgcgaattctga

SEQ ID NO: 33299 - DNA, 207 bp, Escherichia coli
atgactgttagctacaagattacttatgagcatagagacggtgatcaaattagaatggaagaggttttattccattcagagcatgaaccaacaaaagatgaaattcatgatgcagtaagaaaagatactgtgagatttaattctccatctaatggagtaacggctgtttcagggtttaaagtgatttcggttgtccctgttccatga

SEQ ID NO: 33300 - DNA, 168 bp, Escherichia coli
atgcatttatcttcaaaacatcttagcactatccgctttctcgttattgcttcattcgttgtagctatcagttaccgactttttgttgcctccaatgacgaaatgaatcctcttgctattattgcccattcaatagcgacaatagttagacggtttgaaaaaccgtaa

SEQ ID NO: 33301 - DNA, 666 bp, Escherichia coli
ttgaaaggttcgcctccgggctacgttggttacggtcagggcggcgttctgaccgaagccgttcgcaaacgcccttacagcgtggtgctgctcgacgaagtggaaaaggcgcattgcgacgtgatgaacctgttctatcaggtgttcgaccggggctttatgcgcgacggcgaagggcgggaaatcgacttccgtaacaccgtgattctgatgaccgccaatctgggcagcgaccccatcatgcagctgctggaggaaaaaccggacgccacggacgcagacctgcatgaactgctgtaccccctgctgcgagaccattttcagcctgcactgatggcgcgctttcagacggtgatttaccgcccgctgggacaggaagcgatgcgtaccattgtggaaatgaagctggcgcaggttgtccgccgtcttcaccagcactacggactggaaacggaaatcaacgacagcctgtacgacgccctgaccgccgcctgcctgctgccggacaccggggcgcgcaatatcgacagcctgctgaaccagcaaatcctgccggtcttaagccagcagttgctggcacagcaggccgcgcaccgtaaaccagcccaactacggcttggctgggatgaggaggacgggattgtgctggaatttgatgagaaataa

SEQ ID NO: 33302 - DNA, 150 bp, Escherichia coli
atgaccggagcattgcgccgggatgcgtatgttctccccggacagacagtctcagttcgtagaatctataaattactgctactgatgctgccggggaaaggcgtaacgaaaaaacagcctccgttaccggacagcaagaaggctgaatga

SEQ ID NO: 33303 - DNA, 1215 bp, Escherichia coli
atgaaaattattgctgtggatgtttttgttacttgtcccgggcgtaatttcgttacgcttaaaataaccactgaaagcggactttgtggattaggagatgccacgttaaatggtcgcgaattgtcggtcgcttcttatctgaaagatcatctttgtcctcaattaattggccgcgatgccagccgtatcgaagatatctggcaattcttttataaaggagcttactggcgacgtggtcccgtcacgatgtcggccatttctgccattgatatggcgttgtgggatatcaaagctaaagcggcaaatatgccattgtatcaactgcttggtggcgcttctcgtgaaggcgtgatggtttattgccacaccaccgggcggacgattgatgaagtccttgaagactatgcaaagcaccagcagatgggctttaaggcgattcgtgtgcagtgtggtgtaccgggtatgcaaaccacctatggtctggcgaagggcaaaggactggcgtatgaaccagcaaccaaaggcctgtggccagaagagcagttgtggtcttcagaaaagtatctcgattttacgccgaagttatttgaagcggtgcgtaataagttcggttttaacgaacatctgttgcatgacatgcaccatcgcctgacccccatcgaagcggcgcgctttgggaggagcattgaggattaccgcctgttctggatggaagatccgacgcctgccgagaaccaggaatgttttcgtctgattcgccagcataccgtgacgccgattgcggtcggtgaagtgtttaacagtatctgggactgcaaacagttaatcgaagagcagctgattgactatattcgcacgacgattacccatgcaggcggcattaccgggatgcgacggattgccgattttgcatcgctttatcaggtacgtaccggttcgcatggcccttcagatttatcgcctgtttgtcatgcggcggcgctgcattttgacctctgggtgccaaactttggcgttcaggagtacatgggctattccgaacaaatgcttgaagtcttcccgcacagctggcgcttcgatgaaggttatatgcacccaggcgatgaaccggggctgggtatttctttcgatgagaaactggcggcgaaatatccgtatgacccggcgtatctccccgtcgcacgactggaagatggcacattgtggaactggtaa

SEQ ID NO: 33304 - DNA, 150 bp, Escherichia coli
atgaaaaaggcaaaggctatttttctttttatattgatagtttcaggctttcttctggtcgcatgtcaggcaaactatatccgggatgttcagggtggaacggtggcaccatcgtcctcctctgaactgacggggatcgcggttcagtag

SEQ ID NO: 33305 - DNA, 246 bp, Escherichia coli
atgacgcacctgaaactgactcccgctgaagaaaagcgcctggcggacgcctttgtcgctcaggcactggccatgggcctgaaagggaacaaaacgctgccaaaggcggtaaaacaacaggtgcgggaaagggtgcttcgtgccattcaggacgaacgtgaagccaggcgggcgcaggaaatgcgtcgggagaaatacgaggcggcggaaaccaccttcacctggcagccgcagcgccgccggtga

SEQ ID NO: 33306 - DNA, 567 bp, Escherichia coli
atggacaaaaggacaacgttagtagctctggtttctatcatctttttcacttctggatgtgatgaccagaaaaaagggaatggcaacgctgaatcgacacaaatcactaaaaacgatataacaactcaacttaagttagataaaacgcaacaacctgacgatatagaaaagaaaataaaagaaatccaggccaactccacccctgaaaaaataaaaaaattcaatgaattaaaagatgacgaccctaaaatcctacgagagtcggttgtttcagaaattaagaaaaaactaccactattggttgacgaagccacattaatgacagatgtatcaactgacggaggtacattctcatacaaatatgtaaccaaagggatttcagccagcacgatggaaagtgatgtgtggaaagatgccatgcaaaaaaacataaaaaatagctactgctctgacgatgccagactaaaagtattcagagagctatttcctgaaggtgtcatttacaactactacttaagtgacaaattaatctacacatacaaggcacttccatcgatttgttcctaa

SEQ ID NO: 33307 - DNA, 264 bp, Escherichia coli
atggctgcatataccagcgaaacagcgaagtttttacaaagcgtcagtagcgatcaaacatggtggaagtcacgatataatccaggagacagcgttccccattctggcatttatcgatgtacagtctgcggaaaagagatcaccagtaacggcaacgacccgttcccgccgcaaaaccaccatcagcacagtcagcaacaagcaatcaaatggcaactgattgtcagaacggacactaaaggtgaccgtttcggaatcaaatga

SEQ ID NO: 33308 - DNA, 378 bp, Escherichia coli
atggcgtgggtgacggtgagacaggcgacggaactgacggggaaagcccggagttctctgtatcgtgatatggcgaaaggccgcgtatcataccgtacggaagctgatggtggtcgggtggtggataccagcgagcttatccgggtgtacggtgaattaagacagggtgagactcaggagcgggacgggttgagactgccgggtgagactgaagcatcggtgtctgaggcactgatttcggagattaaagcgctgcgggaagaggtagccggactgcggcaggaaatgcaggccatgagactgctggaacacaaaccggagacagcagatacacatcccgaaacgtcgcgccggtggtggcactggggaaaacgctga

SEQ ID NO: 33309 - DNA, 582 bp, Escherichia coli
gtgaggcaaaacagcagggccgcgccggtggcgtttttccataggctccgccctcctgccagagttcacataaacagacgcttttccggtgcatctgtgggagccgtgaggctcaaccatgaatctgacagtacgggcgaaacccgacaggacttaaagatccccaccgtttccggcgggtcgctccctcttgcgctctcctgttccgaccctgccgtttaccggatacctgttccgcctttctcccttacgggaagtgtggcgctttctcatagctcacacactggtatctcggctcggtgtaggtcgttcgctccaagctgggctgtaagcaagaactccccgttcagcccgactgctgcgccttatccggtaactgttcacttgagtccaacccggaaaagcacggtaaaacgccactggcagcagccattggtaactgggagttcgcagaggatttgtttagctaaacacgcggttgctcttgaagtgtgcgccaaagtccggctacactggaaggacagatttggttgctgtgctctgcgaaagccagttaccacggttaagcagttccccaactga

SEQ ID NO: 33310 - DNA, 1554 bp, Escherichia coli
atgatagttaagtttcatgccaggggaaaaggtggtggcagcggtccggttgattacctgctgggaagggagcgtaaccgggaaggggcaacggtgcttcagggtaatccggaagaagtccgggaactcatcgatgccacgccatttgcgaagaaatacacgtcaggtgttctgtcgttcgcggagaaggagctgccgccgggagggcgtgaaaaagtgatggcgagctttgagcgtgtactgatgcccggtctcgaaaaaaatcagtacagcatcctgtgggtggagcaccaggacaaggggcggcttgagctgaattttgtcattccgaacatggagctacagaccggaaaacgtctccagccgtactacgaccgggcagacaggccgagaattgatgcctggcagacgctggtgaatcaccattacgggctgcatgaccccaacgccccggagaaccgccggatactgactctccctgataacctgccggaaacgaaacaggcgcttgctgagagcgtcacacgcgggatagacgctctttatcatgtcggggagataaaaggccgtcaggatgtgattcaggcgctcacagaggcggggcttgaagtggtcagggtgacgcgaagcagtatcagcattgcagatccgaacggtgggaagaatatcagactgaaaggagcattttatgagcaatcttttgcagacgggcgcggagttcgagaaaaagctgaaagagagagccgaatctacagagaaaatgctgaacaacgagttcaggaggctcggcgaatctgtaagcgaggctgtgacatcaaacgagacgaaaatcagagacgctatagccctgttcacagcctcgacagaggaatcgctggaaaaacaccgggaaggggtgaaagaggcgatgatgcagcacaggagggacgtgttaaagctggcagggaatacgggcatgatgttactggggatagtctttctcctgtttaccgcgagtggcgggacgctctggtatctcggcgggatgatacaggcgaacctggaagatatcaggaagcaggaagagacattgcagaaactgaacgcgaagacatggggcgtggagtttgtgcaggacgggaacaggaaatttctggtccttccttacgggaagtcagcagaggtgatttcctttcaggggaaggaatgggtacatctgaaggagtgacacagagtgacagagctggaaacacatttgctgaacgccttagagcagctgcaacaggactatatgcagcggctgagcgaatgggagagcgtcttcgtggaattgcagaagatgttttcgcttacgcaacgggacaacgcgatgctgaacgagcgggtcatgcagttgagtcagcaggtgaagcacttgagcgagcagacagaacgcttgagccagttatacagcgagaactggagataagagaggaacggctgatacaggaacgcgaacatgcgttatccctggaacgggagcgtcagccggaaatacaggaacgcacgctggatggcccttcgctgggatggtga

SEQ ID NO: 33311 - DNA, 369 bp, Escherichia coli; identical to SEQ ID NO: 29730

SEQ ID NO: 33312 - DNA, 663 bp, Escherichia coli
atgaaacaggattttcgctgcggtttctggctgatggagaaacctgaaatcgcaatgaaagccatcacccggaatctcgatcgcgaactctggcgtgacctgatgcaacgttccgggatgctttccttaatggatgcacaggcccgtgagacatggtaccggtcactggagtacgataatgtcccggaaatcagtgaagcaaacattctgaacacatttaaacaactgcaccagaataaggatgaggtgtttgagcgaggggtgatcaacgtcttcaggggactgaactggaattacaaaaccaatttaccctgcaaatttggcagtaaaattatcgtcaacaatctggtgagatgggaccggtggggatttcatattgtcaccggacagcaggctgaccgggttgctgacctggaaaggatgctgcacctgttcagcggctggcccatccccgacaaccgggaaaatatcatcatccgtctggatgaccacattcagtccgctcagggtcaggagtgctatgaatatgaagatgagatgttcagcatcagatactttaagaagggctccgcgcacatcacgttcagaaaaccggaactgattgatcggctaaatgacatcattgcgaagtattatccagaaataatcccatacaatatctaa

SEQ ID NO: 33313 - DNA, 189 bp, Escherichia coli; identical to SEQ ID NO: 11611

SEQ ID NO: 33314 - DNA, 3045 bp, Escherichia coli; identical to SEQ ID NO: 14135

SEQ ID NO: 33315 - DNA, 732 bp, Escherichia coli
atgccagcaccggcactgtacgatataaacatccggtaccggggatacgaatggaatgacgaatacgccagaaaagggataacaaccttcctcataatggtgaaatcattcgctatcggttacacggtacgcgatgtcgccaaaggcagctggatcgacgaatccacggtcacgctaccgaaagcgccgccgcttaacaccctgcctcgggcgaccaaagtgccggagccgcagccgccgcaggaagattacacctttgaaggttaccgcaacgccgacggcagcgtgggcaccaaaaacctgttgggtattaccaccagcgtgcactgcatggcagacgttgaggactacgtggttaaaattatcgaacgcgacctgctgccgaaatacctgagcatcgacggcgtggtcgacttgaaccacctctacggctgtggcgtagcgattaatgtaccggccgccgtggtgccaattcgcaccatccataatattgcgctgaacccaaacttcggtggcgaagtgatggtggtgggcatgcagtgcggtggcagcgacgcgttctccggcgttaccactaaccccgctgtcggctacgactctgacctgctggtgcgctgcggcgcaacggtgatgttctccgaagtcactgaagtacgcgacgccattcatctgttaacgccacgcgccatcaatgaagaagtgggcaggcgtctgctcgaagagatggcctga

SEQ ID NO: 33316 - DNA, 294 bp, Escherichia coli; identical to SEQ ID NO: 7755

SEQ ID NO: 33317 - DNA, 369 bp, Escherichia coli
gtgtcagacactctccccgggacaacgcatcccgacgataacaacgaccgcccctggtgggggctaccctgcaccgtgacgccctgttttggggcacgtctggtgcaggagggtaaccggttgcattaccttgcagaccgcgccggtatcagaggccggttcagcgacgcggatgcgtaccatctggaccaggcctttccgctgctgatgaaacaactggaactcatgctcaccagcggtgaactgaatccccgccatcagcataccgtcacgctgtatgcaaaaggtctgacctgcaaagctgacactctcggtagcggtggttacgtttatctggctgtttatccgacgcccgaaacgaaaaagtaa

SEQ ID NO: 33318 - DNA, 330 bp, Escherichia coli
atgaagaccttccgctggaaagtgaaacccggtatggatgcggcttcggctccttccgtcagggaagtgcgctttggtgatggttactcccagcgctcgcctgccgggctgaatgccgacctgaaaacgtacagcgtgacgctctctgtctcacgcgaggaggccacggcgctggagtcgtttctggctgaacacgggggctggaaggcctttctgtggacgccgccttatggctaccggcagataaaggtgacctgcgcaaagtggacagcgcgggtcagcatgcttcgtgttgagttcagcgcagagtttaaacaggtggtgaactga

SEQ ID NO: 33319 - DNA, 354 bp, Escherichia coli; identical to SEQ ID NO: 17830

SEQ ID NO: 33320 - DNA, 498 bp, Escherichia coli
atgattgcgtataatagtcccccccctttaggcagtagtgtatttattgaggtcacgaaaaccgtctccctgtgtctaggtggactcggtgtcatactgcccctgtatatcaatgctacaaacgcagtggaaagcaggatggcagaaaaaattgagaatacgtttcgcctgattgaaaaatgggatgaccctcatcttttctcggccaggaaattgactcgggaaataaaagaagctaggtcatcattaagtgataatgatctagtcaaaagaatcaaagcagatgaggagctcaaacagtcggttattctggtctcaaactattttgaacaggtccgtttctccgttgtaaataaccgtattgatgtcgcccagttcaggttaattctgggaccagtaatcacggacattatcacgcgttttgaaccttattttaaaacgttcggacaagaatatatggatgacttgaggcaactagtaaccctgatgaaggggtga

SEQ ID NO: 33321 - DNA, 249 bp, Escherichia coli
atgcgtattgagatctgcatagccaaagagaaaatgactaaaatgccaaacggtgctgtggatgcgttaaaggaagaattaactcgacgcatcagtaagcgttatgacgatgtagaggtgatcgtaaaagccaccagcaacgatggcctttctgttacgcgcaccaccgataaagattcagctaaaactgttgttcaggaaactctgaaagatacttgggagtctgctgacgagtggtttgttcattaa

SEQ ID NO: 33322 - DNA, 216 bp, Escherichia coli; identical to SEQ ID NO: 5262

SEQ ID NO: 33323 - DNA, 213 bp, Escherichia coli
atggtgctggggaacactcaggcacgcggtctgcgcacctatggatgcattcaggatgcggacgcacagcgcgaaggtattaacgcctctgcccgctacccgaaaaactgggtgaccaccggcgatccggcgcgtgagttcaccatgattcagtcagcaccgctgatgctgctggctgaccctgatgcgttcgtgtccgtacaactggcgtaa

SEQ ID NO: 33324 - DNA, 561 bp, Escherichia coli
gtggaagattatgatcgcattcgcaatgacattgaagctgtgctgccagagtttgccgactataaccagcgcatccgtcatcctggtggttttcacctgataaacgcagcagctgaaaggcgctggatgacgtcgtcaggtaaggctaatttcattaccagtaaagggctgttagaagatccctcttcagcgtttaacagtaagctggtcatggcgacagtacgcagtcacgatcagtacaacacgacgatttatggtatggatgatcgctatcgaggggtattcggtcaacgagatgtggtctttatgagtgctaaacaagctaaaatttgccgtgtaaaaaacggcgaaagagttaatcttattgcactcacgccagacggtaaacgtagctcacgccgcatggatagattaaaagtggtcatttaccctatggctgaccgctcactggtgacctattttccagaatcgaatcacatgctaacacttgataaccacgatccattaagtggaattcctggctataaaagtattccggttgaattagaaccatcaaattaa

SEQ ID NO: 33325 - DNA, 1659 bp, Escherichia coli
atgttgatagcaaagtatctctgtctgctgaagcccttttggctgcgtaagaataataaaacttcagtgttgttaatcattattatcctcgccatgatccttggcgtggttaaaattcaggtctggttaaacgactggaataatgattttttcaatgcgctaagccagaaagaaactgataagctttggcagcttgtcctttggttccctgccctgctggggatctttgtattaatatccgtaaacaaaacatggttaattaaactactgactattcgctggcgcgaatggttaacagattactaccttaatcgctggtttgcagataaaaactactacttcacgcagatctacggcgagcataaaaatacagataaccctgaccaacgtatcgctgaagacattctcttactgatcagcaaaacgctcagcctttcatttggcttcatccagtcacttagcatgctgatcacctttaccgttattctttggcaaagcgcgggtacgctctcattcactgttggtggaactgaatggagtatccaggggtatatggtctataccgtcgtgctcattgtgatcggtggaactttatttacccataaggttggtaaacgtattcgtccacttaatgtggaaaaacaacgtagcgaagcgacatttcgaactaatcttgtgcagcataataagcaggcagaactgattgcgctaagcaatgctgagtctctacaacgccaggagttgagcgaaaattttcataccattaaagagaactggcatcgtttaatgaatcgtcagcggtggcttgattactggcagaatatttattcgcgctcgcttagcgttcttccctactttctgttattgccgcagtttattagcggacagatcaatctgggcggactgatgaaatcgcgccaggcatttatgctggtatcgaacaatttaagctggtttatttataaatatgatgaacttgctgaactggctgcggttatcgatcgcttgtatgagttccatcaactcaccgaacagcgccctacgaataagcctaaaaattgtcaacatgcggtacaagtggctgacgcgagtattcgtactcctgataataagatcatattagagaacctgaactttcatgtttcgccaggcaaatggctattgctgaaaggttactctggtgcgggaaaaaccacactgcttaaaacattatcccactgctggccgtggtttaaaggtgatatttcttctcctgctgacagttggtatgtgtcacaaacaccgttaatcaaaaccggcttactgaaagagattatttgtaaagcacttcccctgtccgtagacgataaatcgttgagcgaagtactgcatcaggttggtctggggaaattggctgcgcgtattcatgatcacgatcgctggggagatattctttccagcggcgaaaaacaacgtatcgccctggctcgattaattttacgacgtccgaaatggatatttcttgacgaaactacctctcatcttgaggaacaagaggcaatccgcttactgcgtttagtgcgagaaaaactccccacaagcggcgtcattatggttacacatcaacccggtgtctggaacctggtcgatgatatttgtgacattagcgcggttatataa

SEQ ID NO: 33326 - DNA, 1173 bp, Escherichia coli; identical to SEQ ID NO: 9028

SEQ ID NO: 33327 - DNA, 1122 bp, Escherichia coli
gtggaagtatataaaacaatatattcaacaactatatctgcatggctagaaaatcgttttggtataactaaagatcaatattctgttgaagtattacaaaaatatagtctaaaggattacgatcatcctattggcggtaagttcagtaaggacaaactttctcaattagtttgtgagctttctgatataattttggaaaatgctaagcaagaaagaataaacttaattgattatctttcttcccacggcatggatactaatgagaatattgcggtagttgatatcggttatgctgcatcaatgcaatctgcatatcaaaaaatacttaataaagaaaatattcacggtatatattatgcaacatttaatagtgcattgaaaaatgtttcagatagttctctcttgcatgggtatagtgtgcatcttgaaaatccatcatctccaaaatatggaatatgtagccatagattcttctatgaaacaattttttgtgatgcagctaataatggatttgaaatcgttaaaagtaaatttgatgattccacaagacaaaccgttgtaaaagaaatacattctggtgttttggctttggctcacgatctcgcagaaaattattcaagcagtgtgttaaatggatatattgatcctagtttaggaagttttcttttcgattcattcttaaaaacaccgaataaaaatgatgcagaaatgtttaagggggttctgtttgaagatgcaactggtcctaacattcgtcgatatctatttgtcccagatgaatataaaaatgataaaaaaaccattgataatatgatttggaaagaagctgcaagtctatttataaatccaacaccgtctcaagatgttaaaataaagtctgaacccccagttaagaatataaataatacaataagtactaaacaaaataaaaatgataaggtaaaagccaaaccaagtgaatgcaagcaaaatagagttgctgtgattgaacgagtaatattcgaattgtttttaaaaggtaagaaaaaaaataaatatctcagggaccggagtatgtttttcaaagactctaataataagtttatttcgcattattataaaataatagggagtaagttctaa

SEQ ID NO: 33328 - DNA, 132 bp, Escherichia coli; identical to SEQ ID NO: 6261

SEQ ID NO: 33329 - DNA, 285 bp, Escherichia coli
atggtcagatgcgtccatcatattgtcgatgaactgttgcatcggcggttgcttaataccttcgaggttgtaaccgacgctcatattaaagatgaacgatttactggaatcagaaggctggaagatcgcttcgagaaggtgcagggcaaaccaggctttgaggtattcatcccaggctttaagcagggtaaattcggtagaccattcggtgttaaagcactcgtcttcggcatcgatacagggcttttccagctccaggcggtcaagaatttggacggtttttag

SEQ ID NO: 33330 - DNA, 423 bp, Escherichia coli; identical to SEQ ID NO: 7160

SEQ ID NO: 33331 - DNA, 303 bp, Escherichia coli; identical to SEQ ID NO: 7218

SEQ ID NO: 33332 - DNA, 435 bp, Escherichia coli; identical to SEQ ID NO: 23051

SEQ ID NO: 33333 - DNA, 708 bp, Escherichia coli
atgcgaaaaaaaatagagatgagcttgataaactctcctgcaaatggtgttgtgattaaaagaataatttctgatggattgaaagaaatagtttctctaaaagaacagatccttcttgaaaccaccgcaaaaattcagagtattgaggaaaagagagaagaaaaaattattcaaggttattatgatggctatgcgaaaggcattattgatgtgatggataattttatacccttgataagtttgctgagctcagaattagaaaaaaacagagtaaacatgataaacgatctgaagagcatattgttaaaatcttcagaggaagttgaagtttttatcaaaatttttgaaagttgggtaacaaaattaccgtcaatatcaggccctttaaatctctatatacctaccagtttcaaagataagtctattgaagtagagtcatattttgtcgacaagtcaatatggaatgtccatatttcatatcatgatgacaaacgttttattttttttacagatcaatttattgctgaatttagtccgcaggaatttgtggataattgtgagcaatatttaattagcaatcactgtttttcccctgacaaggttaatgaaatctgtgaacatgccagacattatttagttgaaagaatgtgtgaaatagattctttggctatgaataattctgatttgacgaacccagaggacttatag

SEQ ID NO: 33334 - DNA, 711 bp, Escherichia coli
ttgtcgatttatgaaggtaaactgaaactggcattaacagctatgcgagaaaataaagaatctgaatttatattttatgatgatattaaggctcatgaacttgatcaaaaggtttgggttgctggaaatataaaaaaagcaattgtgagtagtgagttttatttagtatatcaaccgattgttgatatggatagtaataatgttgttggcgccgaagcgttatgccgctggttgtccgttgaaaatggtgcaataccaccatcagttttcgtgcctgttgctgaagaaattggcttaattaaagaactgggtgattttgttcttgaaacggctattggtgaatttggttcatttagtcgtgagtatgaaattacgaaagaatttcttctgcatatcaatgtttcaccttggcagttaaatgaatttgatttccatacccgcgttttgaatttaattaataaatttggcgtaaatacggaacaaatctgtctggagatcaccgagtcagcaatgaaagatataaatgatagtttttataataatataaaatttttaagaagaaatggcattaaaatttcccttgatgattttggcagtgggttagctgacttgaaaaaattatacaaagttagacctgatagcatcaaaattgattcagaatttacttctggtattttcgatgaaactaacagggttgtgtgttttatatag

SEQ ID NO: 33335 - DNA, 150 bp, Escherichia coli; identical to SEQ ID NO: 22230

SEQ ID NO: 33336 - DNA, 864 bp, Escherichia coli; identical to SEQ ID NO: 7260

SEQ ID NO: 33337 - DNA, 576 bp, Escherichia coli
  misc_feature (544)..(553): n is a, c, g, or t
atgtcatcaattccttttaaaggacaatcatggtgcgacagaagtattttttgtgatgatttcatttcactagttaaaggcatagaacttatattagagcactcgacttcagataatataaaaatttcagttaaaagatctttttttaatctattattaacgtatattaaatctggtttaacaaatcattcattacttgatattatgagtaatgatgaaaaaaataaatttaaacattacttaaattatgcgttaaatttaattggtgatgattgcatctcttcttttaatatttcatgcgcggaaacaattaaaattggttgtttaaaaaaactaggcattgaaaagcaaagtaaatattgtgacttgttacaattagataaagataagaatgaagttttattacgatattattcttcatgtgaggtctcggcagaaattagaatagacaataaagaagttattcctatagaatttaagactatatgtcataatttattttcagacgtattcttttatgagcaaagaatgtggttatggttgnnnnnnnnnnataaaaataaaaatatcaaatag

SEQ ID NO: 33338 - DNA, 327 bp, Escherichia coli; identical to SEQ ID NO: 21877

SEQ ID NO: 33339 - DNA, 357 bp, Escherichia coli
atgggggtaatgataccgatgaaacgcgagaggatgctcacaatacgggttactgatgatgaacatgcccggttacttgaacgctgtgagggtaaacaactggcggtatggatgcggcgggtctgcctgggtgagccggttgcccgttccgggaggctgccgacactggcaccgccgttactgcgtcagctggccgccatcgggaataaccttaaccagacagcgaggaaggtgaacagcgggcagtggtcttccggtgaccgggttcaggtggtggccgcactgatggccatcggggatgagctgcgccggctgcgtctggccgtcagggaacaggggacgcgggatgatagttaa

SEQ ID NO: 33340 - DNA, 210 bp, Escherichia coli; identical to SEQ ID NO: 5116

SEQ ID NO: 33341 - DNA, 192 bp, Escherichia coli
gtgactaaacaggaaaaaaccgcccttaacatggcccgttttatcagaagccagacattaacgctgctggagaaactcaacgaactggacgcagatgaacaggccgatatttgtgaatcacttcacgaccacgccgacgagctttaccgcagctgcctcgcacgcttcggggatgacggtgaaaacctctga

SEQ ID NO: 33342 - DNA, 240 bp, Escherichia coli
atgcgcgggtatgcggaaggtggttatgtcggcggtgccggaagtccggcgcagatgcggcgggcggaaggtatccggtttgagcagaacaacagcgtggtgattcagaacgacggtatcaacggacaggccgggccgcagctgatgaaagcggtgtatgagatggcccgtaaaggtgcgcaggatgagattcaggcgcagatgcgtgatggtggcctgttctccggaggtggacgatga

SEQ ID NO: 33343 - DNA, 144 bp, Escherichia coli
atgagagttatcccgcaaccgggtcagccactgcatagcctgactgttattgtcctgctgcgcaatgatgtagccatggggcaatgttctgtcgaggaccgcttttgcggcggcgctctggtcgctggagtcaaaggtaattaa

SEQ ID NO: 33344 - DNA, 222 bp, Escherichia coli; identical to SEQ ID NO: 15328

SEQ ID NO: 33345 - DNA, 774 bp, Escherichia coli; identical to SEQ ID NO: 13727

SEQ ID NO: 33346 - DNA, 474 bp, Escherichia coli
atgaaaacattgtctcagaacaccacctcttcggcctgtgcaccggagactggcctgcaacaactggttgccaccatagtccctgatgaacagcgcatcagcttctggccgcagcattttggcctcattccacagtgggtggccctggagccccgtgttttcggctggatggaccgtctgtgcgaagactactgcggtggtatctggaatctgtacaccctgaacaacggcggggcatttatggcccccgaaccggatgacgatgatgacgaaacatgggtactgttcaatgccatgaacggtaaccgcgctgaaatgagcccggaagccgccggcattgccgcctgtctgatgacgtacagtcatcacgcctgtcgtacggagtgttatgccatgacggtccattattaccggctgcgggattacgccctgcagcatccggaatgcagcgccattatgcgcatcatcgactga

SEQ ID NO: 33347 - DNA, 351 bp, Escherichia coli; identical to SEQ ID NO: 6245

SEQ ID NO: 33348 - DNA, 333 bp, Escherichia coli
atggcagggctccgttttgtcggcctgtgtcaccacaaacagcacctgctgatgtccgcactgcaggatgtgtcgccagaaatactcatccacagacagggcccggtcatcggctttaatcagccacagcaccaggtccagttcaggcagaatgtcacggtacagggcttcatactctgcatccctgtcccggctctcgcccaccccgggcaggtcagtgataaccatgctgtaaccgtgaccactcagacggaagcgctgcacttcccgggtgccggcgtgaacatcactgaccggtgtgacctccccctgaaacagggcattacagagtga

SEQ ID NO: 33349 - DNA, 189 bp, Escherichia coli
atgaacgggcttatgcaggatacccggaagagactgaaggatttgcgtaaacagcgtgatgccatttacgccgacagtactctcagtctggcgcagcaggcggcgatggtgaaatcggtagagcgggatatgaaaattgccgtggatcggtttaaccgcgagtacaacaaaaaagtgggagtggattaa

SEQ ID NO: 33350 - DNA, 1140 bp, Escherichia coli; identical to SEQ ID NO: 13605

SEQ ID NO: 33351 - DNA, 153 bp, Escherichia coli
atgaatggtgttggcatttttctgatggttgtggccgtgtggttttgtttctcgctggtgtttattgctggtgtcctgtggcgcatcttagtggcgcagacagcttttcggcgtaagcgagagcaaatgcaccttgatttatatcgaaagtaa

SEQ ID NO: 33352 - DNA, 345 bp, Escherichia coli
atgagcaaatcacttaacgcacgctgcatccgtcgctggaccgtcgaatttaaaggccgctgcgactcaaaatatagcccgtattggcgtaagcgcgacctgcgggggtacatccgtgaggttgcactgaacaccgcggattgcatggtcgagcgtatggccgaggataatgcgatggtagattttcagggggctaatcgaggatggtcgccggagttctcagcctggtaccacgaacgccgtgaacagtatctcaaagaggcgcgcgaccatctgaacgaagacgccaccaatgacgaggttgacgaggagattcagaacgagctggaggcctggaatgactaa

SEQ ID NO: 33353 - DNA, 378 bp, Escherichia coli; identical to SEQ ID NO: 6536

SEQ ID NO: 33354 - DNA, 234 bp, Escherichia coli
gtgattttgtattaccgccgcacggtcggcactccaaacatcctggtcagggctgcgccccgacaccccgccaacgcctcacggcacgcgaaaaaattccgcgtaccgctcaccgttcctgaactcgtcaaacagaaaatcgtggggtcccgcgcctccggcgtgggttccgattttgtgattgacgacggcacgggaaaaacactggtggtggtggttggtgtcacggagtga

SEQ ID NO: 33355 - DNA, 516 bp, Escherichia coli; identical to SEQ ID NO: 11033

SEQ ID NO: 33356 - DNA, 132 bp, Escherichia coli
atgataaataaaatagatgctaaagaaataaccaaagagaaaaacctttgggatgtttacttgctctgcaaacggattactattagtacattccatatttgcattttgctcacagcatctattttttattaa

SEQ ID NO: 33357 - DNA, 1029 bp, Escherichia coli
atggattttataaaaaaactcgaatttggaaattatactctccgttttggtgatgatgttttgctagactattatgatgaaattgttttcccctcttttttggagatggcaaacatccgcagaatatctgacaaatcagagttctttttcattgatactgaatgcgtcatacttgacgaagaagcaacacccccagtactcggaattaaaggtcggattattaagaatacattattaaccagagaacaagtatttgatggtgctgatttggttgaagatcatcaagagcttgaaacagccccgagctctttctttcttctaatattaaacactcacagattaattctttgcaaggaagttagtggtgctcccacaattcaaaactttcagtcaacaagtcagtgtttcttaaacatagaatatgaaaaatacatatctcatttatacgaaaccgcacaagaagaacgcaaagaaaaccctgacttacctcgagtcactaaaaaaagcttacggaacgaaatcaaacgcccgaagctaagaataacgccgttaactgacaaacaaagcctagagcaatttattgataattttaataaaatccaaaatgtctcagtaaaacttctccctacaaatcaagaagaaattgataacgacgaattttgggagtcacttgaaagtgccggagacgaaatgggaagtatttctacatctattcgcttttcaaacaccgattcaggcttgaatcatggtgctgttttagaacaactcacatcagcaaccagattggctaattcaggaataaatattaaaggatatgatgacaatggtgatataatcaaaggtagcaatgatgactttgttttgttaagtgagatgaatgaattatcaaaggatacggtagtagctgcaaatgaaagttatgagcggtatgaaaatcttgtagaagaaggtaagatatctctaccccgttctctttcacaaaagacgattagaattattagcaatatatatgaaaggtttggtcgatga

SEQ ID NO: 33358 - DNA, 879 bp, Escherichia coli
atgaatttcaaaaacggaggacaggcagtcataacgcgcatgcttgaagcgtatggattcaagacgcggcaagccctatgtgaacagttcaatgtatctgcaagtactatgggaacgcgctggatgcgtgacgcatttcctgctgactgggtaattcagtgtgcaattgaaacaggagcatctatagagtggctctcattcggaaaaggcgtgccatttcctaagaataccgaagttcccgctaaattagaggaaccagcatcattggttcaatatgttcccaaagccaccaccaacgagaacccaattgtgaaccatccaaatctggattcaggtggacgtaatgcgataaacaggctaatggaagcgtatggctttaaaacaagacaagaacttgccgaccatttgaatgtgtctaaaagcacaatggcgaatagatacttgcgagacacattcccagctgactggatcataagatgctcgttggaaacaagaacttctcttttatggttagcaactgggcgcgggcaaaaacttggaagcgaagaaagtgaagctttagaaattcctaaagtaaaacttattgacaatcaaattttcgatgctggtcatttattgatagataagtccctgcttcctcattttaatgatttactcgcaattgaagacgaacattgcataaatattgcacacatgaataaagctaatgttgaagacggaagatggattgttcaataccaaaataatttcaagttaaaacaaatttttctattacctggaggcaatcttcgagtaacagacgatgatttaacatttgattgtgaaaaagaagatataaaattagttgccaaaattttctcacagtaccgtactatttaa

SEQ ID NO: 33359 - DNA, 546 bp, Escherichia coli
atgaatcatgtaatgttagatatagaaacattggatgttgaaaaaacagcttatatcctttcagttggtgcggcttttttcgtgccggagactggcgagattggtccgggtttctatcaagttatttcgcttgatcatgaacaagcaggcagaaccattgccccctctactgtaaagtggtggatgaatcaaagtactgaagctaaaaacgaaaattttgatggcactaaggaccttttagaggttctgaatgaatttgtggcatttattcttcataatcgtactggccgagtaaaagtgtggggaaacgggaaagagtttgactgcacgatcatgcatcatgccctgttacaggcgggtctggattgcccatggtcattcagagatactcttgacgttagaaccatcttagcacttggtgaaagcaaaggaattttttctcatgctgataaaaatttcactggcattaggcacacagcattcgatgatgttttatttcagatcgcacaggtttctcacatctatatgaatttaaataaaaaataa

SEQ ID NO: 33360 - DNA, 912 bp, Escherichia coli
atggattgcttagatgtaacctattggactgagctagatgttttcgcacagtatcctgttggtgctcgctctaaggcattggttatttcccctgatgttgccccccatggtatcaaagcatcgtggccgtatctttttaagagaagtattaaaaaatacccagatcaattttggtgtgagatcgttgcctacaggattggattgcagcttggttttaatgtccccaaagcagttccttcgttaaagactaatgatttggggcatacgttttgcggggccctcattgagtggtttcatcataaagattatgagaaatttgctcccgctggtgattactttgttcgaagagatccaaattttgatcgtgagaaaggagctaagcattccattgaagggctgaggattatcgcgaaagctcttaaagttgactatgttgagtggttggagaatatggctctctttgacgcagtaataggtaatacagatagacatcaagaaaactgggggtttatcttctcccctttaaccagcgagtgtcagcttgcaccatttttcgataatggtacgagcttatgctacgaacgctttccggaacatgttgctgattggaccgatcatagactcagggagcatgttagccggggaaagcatcatttgcgtaaaactctgggcaaagatgagtatcagagattaggtcatttagagttaatcaaagaactttgtgataaaaaagaagaattaaaacagcgggtagctgaaagactggctcgtttgaaccatgacttttgggactcaacttttgcggagttgacggaaataaactgccctgttccgctgactagagaacgtgctgcatggattgttcgtgtaacaaacatgcgtattgaactgattaaaggtgttacttcatga

SEQ ID NO: 33361 - DNA, 705 bp, Escherichia coli
atgactatcttaatagaaaaaattcccatgccaagtaggctcttactgacatggcaaccgaccgacggcggctctcgctatgtcgttggtgaacttcttcaagatgagtctgaaggctacgagtttaattatcttacggatagcaaagattttgctaaagctggggataaaggctttcacggttttcctgcttttgacataaaagttacgactcatcgcaaagacgttatgcaaaccttttcaagaaggttaccctccaggaaaagagaagattttgccgattacttgctgacgtttcgtcttcctgctgattttagagagaatgacttcgttttgctcgcttgtactggcggaaaagtggctagtgatggtttttattttgtcccagacttgtcttctattcggccaccttttgattatgtcatggaggtcgccggaacgagacacatgattaaggaagggcgtctagctcttgacgagatatcaattggtgatgaagtcatattgcgcaatgaagataccaatactgttgatccgctggccatattagtaacgaaaaacgacaatcatctagggtatgtcaacaaggcattgtgcgccgcattacgagatcttagtaaaaaccatgatatcagtggagtggtcgtacgtaaaaatggctcttcggataggcctttgatttatgcaaaagtatctgttagatga

SEQ ID NO: 33362 - DNA, 195 bp, Escherichia coli
atgcaaaagtatctgttagatgatgcatgtttattcatgcttgctagtgatgctgcattcatagagtctgtcaactatggagattttttcgtctcatgcaactacattaaattaccattaagtgggttgacgttgcgggggaagcattacacgtcagtattggtgcgtctgaagtgtcatgccgaaaaggtatga

SEQ ID NO: 33363 - DNA, 540 bp, Escherichia coli
ttgaacttagagcagattgccagtcaaagtataagtaaccttcagtttctcctcgatactttgaagatgccgttggctgttggtccaatcagtgatgaagactatgtgatcctgaccacaggatacgctcagctagaatgggattatggtttttctcggtttggcaatcgaagtgataagtttgaattttgtttgaagctccttgcggggccacttaggcatatcccttctggcgcagctatgtgcacctttgacgaggacgctggagtcatagagatccattttgtggaatcttttgtgaaagatgatgacgtagagcaccctctttacggcaacatgttcatggttacattgtgggcggtatatctttttggtagcgcggttgggtgtcaagagattcggatccctgaagccctgaatcaaaaagttgctgaccactataaaaaatttggttttaaaggtgatataagcttgctttcggcaccttttgctacaataactgatgtagtaagacgctacattacttctaagaaacagtag

SEQ ID NO: 33364 - DNA, 180 bp, Escherichia coli
atgactatgacgcatagtgacaagaaagctcagaagcattactcagtatctgatgttttcagccgtatgggcgtcgcgatggaagaactacttcaagcggccccacatatgatgcaggactgcaaatttgaaggaaatgagctgcatggtaagctcaaagaaaagcagaaagctgcttaa

SEQ ID NO: 33365 - DNA, 360 bp, Escherichia coli
gtgataaagacagtggtgaatatcattgggaaaagcatacgaccagatgaccttttagcgcgcgttggcggcgaagagtttggcgtcttgctgacggagatcgatactgaatgtgcgaaagctttagcggaaaggattcgggaaaatgttgaacgtttaactggcgataatcctgaatacgccataccacaaaaagtgacgattagtattggcgctgttgtaacgcagaaaaatgagttaaaccctaaggagatctatcaactggctgataacgcactttacgaggcgaaagagaccgggcgtaataaggtggtagtaaaagaggcagaaattcttatcaaccgcaaggatgatgaatga

SEQ ID NO: 33366 - DNA, 741 bp, Escherichia coli
ttgcgtcgtcagcgtgcggaagaaacccgcgtctacggcgaaaacgcctgtcaggcactgttccagagccgtccggaagcgattgttcgcgcctggtttatccagagcgtaacgccacgttttaaagaagccttgcgctggatggcggcaaaccgcaaagcgtaccatgtggtggatgaagcggaactgacaaaagcgtcaggcacggaacatcacggcggcgtttgcttcctgatcaaaaagcgtaacggtacaaccgtgcagcagtgggtaagccaggcaggcgcgcaggattgtgtactggccctggaaaacgaatctaacccgcataacctgggcggcatgatgcgtagctgtgcgcacttcggcgtgaaaggtgttgtggtgcaggatgcagcactgctggagtctggggcggctatccgtaccgcagaaggcggcgcagagtacgttcagccgattactggcgacaacattgttaacgtgctggatgatttccgtcaggcgggttacaccgtagtgacaacttccagcgagcagggtaaaccgctgttcaaaaccagtctgccagcgaaaatggtactggtgctgggtcaggaatatgaagggttaccggatgccgcacgcgatccgaacgatctgcgcgtgaagattgatggtactggcaacgttgccgggctgaatatctctgtcgcaaccggcgttcttcttggcgaatggtggcgtcagaataaagcctga

SEQ ID NO: 33367 - DNA, 699 bp, Escherichia coli
atgttaaaactgactgatatcacctggctttaccaccatttgccgatgcgttttagcttaacggtggaacgcggcgagcaggtggcgatcctcgggccaagcggcgcaggtaaaagtaccctgcttaatttgatcgccggttttctgacgccagccagcggtttgctgactatcgacgacgtagatcacaccacgacgccgccgtcacgccgtccggtgtcgatgctgtttcaggagaacaacctgttcagccacctgacggtcgcgcagaacatcgggctggggctaaatccggggttgaaactaaatgcggcgcagcagaagaaaatgcacgcgattgcccaccagatggggattgataatttaatggcgcggttacctggcgagctttccggcggtcaacgacagcgcgtggcgttagcgcgttgtctggtacgcgaacagcccattttattgctcgatgaaccgttttccgcgctcgatccggcgctacgtcaggagatgctgacgctggtgagcacgagctgccaacagcaaaaaatgacgctattgatggtgtcgcacagtgtggaagatgcggcgcggatcgccacgcgctcggtggtggtcgccgacgggcgtatcgcctggcagggtaagaccgatgagttgttgagcggtaaggcgagtgcttcggcgctgttgggaattaaaggttaa

SEQ ID NO: 33368 - DNA, 483 bp, Escherichia coli
atgaaacaaatgtcactaattgagatggatggatttctgaaaggtaaatgcatcccacgagatttaaaggttaacgaaacaaacgctgaatatctggtgcgtaaatttgctgaagcggaggccaagatttcggctctgtacgaagaccaccagaaagcgattgagtcaattaagcaggctgatgcagctgttaagttggcacacgagaagttttcggcgctggcagcagagaatacggagcttaaacagtcggagaaggaatttaataacttctgtcgtcaggagtactacggttgggaggacaacttcacggaaaccccagccaccgacgctttcctggctgaaattgaacgcaaagcaatccgcaagttcattaacagcattgaacacatcctgcgtgacaagttgtcaccgtatgacaccgaagagatgcttgaggctatgcgtatttttctggaagaacagagtggtgagcaaaaatga

SEQ ID NO: 33369 - DNA, 165 bp, Escherichia coli
atgaccagatggatttcgctggacacttacgattacatgcaccatattgtcaacgattacgccactgagtgtatgacacacattaaagcgttaggctcaggacattattacaatgtcatgctagtgggcttgtacgccgtaaatatctgcatgataccagaatga

SEQ ID NO: 33370 - DNA, 555 bp, Escherichia coli
  misc_feature (437)..(446): n is a, c, g, or t
atgtgggatggtggcttacaagaacaggaagtattggctatcgagaaaataaaagctgctttttcagtcaacgtatctaagcctgacaagcctttccgtagcggttcaattagtgagcagctaaaaagctatggttttatcggcaatgaaatgttcccttggaaaggttatgcaggttttcgatttgttgaggcaaaaaaagagggggaattcgatttagttattgtaacacactgcaacgtgatcattgttgaactgaaagactggaaccatcagcctgtaaccgcacgcggagatacttggtttaaaggcgataagaacatggggcgctcgccagtaagcgtgactcgtagcaaaaaattcatgctggacaaaaaactcaagcgtctggtagaccgttttacgaacaaaggctatatcccgattgttcatttttnnnnnnnnnnaccgggaccacttcaccgcagatttcagcgcgctgccggaggaacaacggcgccatacgatctcgttaaaagatttcctgaagtttgccgatcgcaggagcttcaataa

SEQ ID NO: 33371 - DNA, 210 bp, Escherichia coli; identical to SEQ ID NO: 7061

SEQ ID NO: 33372 - DNA, 489 bp, Escherichia coli; identical to SEQ ID NO: 22273

SEQ ID NO: 33373 - DNA, 162 bp, Escherichia coli
atgaaaaatattatttctgcaactgtactatccgcgctgttcatgttcaatgctcaggcagcagacacaatggataaaacacatgaagtaaaaggcagcatgtccagcgcgcatgataaaatgaatgaccacatgggtaaaaaagacaatatgtctcaataa

SEQ ID NO: 33374 - DNA, 312 bp, Escherichia coli
atgcgccttactacggcaatcaaagggttgtggctgagattcatacgccgagcggtattattacggatgttctttcgtgtgctgggtgctaccagtgggagcgcgtggattgatgtgcttttaggtggtcgccaccttgtatatatacttaagggatatctctgggattataatttagctctagcccttgtcgcatctgggctgagcgcagatttgctcggaaatggttttgagagtattttgtcggaagtggtcgcattaaaagcgacccccgcaacgactggcatcgttcgggggtgtgaccacctgtag

SEQ ID NO: 33375 - DNA, 486 bp, Escherichia coli
atgacaaccgtcttgcataattccaccactccttctgtttccgtaaccgctgcatcagggaatgaccagcctcagctggttgccaccatagtccctgatgaacagcgcatcagcttctggccgcagcactttggcctcattccacagtgggtggccctggagcctcgtgtcttcggctggatggaccgtctgtgtgaagactactgcggtggtatctggaatctgtacaccctgaacaacggcggcgcatttatggcccccgaaccggatgatgatgacgacgaaacatgggtactgttcaatgccatgaacggtaaccgcgctgaaatgagcccggaagccgccggtattgccgcctgtctgatgacgtacagccatcatgcctgtcgtacggagaattatgccatgacggtccattattaccggttgcgggattacgccctgcagcatccggaatgcagcgccattatgcgcatcatagactga

SEQ ID NO: 33376 - DNA, 435 bp, Escherichia coli
atgcgaattctgaactgttatatggcgaatgacagcaaaggccattttgttacggcgaaagaagctgcgaagcacaaccgacaggacgttttgtgctgtgtgtcctgtggatgcccgttaacacttcagcggggcaatgacggacaaccaccgtggtttgaacatgaccagatgactgtcgctgaaaaaatcctgctgcgatgtacctggcttgacccggcggagaaagaggcccgtcgtttgcatctgcagggcatgacggttccggattatacggtgaaggtgagaaagtggttttgtgtgatgtgtgacgaagattatgagggggaaaagtgctgcccacgctgcggtaccggggtatacagcagggcgtgggggcggcaggaggtgccgtcggaagatgccagggctgataatccgttacagaggctgtaa

SEQ ID NO: 33377 - DNA, 447 bp, Escherichia coli
atggggtttagaaaaacaataatcacttcggtaggtttgatatttatttcattctcttttgtggcaaagtgctctcaactcaaaaatttgaataattactcagtgatgctttgtggaaaagtgtcaaataatatcctggatgatattggtggttataaagaaagaaatatattaatgctgcaagctataaaaaaaatcataataatgacaatcgtaaatattatatttttctattcctttcaatcgactgcggatgaaatggttttaataaaaaaatacgggtttgggcttgagagagatatcaaaggaaggccattaatttatcctatcgaaaattatgatgagtgtaagaaaaaatgcaatcatatgaattatatagcggatgccaatgctcaattagctatgagtaaaaaaaataacaggattgttgagtataaccttaaatga

SEQ ID NO: 33378 - DNA, 204 bp, Escherichia coli
atgacggttgaagagcataacgtcaatggcggccttggtagcctggtcgcggaagtgttggcagaggccggaacggggatcaaattaaaacgcgcaggcattatggatggagaatatgccgcagcggcggatcgtgggtggttgcgtcagcatcatggatttgatgctgccggaattgcagctcaggcacgggaaatgctttga

SEQ ID NO: 33379 - DNA, 1140 bp, Escherichia coli; identical to SEQ ID NO: 13605

SEQ ID NO: 33380 - DNA, 294 bp, Escherichia coli
atgaagatttttaaaatcggagacattcatcctagtgttcctcatctttttgcagaccttgcagaacttgctacggttataaattattctggtcgttatgatctacataaaaatgacctcataacaataagaactcaaagtaacacaagtgtggatgatattgatcaagaatatcaagaagatgaaaatgaaggctgcgatgctgaacgcaatgaccgtttagaaagacaagttgaagatgtctggacgcaactcgattttagacaaaattttctcaaggatatttattattaa

SEQ ID NO: 33381 - DNA, 906 bp, Escherichia coli; identical to SEQ ID NO: 30017

SEQ ID NO: 33382 - DNA, 366 bp, Escherichia coli; identical to SEQ ID NO: 5339

SEQ ID NO: 33383 - DNA, 708 bp, Escherichia coli; identical to SEQ ID NO: 25464

SEQ ID NO: 33384 - DNA, 882 bp, Escherichia coli
atggcgtcgccggaggtggcccgggattttgtctcgctgcatcttccggaggaataccgtcagttgtgtgatttatcgacgctgcggctggagccctgtacgtttgtggaccaggacctgaagcagtatgcgtgtgatgcactgttcagtatgaagaccgtcagcggtgaggatggttatgtctactgccttgtggagcaccagagtaccgaaaacgcgtatatggcgttcagaatgctcaggtatgcggtggctgcgatgcagcgacacgttgaggcgcataaggtacttccgctggtgataccggtgctgttctaccacggtgagcgcagtccgtatccgtacagcatgaactggctggatggcttttctgacccggatattgtggctaaaatctacaccagagcgttccatctggtggatgtgacggtgatggatgacgatgaaattatgcatcaccgccgtctgggggccctgacgctgctgatgaagcacagccgcagccgtgaccttatgttacagatggacaggctggttcagctgatacaggactccctgaatgaagaactggcacaggtactgtttcactatctgctgaatggcagtgaacatgtgacggtgacgtttttgcagacgctggcgcagcgtctgccccagcacgaggacaacattatgacactggctgaacgcattgagcagaaaggtattgccaagggcattgagcgaggactggcacaggggattgagcagggtaaactggaagggaagctggaagggaagctggaaactgcctgcaatatgctgaatgccggaatggaccgtcagacggtgctgcagatgaccgggctttcaaatgaccagctgaatatgctgaaacactga

SEQ ID NO: 33385 - DNA, 1158 bp, Escherichia coli; identical to SEQ ID NO: 33142

SEQ ID NO: 33386 - DNA, 507 bp, Escherichia coli
atgataactaaaagtagagttcacgaaaatgttgaagatataactgaagttttaaatagtaaaaaaataaaagataaaatagatgaaatgcaagagcgtggagatgttaaagccacagtaataatacaagatgataagaaaataagtttaaaaaatgagtttgtaatattatttttagaaaactttgatcgtttaataacagagttaaaaatcaatacttctgagcttcgtgtattgatttatattttaaagaaaatggagtttgggaacttggtttcattatctcaagcatccatagttaaagcattagatatgaataaatcaaatgtctctattatatttaaaaagcttttagctaaagatgttttaataaaagatgaagacggtaatatgtacgtaaactctaatattgtaatgaagggattaaaacataaactatcaggaaaaaataaagagaacttacagaagtctcaaaaacaaacagatttatttgataaatcacattaa

SEQ ID NO: 33387 - DNA, 1260 bp, Escherichia coli
atgagctatcagtttatacatatagaggcatatgctagagtcggatctaatcaaaaaggaaaatcggaaaaatggaatatacatcagatcgcaggtgaagctatgcgaaatgatgaagattgcaaacatgtagcacagccaaaagaaccagcggttatttttggcgtagatgcatatgaagctgcagcaatggctcagaagtgggctgacagctccatagacgcttcaggcagaaagttaagaaaagatggctcctgtctgctggcaggtgtcatatcttttcctgatggccgttctgatgaagaatggaaggcgtttagagatgatgctgtcgaatacttgaaaaataagtacggtgagaatttgaaatcggtgatcgagcatacagatgaagattacaaccatattcatttttattcggttcctaaatatggtcagaagtttgatgaaatacacgatggtaaaagagctgtattagaagctaaaaaagaaaactcaaaggtacttaagggtgaacagaataaagtctatattgaagctatgaaagagtttcaagaagacttttacaaagaagtagccataaaacacggaatgaccaaaaccgggccaaagcgtgaacgcttgacccgtgaggaatggaaagcaagaaaagaatatgctttaaagcaatcagaagaaataaaaaatattagtctattaaaagatcaagctattcagacaggtaaaaaagaaggttttgactattcaatagaacagtcaaaaggctggggctggatcgcaaaaataggagctaaatataaatattacactgatggttttaaaaaaaagttagaggaaaaggatgaagaaatagaagttgtcaaaaaccagagaaatgaacaacaaaaaaaacatagagcatttaaaaaagaatattactctcaaaaaaaagaaacagaaaaagcagttgaagaaaaaaaagaaaaatcaaaagaagtttactttctaaataatgaaaataaagagcttaaaaaaaataatgatattttagaagtggaaaacttatcattgagagaagagaataaaatattacagcagtataaaataacaagtaaaaaaatgagagatcgttttcctgatcagtataaagctatggaagctgaaataaataaaccaagaccaaaaggtgaaagctataaccctgaaccgaaagctcttgagctttctattcagcaggaagaagatataacaaaccaatacagaaaaagacctcgaatgtag

SEQ ID NO: 33388 - DNA, 531 bp, Escherichia coli
ttggataatgacgatgcagaggtcggtattatttcttcgatgtgtggaaaaacatttgctattactacaaataatgtacttcttgattatctgtccagtaaatgtgagttcgatgaatataatttcgatcatgattggattgaaattccggcaagacaatcacgcgtctttagtttcattcttaatgatgcgtatgtttttttaccaggagagcatcgttatgatattggttctttggagtattattttactgatgtcagatggattaggaagaaaaaaatatatagatcgttgtttgatataatgaagtttcgggttggcatatgcagtagtcgactaggcggagattatctttttcaaaaagataatggttattgtgcgtctgaagatgaggattcaattaatattgaatattttttgtggcgatttggtttgaatggagggattgagaaaatgtattttaacattagaactaatcaagttgtgattgatattgatgggagtgatgttcactcattgtacgataactaa

SEQ ID NO: 33389 - DNA, 1335 bp, Escherichia coli
gtgactacgttaaataaagctcccatgcctgatttttcatctgtggataggctattgggcgttgccacacttgttaacccacaatatgtcgtcagtgttaagcataatggtggctatagtagagtacggtttggtacgagtaattatactttagtagacagaaataactactcagcaagagatttccatacgcctaggttaaataaactggtaacagatgtggttcctgtagaggttaccagtgcaggaacagcgcagggaacatataaaaatgtaaccaagtttcctgttttctataggataggtacagggacacaaatatataaaaatgaacaaggatattatactctgaacggtgcttacagttatcttactggggggattgttcctacgccatcaatttcagattggtcatttgtgacaaatgctggcaacggtgctcttgcgtcgtatggaactcccggtgacagtggttcaccgctacttggatgggatacaactctaaataaatgggctcttgtgggggtactcagagcatatgcaggaaccacagggagtaccaactggtatgttgttataccaacagtgcaaatcaccgcaaatataaatgctgatactgataaacctgttaccagtgaggccgggagcggtgatattctctggactttcaacagtgtgacaggaaccggtcagttagttcagggagataattcctgggacatgcatggtcagaaggacttagatctcaattatgggaaaaatctgacattttctggaggcggtacaattgttttagaaaattcggtgactcagggggctggggcgctgacttttaatgatgactatgtggtgaaacctctggatgatcagacctggattggggggggtgtcattgtcaatgatgggcacgttgttgactggcaggtcaatggtgtgtcaggagatgcgctgcataaattaggcacgggtacgttgaaaattgatggctccgggattaatggtggaagcctgaatactggtgatggcgcagttattctggctcagagacccgatggcgaggggaaagttcaggcttttagtagggtatctcttgttagtggtcgctctattgtaattctttctgatgaaaatcagattaacccagataatatttattggggatatcgtggaggtacgcttgatattaatgggaatgatctgactttccacaaattaaatgcttttgatgacggtgcaattattacaagtaatggcagattggccagactgacactgtccttaaatgaaaaaacagcaactatttatcaggtgattttattgttgatggtggtataa

SEQ ID NO: 33390 - DNA, 480 bp, Escherichia coli; identical to SEQ ID NO: 2275

SEQ ID NO: 33391 - DNA, 708 bp, Escherichia coli; identical to SEQ ID NO: 25464

SEQ ID NO: 33392 - DNA, 1581 bp, Escherichia coli; identical to SEQ ID NO: 29195

SEQ ID NO: 33393 - DNA, 150 bp, Escherichia coli
atgaataacacggatcttatccatctcattaaacattttatgcgtaacgaacataaagcagttgaagaagttattgattcccctctttcggaggtcgcaaatttaattaaagtcttgtcagggaaaagttgtttttattggtgttggtaa

SEQ ID NO: 33394 - DNA, 540 bp, Escherichia coli; identical to SEQ ID NO: 13681

SEQ ID NO: 33395 - DNA, 855 bp, Escherichia coli
atgacattaacaagacgtgaatttattaaacatagcggtattgcggcagggacgctggtggtgacatcggctgcaccgctacccgcatgggcagaagaaaagggcggcaaaattctcaccgcgggccgttggggagcgatgaacgtagaagtgaaggacggcaagattgtttcttcgacaggcgcgctggcgaaaaccataccgaactcattacagtctacggcggcggatcaggtacacaccacggcgcgtattcagcatccgatggtgagaaaaagctatctcgataatccactgcaaccggtgaaaggtcgtggcgaagatacctatgtacaggtgagctgggaacaagcattaaaactgattcatgaacaacacgatcgcattcgcaaagctaacggaccatcggccatttttgccggatcttatggctggcgttcttctggcgtgttgcataaagcgcaaaccttactgcaacgttatatgaacctggcgggcggttattccgggcatagcggcgattattcaaccggagcggcacaggtgatcatgccgcatgtggtcggttctgtagaggtgtatgaacagcagacctcctggccgctgattctggaaaacagccaggtggtggtgctgtgggggatgaacccgctgaacacgctcaaaattgcctggagcagtaccgatgagcaaggactggaatacttccatcagctgaaaaaatctggcaaaccagtgattgccattgatcctatctgctccgaaaccatcgaattctttggcgataatgccacctggatcgcaccgaatatgggcaccgatgtggcactgatgttaggattgcgcataccctga

SEQ ID NO: 33396 - DNA, 1206 bp, Escherichia coli; identical to SEQ ID NO: 31281

SEQ ID NO: 33397 - DNA, 768 bp, Escherichia coli; identical to SEQ ID NO: 22967

SEQ ID NO: 33398 - DNA, 819 bp, Escherichia coli; identical to SEQ ID NO: 6059

SEQ ID NO: 33399 - DNA, 864 bp, Escherichia coli
atgaataaaatatactcccttaaatatagtgctgccactggcggactcattgctgtttctgaattagcgaaaagagtttctggtaaaacaaaccgaaaacttgtagcaacaatgttgtctctggctgttgccggtacagtaaatgcagcaaatattgatatatcaaatgtatgggcgagagactatcttgatcttgcacaaaataaaggtattttccagcccggagcaacagacgtaacaatcactttaaaaaacggagataaattctctttccataatctctcaattccggatttttctggtgcagcagcgagtggcgcagctaccgcaataggaggttcttatagtgttactgttgcacataacaaaaagaaccctcaggccgcagaaactcaggtttacgctcagtcttcttacaaggttgttgacagaagaaattccaatgattttgagattcagaggttaaataaatttgttgtggaaacagtaggtgccaccccggcagagaccaaccctacaacatattctgatgcattagaacgctacggtatagtcacttctgacggttcaaaaaaaatcataggttttcgtgctggctctggaggaacatcatttattaatggtgaatccaaaatctcaacaaattcagcatatagccatgatctgttaagtgctagtctatttgaggtcacccaatgggactcatacggcatgatgatttataaaaatgataaaacatttcgtaatcttgaaatattcggagacagcggctctggagcatacttatatgataacaaactagaaaaatgggtattagctgtctcttatacacatctgacgctgccgacgaagaggatagtgtag

SEQ ID NO: 33400 - DNA, 141 bp, Escherichia coli; identical to SEQ ID NO: 13741

SEQ ID NO: 33401 - DNA, 201 bp, Escherichia coli
atgttccaggaattgccagtgaaattttgcgcgggcgcgacgttcatcaccggcttcaatggcagtggctacagcgacggcaccttcttcctttattgcctgttcgcccggaatggcggcgcaaataaagactttactcattttgttttacctcattacagatttaagggtgaacaaatccctgccattgctggcatataa

SEQ ID NO: 33402 - DNA, 216 bp, Escherichia coli; identical to SEQ ID NO: 4566

SEQ ID NO: 33403 - DNA, 1440 bp, Escherichia coli; identical to SEQ ID NO: 4161

SEQ ID NO: 33404 - DNA, 165 bp, Escherichia coli
atggtgctccccagctttctcaatcgtatgctcaatctcttcaaggggttgagcaagttgagctacttaaaggcccacaaggagttatttatgggcgtggcacattgggagggattatcagtgttattaccaaaaaacccagtagtcacgctgaagcatggttag

SEQ ID NO: 33405 - DNA, 846 bp, Escherichia coli
atggctgaagcgcaaaatgatcccctgctgccgggatactcgtttaacgcccatctggtggcgggtttaacgccgattgaggccaacggttatctcgatttttttatcgaccgaccgctgggaatgaaaggttatattctcaatctcaccattcgcggtcagggggtggtgaaaaatcagggacgagaatttgtctgccgaccgggtgatattttgctgttcccgcctggagagattcatcactacggtcgtcattcggaggctcacgaatggtatcaccagtgggtttactttcgtccgcgcgcctactggcatgaatggcttaactggccgtcgatatttgccaataccggtttctttcgcccggatgaagcgcaccagccgcatttcagcgacctgtttgggcaaatcattaatgccggacaaggggaagggcgctattcggaattgctggcgataaatctgcttgagcaattgttactgcggcgcatggaagcgattaacgagtcgcttcatccgccgatggataatcgggtacgcgaggcttgtcagtacatcagcgatcacctggcagacagtaattttgatatcgccagcgtcgcacagcatgtctgcctgtcgccgtcgcgtctgtcgcatttgttccgccagcagttagggattagcgtattaagctggcgcgaggaccagcgcatcagtcaggcgaagctgcttttgagcaccacccggatgcctatcgccaccgtcggtcgcaatgtcggttttgatgatcaactctatttctcgcgagtatttaaaaaatgcaccggggcgagtccgagcgagtttagggcaggttgtgaataa

SEQ ID NO: 33406 - DNA, 1341 bp, Escherichia coli; identical to SEQ ID NO: 2084

SEQ ID NO: 33407 - DNA, 1116 bp, Escherichia coli; identical to SEQ ID NO: 2083

SEQ ID NO: 33408 - DNA, 1191 bp, Escherichia coli; identical to SEQ ID NO: 2082

SEQ ID NO: 33409 - DNA, 1545 bp, Escherichia coli; identical to SEQ ID NO: 2081

SEQ ID NO: 33410 - DNA, 891 bp, Escherichia coli; identical to SEQ ID NO: 2080

SEQ ID NO: 33411 - DNA, 411 bp, Escherichia coli; identical to SEQ ID NO: 2079

SEQ ID NO: 33412 - DNA, 159 bp, Escherichia coli; identical to SEQ ID NO: 20912

SEQ ID NO: 33413 - DNA, 2097 bp, Escherichia coli; identical to SEQ ID NO: 2078

SEQ ID NO: 33414 - DNA, 738 bp, Escherichia coli; identical to SEQ ID NO: 2077

SEQ ID NO: 33415 - DNA, 639 bp, Escherichia coli; identical to SEQ ID NO: 2076

SEQ ID NO: 33416 - DNA, 243 bp, Escherichia coli; identical to SEQ ID NO: 2075

SEQ ID NO: 33417 - DNA, 1650 bp, Escherichia coli; identical to SEQ ID NO: 20917

SEQ ID NO: 33418 - DNA, 1350 bp, Escherichia coli; identical to SEQ ID NO: 2073

SEQ ID NO: 33419 - DNA, 273 bp, Escherichia coli; identical to SEQ ID NO: 2072

SEQ ID NO: 33420 - DNA, 873 bp, Escherichia coli; identical to SEQ ID NO: 2071

SEQ ID NO: 33421 - DNA, 807 bp, Escherichia coli; identical to SEQ ID NO: 20922

SEQ ID NO: 33422 - DNA, 408 bp, Escherichia coli; identical to SEQ ID NO: 2068

SEQ ID NO: 33423 - DNA, 495 bp, Escherichia coli; identical to SEQ ID NO: 2067

SEQ ID NO: 33424 - DNA, 798 bp, Escherichia coli; identical to SEQ ID NO: 2066

SEQ ID NO: 33425 - DNA, 825 bp, Escherichia coli; identical to SEQ ID NO: 2065

SEQ ID NO: 33426 - DNA, 1230 bp, Escherichia coli; identical to SEQ ID NO: 20927

SEQ ID NO: 33427 - DNA, 690 bp, Escherichia coli; identical to SEQ ID NO: 2063

SEQ ID NO: 33428 - DNA, 1632 bp, Escherichia coli; identical to SEQ ID NO: 20929

SEQ ID NO: 33429 - DNA, 450 bp, Escherichia coli; identical to SEQ ID NO: 20930

SEQ ID NO: 33430 - DNA, 321 bp, Escherichia coli; identical to SEQ ID NO: 2060

SEQ ID NO: 33431 - DNA, 3684 bp, Escherichia coli; identical to SEQ ID NO: 2059

SEQ ID NO: 33432 - DNA, 825 bp, Escherichia coli; identical to SEQ ID NO: 2058

SEQ ID NO: 33433 - DNA, 1725 bp, Escherichia coli; identical to SEQ ID NO: 20934

SEQ ID NO: 33434 - DNA, 1305 bp, Escherichia coli; identical to SEQ ID NO: 20935

SEQ ID NO: 33435 - DNA, 1602 bp, Escherichia coli
atgactgaacaggcaacaacaatcgatgaactggcttttacaaggccgtatggcgagcaggagaagcaaattcttactgccgaagcggtagaatttctgactgagctggtgacgcattttacgccacaacgcaataaacttctggcagcgcgcattcagcagcagcaggatatcgataacggaacgttgcctgatttcatttcggaaacagcttccattcgtgatgctgactggaaaattcgcgggattcctgcggacttagaagatcgtcgcgtagagattaccggacctgtagagcgcaagatggtgatcaacgcgctcaacgccaatgtgaaagtctttatggccgatttcgaagattcactggcaccagactggaacaaagtgatcgatgggcaaattaacctgcgcgatgcggttaacggcaccatcagctatagcaatgaagcaggcaaaatttatcagctcaagcccaatccagcggttttgatttgtcgggtacgcggtctgcacttgccggaaaaacatgtcacctggcgtggtgagacaatccccggtagcctgtttgattttgcgctctatttcttccacaactatcaggcactgttggcaaagggcagcggtccctatttctatctgccgaaaacccagtcctggcaggaagcggcctggtggagcgaagtcttcagctatgcagaagatcgctttaatctgccgcgcggcaccatcaaggcgacgttgctgattgaaacgctgcccgccgtgttccagatggatgaaatccttcacgcgctgcgtgaccatattgttggtctgaactgcggtcgttgggattacatcttcagttatatcaaaacattgaaaaactatcccgatcgcgtcctgccagacagacaggcagtgacgatggataaacccttcctgaatgcttactcacgcctgttgattaaaacctgccataaacgcggtgcttttgcgatgggcggcatggcggcgtttattccgagcaaagatgaagagcgcaataaccaggtgctcgacaaagtaaaagcggataaatcgctggaagccaataacggtcacgatggcacatggatcgctcacccgggccttgctgatacggcaatggcggtattcaacgatattctcggctcccgcaaaaaccagcttgaggtgatgcgcgaacaagacgcgccgattactgccgatcagctgctggcaccttgtgctggtgaacgcaccgaagaaggtatgcgcgccaacattcgcgtggctgtgcagtacatcgaagcgtggatctctggcaatggctgtgtgccgatttatggcctgatggaagatgcggcgacggctgaaatttcccgtacctcaatctggcagtggatccatcatcaaaaaacgttgagcaatggcaaaccggtgactaaagccttgttccgccagatgctgggcgaagagatgaaagtcattgccagcgaactgggcgaagaacgtttctcccatgggcgttttgacgatgccgcacgcttgatggaacagatcaccacttccgatgagttaattgatttcctgaccctgccaggctaccgcctgttagcgtaa

SEQ ID NO: 33436 - DNA, 930 bp, Escherichia coli
atgccgattcgtgtgccggacgagctacccgccgtcaatttcttgcgtgaagaaaacgtctttgtgatgacaacttctcgcgcgtctggtcaggaaattcgtccgctaaaggtgcttatccttaacctgatgccgaagaagatcgaaactgaaaatcagtttctgcgcctgctttcaaactcacctttgcaggtcgatattcagctgttgcgcatcgattcccgtgaatcgcgcaacacgcccgcagagcatctgaataacttctactgtaactttgaagatattcaggaacaaaactttgacggtctgatagttaccggcgcgccgctgggcctggtggagtttaatgatgtcgcttactggccgcagatcaaacaggtgctggagtggtcgaaagatcacgtcacctcgacgctgtttgtctgctgggctgtacaggccgcgctcaatatcctctatggtattcctaagcaaacccgcaccgacaaactctctggcgtttacgagcatcatattctccatcctcatgcgcttctgacgcgtggctttgatgattcattcctggcaccgcattcgcgctatgctgactttccggcagcgttgattcgtgattataccgatctggaaattctggcagagacggaagaaggggatgcatatctgtttgccagcaaagataagcgcattgcctttgtgacgggccatcccgaatatgatgcgcaaacgctggcgcaggaatatttccgcgatgtggaagccgggctagacccggatgtaccgtataactatttcccgcacaatgatccgcaaaatacaccgcgagcgagctggcgtagtcacggtaatttgctgtttaccaactggctcaactattacgtctaccagatcacgccatatgatctacggcacatgaatccaacgctggattaa

SEQ ID NO: 33437 - DNA, 444 bp, Escherichia coli; identical to SEQ ID NO: 2053

SEQ ID NO: 33438 - DNA, 384 bp, Escherichia coli; identical to SEQ ID NO: 2052

SEQ ID NO: 33439 - DNA, 459 bp, Escherichia coli
atgacaatcacggacctggtactgattcttttcatcgccgcacttctggccttcgcgatctacgatcagttcatcatgcaccgccgtaacggccccaccctgctggcaattcctttgctccggcgtggtcgcatcgatagcgttatcttcgtcggattgattgtcattcttatctataacaacgtcacgaatcatggcgcgcttataacaacatggttattaagtgcactggctctgatgggtttttatatattctggattcgcgttccgaagatcatctttaaacaaaaaggttttttcttcgccaatgtctggattgaatatagccgaatcaaagcgatgaacttgtcggaagatggcgtgttggtgatgcaattagaacagcgtcggctgttaatccgcgttcgaaatatcgacgatttggaaaaaatttataagcttctcgtttcaactcaataa

SEQ ID NO: 33440 - DNA, 708 bp, Escherichia coli; identical to SEQ ID NO: 25464

SEQ ID NO: 33441 - DNA, 435 bp, Escherichia coli; identical to SEQ ID NO: 13692

SEQ ID NO: 33442 - DNA, 342 bp, Escherichia coli
atggctactcattacactgaactcatgtctggtactgaagcactggttactacgctggggatattttcagccaataaaggggtaatacctgcgtttacgccactgatgcaggaagatgcaactggtgcgctagtggtatgggatggaacgagcgcaggcaaagcggtttatgtttccgctgtacaaatcgacacagcgaaaaaaacacaggcacaggtttataagacaggtgttttaaatgttgatgctctgaactggcctgagtctgtaagagaactgtcggcaaaggttgccgcgtttgttggctcaggtatttctgttcagccgctggctcgtgtgtaa

SEQ ID NO: 33443 - DNA, 207 bp, Escherichia coli
atggaagtaatcagaaaaattcttacccgtcaggaagtaaaaaatattctgcgcatcaaggcagacagttcgctacaggacatgatcaacgccggaaaattcccgaaaggcttcaaaatcggtctgcgccgtgttggctggtatgaagatgaggtgcaggcctggttgaaagaacgcgaggaagaagcgcgcggaacggctgcgtaa

SEQ ID NO: 33444 - DNA, 243 bp, Escherichia coli
atggtctggcacgaaaaatcatccaatgtctgcggtgaagggctgcaactggcgttaatggcaaatcgtgaattctggtcaacatacgatccggaagacaaatcaacagcccccacaaaacacgaggtagtcagttttttacgctcgcgtggcgcatcgaaaaatctggctgaaagcatcgacaaggtgctgaggcccaccagccttaaatgtggtgggcgacctaagaagtggaaacggtaa

SEQ ID NO: 33445 - DNA, 1242 bp, Escherichia coli
atggcacgaaaaaccaccccactaactattacggagatcaaaaacgcacgaccaggggaaaaggaatataccctgcaggatggcggaggattatttcttctggtgaagccctccggatcaaaaatctggcgttttacgtactaccgcccggcagataaaaaacggactattatcagccttggatcgctaaatgatgtttccctgtctgatgccagagagcgacggaatgaatacaggtcactcatagcaaagggaactgacccacaggactacgaacgccggaaacgtgaagcagagagcaggaaaaagggcaacacgttcgaaaaagttgcctcggactggtacgagatgaaaaaaggccagaatctggcttacaacacgattaaggatatctggcgatccctggaaaaatacgtattcccgtacatcggaaaaacgccaatagataccctcaccgctcgccgctttgttgagatactcacacccattaaagcacgcggcaacctggaaactctgaaacgcgttttacaacgcatcaatgaagtgatggattttgctgccaacagtgggctgattgacatcaacaccgccgcgaacgtccgcaaggcattcccttcccccactaaaaagcatatgccaaccatccgaccggaacagctaccgcagctaatgcacgatttatcggtcgccagcatagaacggcaaaccagattgctaatcgagtggcaactgctgaccgtagcacgcccagccgaagcagccgccgcacgctgggaagaaatagatctcgatgccgaaacatggacgattccagccggacgcatgaagatgcgccgtgaccatgtgatccccctttgcggtcaggctatggctgtactggaaaccatgaagccaatcagcgcacacagggaacatgtttttcccagccttaaaaatccaatgctgccaatgagcagccagaccgctaacgctgcattgcgccggatgggatacgctggtgtgctggtgtctcacggattacgcgccatattcagtacagcagcgaacgaggaaggattcgagccggacgtaatcgaggccgcactcgcacacgtggacacgaacgaggtaaggcgagcatataaccgaagtaactacctggaaaaacgtgtagtacttatgcgctggtggggtgaatttgtggaagccgcagcaaccggagtgaccatagccagtggtaaaaggggtatccgtgcggtgtaa

SEQ ID NO: 33446 - DNA, 414 bp, Escherichia coli
atggaaatgaccaacgcgcaacgtcttattttgtctaaccagtacaagatgatgactatgctcgatccggcaaatgctgaacgttaccgtcgcctgcaaacaatcattgagcgtggttatggattacagatgcgtgaactggatcgcgagtttggcgagctgaaagaagaaacctgccgcactatcatcgacattatggagatgtatcatgcgttgcatgtttcctggtctaatttgcaggaccagcaatccatcgatgaacgtcgtgtcaccttcctcggctttgacgctgccactgaagcacgttacctcggttatgtccgctttatggttaatgtggaagggcgctatacccattttgacgctggaactcacggttttaacgcccagacgccaatgtgggaaaaatattag

SEQ ID NO: 33447 - DNA, 249 bp, Escherichia coli
atggtatccgaacacctaaaatcaatgttattgaactgtaaaaaacaaaaaacatctgacgttttaggggatgatattataattttttacgccattaattttatttttctggatgacatcttcaattgttttgttgatcccaataaggaaataacgattatcacatataactttcatataaagcgaccaacacttcaattaacagacaagcctttcataagcacatttatatttgagattttttcctga

SEQ ID NO: 33448 - DNA, 225 bp, Escherichia coli; identical to SEQ ID NO: 32523

SEQ ID NO: 33449 - DNA, 543 bp, Escherichia coli
atgaccgtgctcagtcagcccttcgtcagcgtgttcaaaccagggacgttcagtgtcgtattgcgggtggtatctgagcgcactgccgcaaaggtgacaggtgtagcgatcgtaaggtgcagtctgtgcgctacgggcatcggtcagacgtccgttgccatcaagtgcgagaaaagattttgcgtacatagtatatgttccttaccaccagacgacacgcaggcaacagccgtcccggtacgggcagcgtggtcagggtgtgaatggggttcagttaaaatctggactggggtttgggtaaagcaggctggttgctgttacagcactgtggttgtcacacaatggagcactgacgtaaaaaacagtcagtgggcgagtggatacatcgttaccgccagacaacaacccatacttttggtttgccgggtattggctcgccagtcgtgctcaactccggctacagccaaaattgcgctcaccggtgccgttgactttggtgtactctttcgcgagataagcagcacgatccagcgcatcccgtaa

SEQ ID NO: 33450 - DNA, 441 bp, Escherichia coli
atggtctacagctttgcctgcttctttattggcaagtttatagccaacatccttatgacgcgttttaatccggaaaaagtattgattctctattccgttataggggcgctgttcctggcatatgttgcactggctccaagtttcagcgcggtctatgtcgccgtcctggtaagtgttttgtttggcccttgctgggcgacgatctatgcaggaacactggatacagttgataacgaacatacagaaatggcaggagcagtcattgttatggctattgtcggtgccgcggtggttccggcaattcagggatatattgcagatatgttccactcactacagctttcattcctggtttctatgctctgttttgtctatgtcggagtctacttctggcgtgaaagcaaagtacgtaccgcactggctgaagtcacagcgtcctga

SEQ ID NO: 33451 - DNA, 510 bp, Escherichia coli
atgaacagtcttttaacgctggcgaaggacttagagcagaaatcgaaagcgcagcagcagagtaccggcgaaatgctgaaagccgcattcagcgagcacgagaagtctgtcagagcggaactgagcgaaagcgggaagagaatcagcgccgccatccgcgcccacgagcagggtatgagcgcggccatgcagtcgaaccgcctgagcgtgatgcgtatggtcgggcggacatggctgaccatcacgatggtgtcaggactgctgttcgccagcctgagcggggtgttgtggtatcaggggagcttgatagcgtcaaatctggccgaaatcgaccggcagaacgcagcgctgtcgaagctgaacgcgaagacctggggcgtgacgtacctggaagacagcaacggacgttttctggtgctgccgaaggggacggccgtagacaggacgcagagctggacggtcgggaacgggcggtcgaagcagaacgcgctgagactggtgaaggagtaa

SEQ ID NO: 33452 - DNA, 213 bp, Escherichia coli
atgaccgagctggaaaaacagttgctgagcgcattagagcagctacagcaggactactcgaaaaggctggacgagtgggagagcgccttcggggaatggcggaaaatgtcagggcttatgcaacgggagaacgcggcgctgagcgagcgcgtgacgcgcttgagtcagcaggtggaacgcttgagcgggcaactgcagcgtttgagccggtag

SEQ ID NO: 33453 - DNA, 264 bp, Escherichia coli
gtgccggcggtactccaaaaatacatcttgtcccgctgtcgtgtagccacaaaacatttcctgtccgctgctttaacctttgtaatccaggaacgtcaggtgacgtcactttgcggcgttcgccctatcctgcatcgtattaaaaaatgcagctatggcgcgtacggtgccaaagagaagcccgcagatattccgcttcctcgctcactgactcgctccgctcggtcgttcggctgcggcgagcggagggaacagagacattaa

SEQ ID NO: 33454 - DNA, 432 bp, Escherichia coli
atggagaagcaacaagaaaggccgcggcgttgccggttttccataggctccgcccccctgacaagcatcacagaatctgacgctcaaatcagtggtggcgaaccccgacaggactataaagatcccaggcgtttccccctggtagctccctcgtgcgctctcctgttcctgcctttcggtttaccggtgtcactccgctgttatggccgcgtttatctcattccacgcctgacactcagttccgggaaggcagttcgctccaagctggactgtatgcacgaaccccccgttcagtccgactgctgcgcctgttccggtaactatcgacttgagtccaacccggaaagacacgacaaaacgccactggcagcagccattggtatctggtttacggagcggagaggcgtgtacaagcatacacagagttcttga

SEQ ID NO: 33455 - DNA, 1533 bp, Escherichia coli
atgaaaaaaagtgttgttagacaggtgcttgaaatgagcgggccatgcatctcttcggatcttgcagagagaattcagtggcaatatccctcaatgtcccctgaagcgatacgtaaaatgatctcgcgaagcacggacataggtaagctgccatttttgaaattcagccataacaggagattcatttatctaaaagatgattttggcagtttcaaattttggcgagctctcgaaaagtgcatgtacgaagcaaactcaacttactcacacgcgatacttgccgtaataaataatggcggttatttgaaggtgaaagattttgggattgtgtctggatctcctataaaacaagctaaacatttaagttatgaaacagttctaagaaatctactttcggcaaaaatacttagagccgtgtatattgatggagttggtgattgcgtactgataaataacaacatagccaacgatgttaatattagaacaatggcaaattgcgaatccttttttgacaaaccaatatttgagcttgttaaagcttggttgaggaatttaggcctagtcgcttttaatcagataaaaacaaaatatgatggggagggaaatccagttgtaggctcttttgaatgggatatgaccgctccaagttacgtttcccctctcgctgaatatgtcggcggaaaactgatgcctggtttcgttgcctgtgatttttctctcggctttaatcgtgatgaaattactaccgctgcagcagaaacattcataagaaaagtccagatgaccaagtcttctcgagcgagtcagaggataatgtttgttattttcgcaaggcgtttcggcaaaatagccttcaataagttgagaagtgagggggttctggctgtaactatagcaaatgcgtttggtaataaagttgatgaaagcttaaccaggttgtcgagggtggttcagggttctttgtccattgaaaagcatccagatgagttgcttcagatggttaaagatctggagtctgtttctggagagaatggcaatttgagagggtatgtttttgagctttttgtatcctcgcaaatttctaatttttatggccttggtaatatttacattaatagagagtataagataaatggtaagcatgcagaagctgatgttgtattggagagtagtgacgatatttatataatagagtgcaaaaatgttaaggtcttaccttcaactgaacttacgcgttggatgaaagaaagggttccaattataaactcttactataaaataaataatttagaaaaaaagaatatccaccattatttgtgggttacagggaatgtgtacaacaaagatttaaaaaggttagactcttttaagaataataataagaatatcgatgttgattatttgtttggtgagcatttggatgatttcttttacaagaaaaagcgggtgttcaacttatatagaaaagtcatttcacctgattataaaaaaggcgtaatgcctgattttgagttagaggacgattttttctag

SEQ ID NO: 33456 - DNA, 201 bp, Escherichia coli; identical to SEQ ID NO: 9147

SEQ ID NO: 33457 - DNA, 276 bp, Escherichia coli
atgaaaacacgtgtatgtctggtaaaacacttagtagaaaatacgtgtataacacttactgaaatgcttagtaaaatgcttagtgaaataggtgtatatagtatcataccgacattctcaatatcttcagacttccatacatactgggtgttgatttctcacttttacagccagcatggagttttctgttctaaaaacagaaccgatttactctggaattatttccctgataccacattcaacatcgtaaaaacatccgtagcaaaacaactgtaa

SEQ ID NO: 33458 - DNA, 321 bp, Escherichia coli
atgtctagttcccctcctaagcggcttgaagacttgagtctggtccagcgcgatcggctggcctacatcgattttcggctctacttcttcggtgagatcggtcgcccagatctgattgagcgcttcggtgtggctccggcaggggcgactcgcgatttggctttataccgggaaattgtgccgcataacatcaccttcgatggtagcaacaagatctatcgcatcggtcaggagttctccccgttattcgagcacgcatcgctgcgcattctgtcggcgctgtctctcggttttggcgatggagtgaatggctcaatgtag

SEQ ID NO: 33459 - DNA, 168 bp, Escherichia coli
atgcacttccgagtcacaggtgaatggaatggagagccattcgacagggttatcgaagcagaggacatcaacgactgctataaccactggatgatatgggcgcagatagcacatgcagacgtaaccaatattcgaattaaagaaatgaaagaacaccaagccgcctga

SEQ ID NO: 33460 - DNA, 294 bp, Escherichia coli
atggaacttacaagtactcgcaagaaagcgaatgcaattacaagcaacatcctgaatcgaattgctgtacgtggtcagcgaaaggttgccgacgcgttagggattaatgaatcgcaaatttcgcgatggaaagacagcttcatcccaaaaatgggaatgcttctggctgttcttgaatggggtgttgtcgacgacgacatggctcgattggcacgacaagttgcttcgattctcaccaataaaaaacgcccggcggcaaccgagcgttctgatcaaatacaaatggaattttaa

SEQ ID NO: 33461 - DNA, 225 bp, Escherichia coli
atgaatttagtaattcaacgagccttgaaaattgtcggtagccaaaagcgccttgccgacaagtgtggtgtaacgcagccagcagtacacaaatggctgaaaggcgggttggtctctccagagaaagttaccgccatcgttaacgccactggagggcagatcaaggcttacgaaattcgccccgatttgccacacctgtttccaaaaccgaatcaggcagcataa

SEQ ID NO: 33462 - DNA, 570 bp, Escherichia coli
atggttgaattagccaatgctttaaaagtgcgtcctgaatggcttagttctggtattggtgaaatgagggatggtgcacatgaagaaccatccaatgtccgtgagtcatctttaaaagctgtggtatgggaagacattaaaagaaacgatgacgagtttgttgcgttgcctcttcttaacgtttcgctttcagctggaagcggtagctgcgagctagaggaatcatcggagttctctttggttttcagaaagcactatctgaaaaagatgggagtatcagaaagatcagccaagctagttagggttgtagggcaaagcatggaaccaactcttcacgatggcgatgttgttggtgttaacacgcaagataccacaatcagagatggtaaaacctacgctatttgccagtctgatttgttacgagtaaaaacattaatcgccacccctacatcggtgataatcagatcaataaatcgcgaagagtacccggatgaagtaatggatagagatgaatttcatgaaaccgtaaggattattggcagagtattctggtcgtctcatagttggtaa

SEQ ID NO: 33463 - DNA, 297 bp, Escherichia coli
atggaatttctgatagtttttgttgttgttttggtcatcattctttttgttttgctaagcattagcaaaaagctatctcaaatgattgaatatagctctaatcgcgcaaaagaagaagagcatctaattgatataaaagagattctctctgatataaaaatcacattagatgaaataaaatacacaacagaactaattgaacagtataaaatacctaccccaaacgagagaaaagcaatagatcaatatcgtattgacttagaaatcgacgaaatgctaagcaaaagaaaagactaa

SEQ ID NO: 33464 - DNA, 261 bp, Escherichia coli
atgggtgacatgggtgaattttggcgagactggaaaccagaacttaaagaacgacgccgaaaggctcgcgactcggctttcgaaagaatatcggctttctttaggcgcaatgaagttgagtttgaggaaggaaataacactctgatattcagaactccgaatggaacagtagcttattatccgccatcgcaacgcatgcagcataaaaacacctggagagattgcagtcctacctattgcatgaattatgtaaaaaactaa

SEQ ID NO: 33465 - DNA, 372 bp, Escherichia coli; identical to SEQ ID NO: 9063

SEQ ID NO: 33466 - DNA, 435 bp, Escherichia coli
gtgttcgacggtgagctgagttttgccctgaaactggcgcgagagatggggcgacctgactggcgcgccatgcttgccgggatgtcatccacggagtatgccgactggcaccgcttttacagtacccattattttcatgatgttctgctggatatgcacttttccgggctgacgtacactgtgctcagcctgtttttcagcgatccggatatgcatccgctggatttcagtttgctgaaccggcgtgaggatgacgaagagcctgaagatgatgtgctgatgcagaaagcggcagggcttaccggaggcgtccgctttgacccggacggagggcgcgatattttatcgtctgcggatgtggcggatgtcatggtggatgatgccgcattaatgatggcttcagcggggattccgggaggagtccggtatggctga

SEQ ID NO: 33467 - DNA, 438 bp, Escherichia coli
atgctggcgtggtcagagggaactgataacggacggcagaaaaccagaaatcatggttatgacgtcattgtaggcggagagctattcactgattactctgatcaccctcgcaaacttgtcacgctaaaccccaaactcaaatcaacagcagccggacgttaccagcttctttcacgttggtgggatgcataccgtaagcagcttggcctgaaagacttctctccgaaaagccaggacgctgtggcattgcaacagattaaagagcgtggcgctttgccgatgattgatcgcggtgatatccgtcaggcaatcgaccgttgcagcaatatctgggcttcgttgcccggggctggttatggtcagttcgagcataaggctgacagtctgattgcaaaattcaaagaagctggcggaacggtcagagagattgaggtatga

SEQ ID NO: 33468 - DNA, 339 bp, Escherichia coli
atgaacgaccagcaaatcgaaaaagaaatcgttgaggaaggcaaaacggcaccgcgcgttacgccagaccatatcgaaagcattattcttgcggaaacgtacttcactgctgctgatggggctattgcaactggcgatgactatcacgacagtttggctctgctgacattttgtgtattgactctacaaaatggcttcaccgtcaccggtgaaagcgcttgcgccagtccggaaaactttgatgcagaaattggtcggaagattgcccggcaaaatgctgtaaacaaaatctggatgctcgaaggttacttgctgaagcagaagctaagcgaacagtag

SEQ ID NO: 33469 - DNA, 981 bp, Escherichia coli; identical to SEQ ID NO: 22103

SEQ ID NO: 33470 - DNA, 327 bp, Escherichia coli
atgactaaaaatactcgtttttcccccgaagtccgtcaacgggcagtccgtatggttctggaaagtcagagcgaatatgactcacaatgggcgacaatttgttccattgctccaaagattggctgtacgccggagactctgcgtgtctgggttcgccagcatgagcgggataccgggggcggtgatggagggctcaccaccgctgaacgtcagcgtctgaaagagctggaacgtgaaaatcgtgaactgcgctgcagtaacgatatccttcgccaggcttccgcttattttgcgaaggcggagttcgaccgcctctggaaaaaatga

SEQ ID NO: 33471 - DNA, 438 bp, Escherichia coli
atgctggcgtggtcagaaggaacagataacggacggcagaaaaccagaaatcacggttatgatgttattgtcggtggcgagctgttcactgattactccgatcacccccgcaaacttgtcacgctaaatccgaaactcaaatcaacagccgccggacgttaccagcttctttcccgttggtgggatgcctatcgtaagcagcttggcctgaaagacttctctccgaaaagccaggacgctgtggcactgcaacagattaaagagcgtggcgctttaccgatgattgatcgcggtgatattcgtcaggctatcgaccgttgcagcaatatctgggcttcactgcctggcgctggttatggtcagttcgagcataaggctgacagcctgattgcaaaattcaaagaggctggcggaacggtcagagagattgaggtatga

SEQ ID NO: 33472 - DNA, 252 bp, Escherichia coli
atgggaagagatgacccgcaatttaatctgcggctaccttacgaattaaaggaaaaactaaaacagcgagccaaatccaatggccgctctcttaattcagaattagttcagatagtgactgatgccgtatcaaagccatccaaaatttcaggctatcgagacgatgcggaacgcatcgctgatgagcagtcagagcttgttaagaagatggtgtttgatacgctgaaggatttgtacaaaaaacccacctga

SEQ ID NO: 33473 - DNA, 180 bp, Escherichia coli; identical to SEQ ID NO: 18200

SEQ ID NO: 33474 - DNA, 366 bp, Escherichia coli
atgaaaaaagttaacattggaaacgtaccaaagatgctcgttccgctctttgagagcggtacaattgtgttttgtagagactttccagaatggcaacgcctgcatcaaaaacttggcgttgacgtgcatgactcggacgccaacggagcgtctcatacaatgagtagcgagaatggtgttttgcatgtgataggcgtgttcaatggcaaactatctactattgcccatgagtgcgctcacatggcattcgatatctgctcaagggtaggtgttgatgttgaaccaggaagagccaacgagacttactgctacttaatgagcaggcttgttgagttctgcgagcgacatatcaaaaagccggagtga

SEQ ID NO: 33475 - DNA, 144 bp, Escherichia coli; identical to SEQ ID NO: 9158

SEQ ID NO: 33476 - DNA, 336 bp, Escherichia coli
gtgaaagatctgggcgcagtggtgtccttcaaggggtattacggcgatctggccattgtggtggcgaaaacgtcttatgtggcagaggacggtaccgaaaaacgttatctgccggagggcacactggtcctggggaatacggcagcagagggcattcgttgctatggtgccattcaggatgcgcaggcgttgtccgaaggtgtggtggcctcttcccgttatccgaaacactggctgactgtgggcgatccggcccgtgaattcaccatgacgcagtccgcaccgctgatggtgctgctggatccggatgagtttgtggtggtacaggtgaaataa

SEQ ID NO: 33477 - DNA, 474 bp, Escherichia coli
atgcataaatcagaagctgaaaaaatagattctattctggatgaacatcaacagatatatcgcagacataaccaaataaataacatcctggcgtattgtgcgtgtattgcatggattccctgtattattgctgcgttcggcgttgatggtatatatctgaaaatcctgtttgcggtccttgcctgctgtggtgcggtatgcttttttattttcttcttcactctcctgccggaatcactcatggtcctcagccgtcagagcctgcttcagcttatgcgtctgactgaagacgtaccggatgcgagacaggaactgcttaaccgtttgttgtccggtaaaaaactgactggtcgggatgaacaggatatccggcgtctctggcaggagaaagtggatgcaatgcaggagtctgccacccgtcagcgtgaacaggatactattcggaagtttactgaagggaataaatccgaatga

SEQ ID NO: 33478 - DNA, 219 bp, Escherichia coli; identical to SEQ ID NO: 20865

SEQ ID NO: 33479 - DNA, 219 bp, Escherichia coli
atgcatacctttatttttcttgtgctgataaaaaatattaacggtggcggaagctggaatgttacccccatgccaaatacggacgtatgcgtgcaggttcttcggacaatcgaagcacacggaggcaggggctttggaaatacaggggaatgtattgaagttaaaacaaataaacctttgaacaacgtgatggatacactgaatggtggtgggcaatga

SEQ ID NO: 33480 - DNA, 474 bp, Escherichia coli
atgcataaatcagaagctgaaaaaatagattctattctggatgaacatcaacagatatatcgcagacataaccgaatagataacatcctggcgtattgtgcgtgtattgcatggattccctgtattattgctgcgttcggcgttgatggtatatatctgaaaatcctgtttgcggtccttgcctgctgtggtgcggtatgcttttttattttcttcttcaccctcctgccggaatcactcatggtcctcagccgtcagagcctgcttcagcttatgcgtctgactgaagacgtaccagatgtgagacaggaactgcttaaccgtttgttgtccggtaaaaaactgactggtcgggatgaacaggatatccggcgtctctggcaggagaaagtggatgcaatgcaggagtctgccacccgtcagcgtgaacaggataccatcaggaagtttactgaagagaaaaaatccgaatga

SEQ ID NO: 33481 - DNA, 177 bp, Escherichia coli
gtgttcctgttgaagaccatactgactgctgatatcgaactgcaatttcccggtcacggactccagcttatcgccgcacgttatctgattgccttcgtaaatgaagtcgatagcgcggtacacatcgtcatacaagccagttttcaacacacaccattgtgggccattggcgcttga

SEQ ID NO: 33482 - DNA, 339 bp, Escherichia coli
atgtgtgatgcggtggaaatcaacagcgggctggtccggtatctgcgggataattttaacggtgtcagggttcagtgtggcgatttcatggaatggcagccggtgcagtattacagccgggttatcatgaatccgccgttcagccacgggcaggatatccggcatatcctgcgggccttttccctgttgcgtccgggtggcgtgctggttgccgtctgtctgaacgggccgcgccagcaggagaagctgttaccgttttctgacgtccgcgaggagctgccacgcggtacgtttgcttataccgatgtcccgacgatgattattcgtctgcgtgcctga

SEQ ID NO: 33483 - DNA, 249 bp, Escherichia coli; identical to SEQ ID NO: 5145

SEQ ID NO: 33484 - DNA, 339 bp, Escherichia coli
atgtgtgatgcggtggagattaacagcgggctggtccggtatctgcgggaaaattttaacggtgtcagggtacagtgtggcgacttcatggaatggcagtcggtgcagtattacagccggatcattatgaatccgccgttcagtcacgggcaggatatccggcatatcctgcgggctttttccctgttgcgtccggggggcgttctggttgccgtctgtctcaacgggccacgccagcaggagaagctgttaccgttttctgacgtccgcgaggagctgccgcgcggcacgtttgcttataccgatgtcccgacgatgattattcgtttgcgtgcctga

SEQ ID NO: 33485 - DNA, 219 bp, Escherichia coli; identical to SEQ ID NO: 20865

SEQ ID NO: 33486 - DNA, 285 bp, Escherichia coli
atgttaacaatacaacaactggatgagtttaaaaaagatatagaaaaagagttaagaatcgttaaatgggcgccaacatatactcagattgctgatatgcatcgccgaatcatggctgtaataaatgataatggcaccccaaatattagaaagatcgtaaatgatgtttatgggaaaccaataactgtttttgttacggatggtctggatatgtcaaccgagagtacccttcttgctaaactgagagctcaagcacaagagagacaacaaggagataaaaaataa

SEQ ID NO: 33487 - DNA, 789 bp, Escherichia coli
atggatattgaaggagtcatggaaaaacaacgctgtgaaatagaaagacacagatttgaatatcgtgcaaaacttgatgaatgtttaaaaggattgtgcgactttaacgatgttcacatgattgcctgtgacttcttcaattatttagacacctgtgcttcgcagaataaaacatcatcaaaaacagtagatagtgattggaatcaatggcttgctgaaacctgtcttaatgttctagataccattcatgaacattattcaacatataaattattatcaccgaatgagtttcgcttaccaagccgaacagcctttgcatcaatgcaaagattggtgaaagagcattaccatgacaatgttctgctagaaatcaaaagtaaatttgtagaaagcagccttccaatatttggttttgacacaaggaaaaaaattagcgtggctaaagtcatactttctgtatcaatgcttgtcatttcagcattgctaatcactattgcaatggtatttcccggtgaatataacattccattcatattggggattgggttcttcttcgtgttgtttatagcattactttttattccacacccgacaagccatcaacacgacacattaagaacattgctaagtatcgctgcagcaggagtaataacaaccttccccggatttattgagttcacatatacaaataaagctggatattccataactgcttttggttcaatagcaattttccttgttgtatacctgattaaccctgcaaagcttagagaaaagatcgaaaaataa

SEQ ID NO: 33488 - DNA, 321 bp, Escherichia coli
atgattcagtgtgcccgtctggccttcggatttgctggtatctatgacaaggatgaagccgagcgcattgtcgaaaatactgcatacactgcggaacgtcagccggaacgcgacatcactccggttaacgatgaaaccatgcaggagattaacactctgctgatcgccctggataaaacatgggatgacgacttattgccgctctgttcccagatatttcgccgcgacattcgcgcatcgtcagaactgacacaagccgaagcagtgaaagctcttggattcctgaaacagaaagccactgagcagaaggtggcagcatga

SEQ ID NO: 33489 - DNA, 321 bp, Escherichia coli; identical to SEQ ID NO: 33488

SEQ ID NO: 33490 - DNA, 312 bp, Escherichia coli
atgcgaaatttaggcactaatacctatcttgatttgatgggggcccgcaataaatcaaatgaacaactagaaaaggaggaatttaatatcttactacggaaagaagcggaagcgattgccgcgcgtattcctgaattagtaacgccgttaattgatgaacgggtagctgatttatttgctgtaatgcctgacagcttaaaacaggaagatagagtgacgcatgacaaatttgacgagcacgcgctcaggaatatgtttgccggaatcgtcgccaatcgtcttggcctgggctttagcacattgaggaaataa

SEQ ID NO: 33491 - DNA, 378 bp, Escherichia coli
atgacgcgcaaagaatatattaaagaactggcacgggaaattattcagactaaccagccagtgattgaccggatcgtacagcgggaagtcgataaaatcaaagcgcagcttgcctcactcgcgacgaacatggcagattgccgaaaaatgctggctgtaatggggtcaaacagtgctctggcaacctatttagcaaagactgatgaactagctggctttagatctgacatcgctacaaacgcatccacagcgccacagaaggcaccaaatccgcgagattattttgacgggaacctagatgatttcacgcgccagtatttcgacggcagcgacgagtttaacagacgcttagacgattatttctatatgggagaatga

SEQ ID NO: 33492 - DNA, 339 bp, Escherichia coli
atgagttttttagatatggcccgccagcgtattgctatggcggttaaagcaaatgaattagcgccggaaccggatgatgctgaactgaaattcaaaaaaggcatggcgcttgtgttagagaacatcgataaggtcgatgaaaagttattacaggaaatgatggttgtgctgatggacaatttggagcgccgctttggtggcaaacagccagtagaacaacagccagccactaatacccggcacggaccgaaaacaccagatatcaatagctactttactaggccagctaataaaccaggtaacagtaaagcgccggattttaacagctattttgactaa

SEQ ID NO: 33493 - DNA, 183 bp, Escherichia coli
atgtatttcattaaagcaaccgtgaaacacacagccgaaggaagcgccgtctctgaaacattcagtgattttttgggtagtgcgaccattaagttggctgtggctgaatttggggaagcggtaaaagataaatttggtagcgatgccgagtttgtcgttgaagacgttaaacagatcttctga

SEQ ID NO: 33494 - DNA, 762 bp, Escherichia coli
atgaatattttaccatccgcctatgtctcgcaacaaggcgaatcgctaggcaaatatgaactacagaaaatcgatgcgatcccggaagaagtacaaaacgccatgcgtgatggcctgaatgatatccgctttaacggttatcgctgggaatgcaacgccaaaacaggctgggcgcgtgtatcactgatttcatcacctgccaatgcagaaccggaatcacccgaacaaagccaggcagacgcccgcgctgatttttttgcgttacagggtgagtatttatcagttaagccagaaagcaaaagcgagaagaaatccgccgtcgatatcgtgaacgacttacgcagtaaagcagccgctaagccttcgcaggcagcaccgcagcaggaagcgccggaagaaccggaagcgcacgaagaagaacaagatcgggaagaaagcgaacaggacaataacaatcacaatacttttcattgtgatgaatgcgtcgtagcggtaagccgctttatcaccaaaaacgcattacagcgtgagctttccccggcgtgcatgaccttgttatggtttatggcgacgaaagccagccggaaggatggacaatggatcgtctggtactcaatcaacagaatggcagaaatgagcgggcttggtcgtgccacggttacaagggcgctgataaaacttgaatcaatgaagatcatcacaagaacaagaaagggaatagccagggtgaaaggtgacacatacagaatcaacgtcaattaa

SEQ ID NO: 33495 - DNA, 273 bp, Escherichia coli
atgacatcgaaatacacttatcttccggttgcggattatcgcaatacgactgagcaattattccgtcaagcaattgttcattacaacgcttgcgtggggaatgatgaacgagcttcctggcgtagtcagtccattatggcgctggaaataacagcggatatcaactgtaagcgtgcaactgaacgtgaccggcaaaatttcctttctgccaggaagcgtttgcaggaacgtgttaacagcgtgctggcttccggggaggtatgtcatggataa

SEQ ID NO: 33496 - DNA, 345 bp, Escherichia coli
atgttttcacgtgatattgtaattcgctctggggatagccattcaataattgatttaactacaggcgaaagaataaataaagccaaaagtgtaatcattggaaagcatgtctggatggggtatggagtgaatattggaaagggagctgttataaagcagaatacaattatcggcatgggatcatatgtaaataaagaatttacgagaggaaatgtaatattagctggcacacctgcaaaaatagttaaagagaatgttatttgggatagacgtagccttggcaatgatataccaaagagccacattgatgcgttgaaaagtaactatatgtttactagcgactga

SEQ ID NO: 33497 - DNA, 1395 bp, Escherichia coli
atgagtttaaaaaatattccaacgaattggtgtgtaactaccataggggatattaatgactataaatcattaacttttaatcccaaatcataccaggaggacagcttcgaattgtatagcgttcccagctttacatctggctcaccagaaatattactgggaaaagatattgcctccaataaacagtatattcagtttaaagatattttattatgcaaaattaatccccgtattaatcgcgtttggtgtgtaaaagaaaaaaaagaacatcctcaaatcggttcatctgaatggattgtaatcaggcaaccgctcattcatgaaggttttttggcctattttttgcaaacacaagatttcagagatctcctatgttctgatgtttctggtgtgggtggttctctgacgagagcgcaacccaaaagagtcgctacatataatgtccctatagcacctttgccagaacaaaaaatcatcgctgaaaaactcgatacgctgctggcgcaggtagagagcaccaaagcacgtcttgagcaaatcccacaaatcctgaaacgttttcgtcaggcggttttgaatgcagctgttacagggacaataacccaagatatgcaaagtacgcctggcaggcgggtaaaatatttaggattaaatatcccaaatgaatggctaatttgtcaaattagcgatatatcagatgtgaagggtggaaaacgccttccaaaaggggaaactttaacttctgaaaatactggccatccatatataagagctggtcaattaaaaaacggaacggtacaatccgaagatcaactttatcttcaacctagcacacaaaaattaatatcacgatatattgtttcggctggagatatctacatcactattgtcggtgcatgcatcggtgatgcgggtattattcctgaatattatcataatgcaaatcttacagaaaatgctgcaaaaatttgcaatattcatagcaatgtcttaaataaatatctatccatttggttgaggtccagtcatcttcaagacatcatccattcagaaataaaatctggagcacaaggaaagcttgctttagcgagaataaaaaccttgcctttaatattaccccccctccccgaacaacacgaaatcgttcgccgcgtcgagcaactcttcgcctacgccgacaccatagaaaaacaggtcaacaacgccttagcccgcgttaacaacctgacgcaatccatcctggcaaaagcgttccgtggtgaactcaccgcccagtggcgggccgaaaacccggaattaatcagcggagaaaacagcgccgccgcgttgctggaaaaaatcaaagctgaacgcgcagccagcgggggtaaaaaagcctcacgtaaaaaatcctga

SEQ ID NO: 33498 - DNA, 198 bp, Escherichia coli; identical to SEQ ID NO: 30226

SEQ ID NO: 33499 - DNA, 405 bp, Escherichia coli
atgaaaattgaactcattagcaaaaaagttgaacgcttggttatgacacggctagaaggcgattcaacagcaaaaaaagccataaaaacaaccgttaatctaaataatgaactttacactaatgtgaaggattcaaagctatttagagtgagatattttgcctccgtaactattgaaggcaggcttgagatggacatcacatacgactttgacttccggtcagaagatgatttttctcatgaaatggcaaaatcatatgaggtaaggtccattgctcccaatatggcatatccctatataaaaacatatgccgagcaaattatcctcatgtcaaatcttggtaggttcactctgccttattttgatttcttggccaatcccatggaaacgaacagtaataagtga

SEQ ID NO: 33500 - DNA, 657 bp, Escherichia coli
atgaatcgaactagctggcgcatcattaaaaatagtgaagagcatgctgcagctatggaaaggctcattgaacttgcgtctagtgatttacaacctggaactgaagattttgatgagtttgaactactaggcttgcttatcgagcactatgagtcacgcgagttccctatggacaagccagatcccatagaagcaatcaagttccgtatggatcaacaaggcctctcttatgccgatatgaaacaatacattggctcagcatctaaagtatctgaggtcttaaatcgtaagcgtccattaagtctttcaatgatccgtagactacatgacggacttggaattcctgcagatatcttaattcaagatatgagcgcaattgaatggagcctagttgacgcagaggaagaagaaacagccatgactagcgtcattgctcgatgtgagtcagccgtcacatcaccttctgcttatttcgctgaaaaggctacagaatcttacttttcaaaaatgttgttcagcgcagtaaggggtaacgacaaatgcaaagaaaaacggaatgttttttctttgataagtaacttgtcatcaagtttcacagcggctagcaacctgaatgacgaaatgacttctgacggaaattacttattattaccatga

SEQ ID NO: 33501 - DNA, 210 bp, Escherichia coli
atgtcagttgctgttttcgaggcactcaatgcacgtattaaccaacttgaaagtaagctgaaggaatacgagcagcgacaggctgaggcagatgagaagactcagaacgaacttttcctggagtttcttgccatcgttcgcgaactgatgccgttagttaatcaggcgctgatgacagggctgaaggatggagatttacacagtaggtaa

SEQ ID NO: 33502 - DNA, 399 bp, Escherichia coli
atgacaccttcaaagttcctgatcccgctgctggccgttgctgttcaggcaccggcagcgaccgtcgtctacaccgatagccatcatcccccatcgaacgttgccagcagtcaggtggtttacctcgatgccccggataccgttcagcgccaattgtttggtgaattgccaactgacccagtacaagctgaacaggttgcaaaaactatcatccagtcaccggactggcagcaaaaacagcaacaaatcggacaggcgtaccagggcgtacttcaggcatacagcctgaagctggtgaagtatcccgccgtagtatttgacgatctctacgtggtttacggcacggcagatgttgcagtggctgaagcccgccttgctgaatttcagggggtgcgatga

SEQ ID NO: 33503 - DNA, 957 bp, Escherichia coli
atgacttttggcgtatgctttttgaaaatggaatgtcgttctaatgttgatagtaagaacaaaactgtctctacaccattctctttaaaacaatcatcattacagcaagttaggaaggaagacattttggctaatcacatccccagttcggtcatcggcactgttgcttcagctattgctgagtactattacagccattcaacgttaaatgctttattcatgtctgcgggcgcacctggtgatgttccagaaggcaattgtgaaaagaaaagcatggattggctcaaaagatgtaacgatgacccaaacactgatgctctggccgtcctagggatggttattcaaaagattatggacaaagaaccatcatgctatgatagaaaattggaatccgctcagaaaaaaattcacgaatgtttagcaaggagtcaattatcatatcagatgaatggcgtaataactttggctggttcagggatcacatccaagacactggtggattactttaaaactggtgatttttcatcaattgaagcagaattcaaccgttgtattagcaacgtagaatctgaccctcacgcagcaataactgcatcctgttcaattattgagtcattgtgtaaaacatatattgaaaccttccagcttgcttttccatcaaaacaaacagtaatgcctctctggaaaacagttcagcaaagtattgggttaagcatagatccaacgctacaagaggatcagaaaaaaattctgcaaggattggcatctattgttgatggtattggtgcatatagaacgcatatcggctcagcacatggccgaggattaacgccaccaacgattcacccttcagaagcacgtttggctataaatgcatctcattcactcgtaacgtttattatggaacgctggcaagcagcaaaacccattaataataactttaatacttatttttga

SEQ ID NO: 33504 - DNA, 384 bp, Escherichia coli
atgatgcgatttcggtccgcagtgctggacgttgtggacggtaatattttcactaccagcgtgttgttcgatgcgccgccgcagggtaatccgcgaatcagtcagtgccatcatgagcaactgaccgagttatgtcgcctgatccgtcagcgggtaggggagaaggcgacatttacctgctcgcctcatcgcgtggccgggcataactgcctggctgtgcaggtggtgggtaagacgggaacggttaacctactgctcactgtcactggtagtctgcgctggcctacgatggatgattatgagcatggggtacgctggtatattaatgtgcctgatgcggtagatgtggtttatctggtacgggagctggtagggatattataa

SEQ ID NO: 33505 - DNA, 756 bp, Escherichia coli
gtgggattaatacttcagggacataaagttatcgtcgatcatgattgccgtgactggctaattactcgtccacagggtaatcccaccatagaacactcaggcgacctgaaaatttactcagtattcaaacgccagttactctcagctaagcgcagacgtaaccgtgaacaacggcaactgggtgataactgccctttgatttatgccctgaaaggtaaagaagagcttacaactgatataaccagtattaagaggttgaacgaaagctttgggatcatcctggaacagatagcaaggcaagaacctgatggatatcagcttataatttccatgccatctgctcataacatcagtcacatagtcgcgagacggtttgccaggatgtttggttcttttcactcagcaaatcttctacgcaaaatcacagttgaagaagcattcaaactattggatcgcgcagatatcagcgtcgaagagaccaggagcctcgactatcgtattaagttgcaggctaaagaagttggttttaacggtaatttctcacttaaaggtattcctgcgggtcttcgtgatgcactcccaccgctgtctctgaatgttttacctgagctaaacttccgaccaaggcggattcttctcgttgacgatctcatggcatcaggtacaacgttacgcactgctgcacatctcatttcacagcaatatcctggcgcaacgattcatgccgcatgcttattcagttctattggaaggtag

SEQ ID NO: 33506 - DNA, 717 bp, Escherichia coli
atgaaagagtccgttagtttcatggaggtgcccgaaatgaaagcgtcggtcagacctgatcgcagcaaactccgggcggtagttcgttatggattcggtggactggttttatttgtactgggtggaaccacatttatcagccttaagtccgtccaggtactttctgccgaggtcagacagcttaaaacggcattgcagggtagtccggatatcgcgccactccgggtacagctgacaacgctgcaacagcagtttgaagcgtcacaaatgcaactgggaggaatggctgacaaaccggcgcttgcggctttacagcagaaggttgaggcgctggataagcaacagaaagagcaggcagcttcggttacgacccttaaaaccgggctgtcttctcttcaggaactggttcgtgctctgaatcagcgcccggccaatgctgtcgttgctcctgccgtaacgtctgatgcagtggcagtaaagaaaaagcccacacagaaaacgcagcggccagctacagcacccttcgtcctcaccggtatcgaacggcggggagggatagcctttgccgcgatagcgccgcaatcagcaacgcaactgacagaaatagcgctaatggaaccgggggaaacccggcagggctggacactacagtcgattacgggacagcaggcgcagtttcgcgtggcggggcaaacccggacattgacggcacgataa

SEQ ID NO: 33507 - DNA, 1071 bp, Escherichia coli
atgccccttcaaacaagaaatgtttttattgatacagagttctttgttaaggccggacttgagttttcatctcgtacattagaatcattcaaaaatatatgcgcagatggtcacttgaggcacattacaacatcgatagttgtgagggaggtcaaagggaagattagcgatagtatccaagagtcgataaaaagtgtaactaattttcgacgaaaagccaaaatacttacaagctcaaataagcctgaaattcaatctttatttgtggctttggatgccgaagagattgaacaacatgcgattgaattatatgacgattttttatcagactctgattctactattcttgaacttgaaagtgtatctgttgataaaataatgaatatgtatttcaattgcttgcctccgtttcaagaaggaaagaaaaagcatgaatttcctgatgccttcacgcttttggctatcgagaaccatttgcctgagggagagtgtatttatgttgtttctgaagattccgatttaattgaattttgcaaagttactccacaatttattgctgttgatagtctaagtaaaattcttgatatttataactctcatgatcaggagagagctagtttcattaagcagtatgttgcagaacatattgaagaaattaaggattctatccgagaggatatcgaagatgctgacgtgtataacgcttccagctgggaagatgcggaagttgatgaactgacagtagatcatattcatgattttgaaccatcaataattcaaattgatgatgaaagttgtctgttatctttcaatgtagatgttgattatacagtttctgtaactgggccagattttaataatggaatctatgataaagaggatggccgtacatatactttcgggagtacaagccgtgaagatacaggtactatcaatgtctttgtggaagtagaactgccaatggagattgttgatactcaatttgttgtacaggatagatatgtcagtgtgagtgggcttactggcggcattgaagtgtgcgtggaagagaatggatatgaggattattaa

SEQ ID NO: 33508 - DNA, 564 bp, Escherichia coli
atgctcagtaataaaacggcctttaccggatggttcatcctgagtacctgtctgagtggatgtgcgagtgttgacagtgtcaacagtgccatcaaccagattagcggcgggaccttctccgttaacccggcaccggcagacaatgacccagcggtgttgtcaaaaggcgtaccgcaggccagccataaaatcgtgcaggaataccatgttcccgttgatgttgatacagcagcggcgcgggtaaaacgttactaccgctttatctcggctgaagaggtggcgcaactgcgtaacaacggtacgctgagtgggggatggaccgcagcttcagcagccgatgaggcatgggtgtgggatggacaacccggcagctattacaaaatggggcgcgcctggggaagtgagaataccggcgacagtgttcagattgagctggagaaaaacggttccggcagccgcctgtatatcacctttcgttccggtctggcctctcatgccactgcggcttacaccggtaatctgtttgagaatatgaagggcgtggcagaagggactatccgatga

SEQ ID NO: 33509 - DNA, 846 bp, Escherichia coli
atggatattatgtttgttatgggcttgaatggttctcagttagattctaaatgtagactggaaaatcaggacgggctatatggtttatttttagaatcttggggacaaaaaaacaacccacaatacaatgaagcactaaaaacgataatttatcgtatgcaagtaaaaaaaatcaagaaacttgatgcttttattgcatcagaacctctcttgaaaaacatgccatcaaaagatgaacgcaggctttcaaattctgacgatggttattttcatattaaccaagttaatgctgaaaagttgagactggagttatgtagaaaacaaaaattttttagtgcatatgcaaaaaaagaaaaaccaattggaaatggaacaaaaaggatttttctacatgcggaggaacttcaatcgcaaaatgattggaaagagattgtatttggggaggacagttgtaattttggcctcacagataatttagaaatattatccaaccgagcgttcaagcttttaaataaaaaattaataaaacctgtcggagtagctaaaccatccaaatcaacaacgaaggtagacgtatatctaagatgtcctgatgtagtttcttacatattgaaaataagtaacggagtatgtgagaactgttctaagcttggtccctttacaaatagtctaggtatcccctatcttgaagtacaccacgtaattcctttatcaaaaggtggagcggatacacctgaaaattgtgttgccctataccctaactgccataaggctttacattatgctgaaaatattaatcagataactgaatttttatataaaaaatgtaatcgactccaaaaataa

SEQ ID NO: 33510 - DNA, 1005 bp, Escherichia coli
atggggtataaccaaagcaaaaatgcagctctaaatgaaacgcattctttaaacatgagatataaagctcttttacgatgtatttcatatgtttgtaaggttgagtcgtacaaatttcctgaaatgcttaaaagcattgatacaggattgaacgaagggttagcatatgatgctgccgccgaaaagataagaaattgcatcccgttattagatagtaaaaggagtggggtaagggctgtttcattaagaaataatacagttgtagaggtattagatgatgattatggttatgattgcgaggggatttctacgtattataaaagaaaggtaattaatagatgtaaaacttttaaatttcttaaatggaaggtgttgtttggtgttaagagagtaaatagtaagccattgagcaaggaagatatgaaacatatgtttcatgttcaatttcgggatttttctccattatttgaaagcattgcttttgatttggctttgctattgaacaaaaaactaaagcatatagattctaaattagcatttcaacctcagtatcgtaataaaagctgggattcagttgctagcaagataacccggatgagtataaatatcaactcattaatggatatgcaagacttaataggtttgcgcgtggttaccgtgtttgagaaagatctatctttggttgagaatgttattgaaaatagttttaagataatgaggcgctataagccaaattatctcgctgttgatggtgatacttttgctaagcatttcataatccaagtttcaactcagaatgtctgtaattacatggatgataaaccaccttttcttttggctgaaatacaaattatgactctaacccaatttacgtttgcaagtctctcgcactcgttgctctataaaaatgaactaaataattcctctgtaaaggattcacttgcgagaatctcaactttactgaatgaagtaggcagtgaaataaatgaaaaaattaaaaaataa

SEQ ID NO: 33511 - DNA, 243 bp, Escherichia coli; identical to SEQ ID NO: 24693

SEQ ID NO: 33512 - DNA, 327 bp, Escherichia coli; identical to SEQ ID NO: 5216

SEQ ID NO: 33513 - DNA, 498 bp, Escherichia coli
atgcctccatcattacgaaaagccgttgctgctgctattggtggcggagcaattgctatagcatcagtgttaatcactggcccaagtggtaacgatggtctggaaggtgtcagctacataccatacaaagatattgttggtgtatggactgtatgtcacggacacaccggaaaagacatcatgctcggtaaaacgtataccaaagcagaatgcaaagcactcttgaataaagaccttgccactgtcgccagacaaattaacccgtatatcaaagtcgatataccggaaacaacgcgcggcgctctttactcattcgtttacaatgtgggtgctggcaattttagaacatcgacgcttcttcgcaaaataaaccagggcgatatcaaaggcgcatgtgatcagctgcgtcgctggacatacgctggcggtaagcaatggaaaggcctgatgactcgtcgtgagattgagcgtgaagtctgtttgtgggggcaacagtga

SEQ ID NO: 33514 - DNA, 207 bp, Escherichia coli
atgaataaagaacaatctgctgatgatccctccgtggatctgattcgtgtaaaaaatatgcttaatagcaccatttctatgagttaccctgatgttgtaattgcatgtatagaacataaggtgtctctggaagcattcagggcaattgaggcagcgttggtgaagcacgataataatatgaaggattattccctggtggttgactga

SEQ ID NO: 33515 - DNA, 333 bp, Escherichia coli; identical to SEQ ID NO: 12755

SEQ ID NO: 33516 - DNA, 483 bp, Escherichia coli
gtgattacccataatggtgctgccaccattgcttcaaggcacagaatcatccagcccacgcagacaccaaaccacatgacgtatggcagcattggaataacaacagctaatgtagcaccagcaacccatagcgggatcaccagtggcataacgacaccaattgcaccaaaggctccagacaaccagtttgcagtaaatgacgtccatattccaagacctgcaccaacaacagcagagccacctaataaactccacccggcggtactgagtgtatcgccaaggcctttaacggctaacagggggttgatagcctgtaaatttgctgccgttgtatctgttgaaaatgcgacgagttttccttgttttctgccattgattacgcttgaacttaggaaaccagccattgcgccagaaatactcttatctgcttcactcttgagtgaagtgattattttactggcatcatctgttttagacccctga

SEQ ID NO: 33517 - DNA, 324 bp, Escherichia coli
atgaacaattacccaatgcaaattatggttgatagcgacaccgctatgatgattcaggctttcactgatgtaggtgttagcattgactttgacaggctgttaaggctaatggctgataactcagaaacaattgaagattttattcagtcggtggagtttaacgagcctcgaatgatgctaccaattaaagacagcaacatgaaaagattggttatcgagcaaacgaacaaacacagcgttagccctgaaagatatctcaaggcagctatagcaattttgtacgctgacaatattttggtgacggattctgtgaggattcactaa

SEQ ID NO: 33518 - DNA, 243 bp, Escherichia coli
atgttgctgttgatattcgacccaattcggtatcctttggtaaatgggttggtgttctgctttcagctgataataagcagcagttgtggataccaaaagggtttgctcatggctttttggttctgtctgatatcgctgaatttcaatataaaactacaaactattatcatcctgaaagcgattgtggaatatgttggaatgatgaacgcattgcaattgattggccccaaacatcagggttaa

SEQ ID NO: 33519 - DNA, 297 bp, Escherichia coli
atggatgacaaggagttgcacgattacctgcatagtatgagcaaaaaagagcgccaggaactggcagcaagattacgcctggtgaaaccgaaacggcgtaaagactacaaacagcgaattacagagtatcagcgtcagcagctcgtctatgaactgaagtcaagaggatttgatggcagcgagaaagaggtcgatttactccttcgcggtggcagtattccgtcaggagcaggcctgcgtatcttctatcggaaccagcgtttgcaggaagatgataagtggcggaacctgtattaa

SEQ ID NO: 33520 - DNA, 483 bp, Escherichia coli; identical to SEQ ID NO: 21028

SEQ ID NO: 33521 - DNA, 1536 bp, Escherichia coli
atgttttccagattatttgtaaaaaaacatactccagctatggtggcaggtagtctgatatttctgttcattattctgctgacatttttctggaaaaaagcagagctggtgaatgacagccagatcagagttaatttcgcacttggctatatagaaaacattctcaatcagaacaacagcatcagccaggaagcagaacatttgcttctgaataactgtaacgcagatactcagcatgaattaagcaatctgctgctgaaacgcccacaacttcgtgcactgagcctggcaagacaagaggctgtattttgtagcacccaccccggtttacctgtcggtccagttgctgaaaaggaacagtggcggcacgatatgctgattcgttttcctgaagatacaggtactctgccctggatcctgttaagaacaccttacaaaaacggcacggtcattaccgccacggattattattttattcaggacatcatctctgtggttcatgcggttcctgcaatacgattccgtttgggaaacacggtcctgtcagccagcggaaaaaatgtcactctgctcccggacgacagcggtatacaaaaagaaagtcattcaaaaaaatatccgttctccctgatttatatcatcccggtgaaaatgcaacttacctacgcctggaaacaggcctggtatatgatccctgttgccatcttcggtggaatactcacagcctttctgctgtcccgccgacgtccatcttccccgctcgatatgctgaaaaatgcacttgctcacggagagttcaaaccttattttcagcccatcatttccgctaaaaatcaccagctaaccggctgcgaagtactgattcgctggcatcaccccgtcagcggaattatcccaccagatcagtttatcccgctggcagagtccaccggattaattgccccgataacgcaacagttgatgtctcaggtcgaacatagccttaattctgttgcgcattttttaccgaatcaatttcatattgggatcaatatttcaccagcgcattttctgtctccgggactggaggatagctgtatgaagtttctatccaccttcccgaaagggaaagtgaaactggttctggaactgacagaacgaaaccagctatccgtcaccgcagaatcaaaagcgttatttgcgaaattacatcaacagggagtattgtttgcactggatgattttggtactggctatgcaacccacagctacctgcagtcgtttcctgtcgattacatcaaactcgataaagagtttgtacaaatggtcggcgtggatgaaatctccgggcatatagtagaaaatgttattgagctggctcgccggttaggtattgatatcattgccgaaggcattgaaaccgaatcacaggaattgttcatgacagagaaaggaagctgctatctgcagggataccgctatgcacctccactacccgctgaacagtttattgctgagtgggtatacaacagcggaaacggcaaaaaccagagataa

SEQ ID NO: 33522 - DNA, 1590 bp, Escherichia coli; identical to SEQ ID NO: 8052

SEQ ID NO: 33523 - DNA, 549 bp, Escherichia coli
atggattcttgtcataaaattgattatgggttatacgccctggagattttagcccaataccataacgtctctgttaacccggaagaaattaaacatagatttgacacagacgggactggtctgggattaacgtcatggttgcttgctgcgaaatctttagaactaaaggtaaaacaggtaaaaaaaacaattgaccgattaaactttatttctttgcccgcattagtctggagagaggatggacgtcattttattctgactaaagtcagtaaagaagcaaacagatatcttatttttgatctggagcaacgaaatccccgtgttctcgaacagtctgagtttgaggcgttatatcaggggcatattattcttattgcttcccgttcttctgttaccgggaaactggcaaaatttgactttacctggtttatccctgccattataaaatacagaaaaatatttattgaaacccttgttgtatctgtttttttacaattatttgcattaataacccccctttttttcaggtggttatggacaaagtattag

SEQ ID NO: 33524 - DNA, 489 bp, Escherichia coli
atgaaactggccctgacgctggaagccgacagcattaacgtgcaggcactgaacatggggcgcattgtcgttgacgtcgatggtgttactctcgctgaactgattaacgtggtctgcgataacggttactcccttcgtgttgttgatgaatctgaccggacatcagcagagcgcacgccaccatctgcggcccttaccggcatacgctgcagtaccgcgcatatcacggcaaaggacaacgcctggctgtactcgctgtcacatcagacgaatgacttcggcgaatcagaatggattcattttaccggtagcggatatctgttacgtaccgatgcgtggtcgtacccggttctgcgacttaaacgcctgggcctgtcaaaaacgtttcgtcgtctgatcgtcacgctcattcgccattatggcgtcagtctcattcatctggatgcctgcgctgaatgtctgccgggtctgcccactttcgactggtaa

SEQ ID NO: 33525 - DNA, 312 bp, Escherichia coli
gtgaatgaagttagtgaccagcaagatacaccttgccgcctcgaatcaactgatgatgagatggaccccttcgatgattaccttgatgatgaagaagaccctgaagaggaattgaaacgtgaacagcgtaaagcagaaattaaagaaagattcagaaatgcgaagctaaagaacaaggttagtgacctcgatgactttgatgatagtgacgatgattttacttttacacccagaaagaaaactcacactgattcaaagaaagagaagattaaaccgaagatgtattttgccggtggagggattgagcaatga

SEQ ID NO: 33526 - DNA, 405 bp, Escherichia coli; identical to SEQ ID NO: 25332

SEQ ID NO: 33527 - DNA, 489 bp, Escherichia coli; identical to SEQ ID NO: 33524

SEQ ID NO: 33528 - DNA, 489 bp, Escherichia coli
atgaaactggccctgacgctggaagccgacagcattaacgtgcaggcactgaacatggggcgcattgtcgttgacgtcgatggtgttactctcgctgaactgattaacgtggtctgcgataacggttactcccttcgtgttgttgatgaatctgaccggacatcagcagagcgcacgccaccatctgcggcccttaccggcatacgctgcagtaccgcgcatatcacggcaaaggacaacgcctggctgtactcgctgtcacatcagacgaatggcaccggcgaatcagaatggattcattttacaggtagcggatatctgttacgtaccggtgcgtggtcgtacccggttctgcggcttaaacgcctggggctgtccagaacgttccgccgtctggttgtcacactcatccggcgttatggcgtcagtctcattcatctggatgccagtgccggatgtctgccgggtctgcccactttcgactggtaa

SEQ ID NO: 33529 - DNA, 273 bp, Escherichia coli
atgcagcatgtccctgaaagcgtgattcaggcaccagaatcacccgacgccccggaggcgctgccggggtgtcgttccatttctgatgatgacctgtgcgcctggtgtacccgtctgctttaccgtcccggagaaatcagtctgtgcagactgagtatacaggcaatggcatctggccatccgtctgtgaccggaacggttacgcgtacgactgtccggaatttcagccgaatatcattcatccctgatattaccgggtctcacggtcagtga

SEQ ID NO: 33530 - DNA, 405 bp, Escherichia coli; identical to SEQ ID NO: 6159

SEQ ID NO: 33531 - DNA, 159 bp, Escherichia coli
atgacggttctggtcaacgtaattatggttgcagccgtggagcggggcgtctactggatggcaggtgaaccctgtaaaatggcatccggtgccagagtatatgtcacagtaagggcgtggttgacgcccttagctcgttttctgaaaaagtcgtcctga

SEQ ID NO: 33532 - DNA, 1338 bp, Escherichia coli
gtgagtgatttttccgctttcgataacgccctgcgctcgctggagtcgatcccgctggcccgcgtcgccgggcggctggtgcgccttaatggcatcctgctggagagcgtcggctgcccgctaatgaccgggcagctgtgtcgcatcgaaagcgccaaccacacgcttatcgacgcgcaggccgtaggctttaatcgcgatatcacttacttaatgccgtttaaacagccggtcggcctgatggcgggggcgcgcgtcttcccggaagaaaaagcccacgacatcctgattggcgaaagctggttaggccgcgtggttaacggcctcggcgaaccgctggatggcaaaggccgcctgaacggcaacgaccttctgccgccgctgccgccgtcggttaatcccttaacccgccgttcggtggacgaaccgctggacgtgggcgtgaaagcgatcaacggcctgctgaccatcggcaaaggccagcgtgtcgggctgatggcgggcagcggcgtcgggaaaagcgtgctgctggggatgatcacccgccagaccaaagccgacattgtggtggtcgggttgattggcgaacgcgggcgcgaagtaaaagagtttatcgaccactcgctgggcgcggacgggctggcaaagtctatcgtcgtcgtcgcgcccgccgatgaatcgccgctgatgcgcctgaaagccaccgaactgtgccactccatcgccgcctggtttcgcgaccgcgggcatcacgttttactgctggtggattccctgacccgttacgcgatggcccagcgggaaatagctctctcgctcggcgaaccgcccgccaccaaaggctatccgccgtcggcattcggcatgatccccaaactggtcgagagcgcaggcaacagcgaaagcgcgggatcgatgaccgccatctacaccgtgttggcggaaggcgacgatcagcaagatccgattgtcgactgcgcccgtgcggtgctggacgggcatatcgtattaacccgcaaactggcggaagcggggcactatccggctattgatatcggccagtcgatcagccgttgcatgaatcaggtgaccagcctggaacatcagcaatccgcccgtgcgttaaagcaaaactacgccgcgtatatggagatcaaaccgctgatcccgctcggcggctacgtggcaggtgccgacgccagcgtcgacaaagcggtaaaaatgttcccggctatcgagcgttttttgcgccaggagatgcgcgaacctgcctccctggaactggtgcaaagccgcctgcaaattctctttcctggtgtcaaaaaggcagaacagtaa

SEQ ID NO: 33533 - DNA, 348 bp, Escherichia coli
atgcgcgagcgcgacgaagacgtgctggagcagcttcaggatgagatgtacgacttctttatcctcagccgccagaacgaagaggtgcgtcgacgtctgctcgacgaagtaccgatggaagactgggcggtagcgctgaaaggcaccgaagccctgttgcgccgttccatttacgcggtgatgccaaaacgtcaggcgcagcaactggaagcgatcaccgcgcgtctggggccggtgccggtcagccgtatcgaacagatccgccgcgaaatcatgggcattgcccgtgaactggaagaggcgggcgaaattcagctacagctctttgcggaacagacggcggagtaa

SEQ ID NO: 33534 - DNA, 825 bp, Escherichia coli
atgagactttttatcgcagaaaaacccgcagtagcaaatgatattgttaaggcacttggtggcaattttacccgccatgatggctggtttgaaagtgataacgccattgtgactaactgttttggtcatattatcgaatcacaaccgccggaaaactataatcctgaatacaaagcctggaaggttgaaacgcttcctttacgtctttatcccgtgaagtatcagcctgttgaaagtgccgcaaaacaggttaaaacgattctcgaacttatcagacgtggagacgtgactgaaattgttcacgctggcgatcctgatgatgagggacagttacttgttgatgaagtcctggaatatgcaggcaacacaaaacccgtaaagcgcgttctgattaacgacaacacgcttccggcagtgaaaaaggcactggcaaatcttaaagataatcgtgatttcaaagggctttaccttaaggcgctggcgcgttcagttgctgatgccgtctatggcttctccatgacgcgtgcttacaccattcctgcaaaagccagaggatatcagggcgttctgtctgtcgggcgcgtccagactcccgttcttggcctgattgtgaatcgtacccgtgctaaccagaaccataaatccagtttttactacaccatgaccggagtctttcagcgtggtgctgatgttatcagggcgaactggaagccaggggaatttgctccgctgacagaccggctacagttgaagcggcagcaactgatgataaaaaaacggctgcaccgttgccctttaacctggtacgactccagcaatacatga

SEQ ID NO: 33535 - DNA, 465 bp, Escherichia coli
atgcgacctacacgccctctgtatttcatgttgaatcttgccggatctggacatgatttcaggggcgtttgtttttcagtcgcttacactacacccaacggcaaatcctgtcgaaccttcccgaaaacccgatccatttaccataactcccgttgtacgtaccccttaaaacgccctcagtcgctttctggcgcaaaaaacgcaaaaagacaagaaaacaccaggccaaaccagaaaaacgcgccagaatcgtttttagagggctgcataactatgcacgaaagcgatgcgcgatcgatttcgactgttccgaagggcgaacaggtcaaaatgacaagttttctcgccctgggtggaaagttctgcacggggattttctgtttcagagcttcacgtttcgccaggacaaaaaaaaccgacctggggtcggggcaagaatcagagtctgtgagaaattttttttag

SEQ ID NO: 33536 - DNA, 750 bp, Escherichia coli; identical to SEQ ID NO: 31507

SEQ ID NO: 33537 - DNA, 1179 bp, Escherichia coli
atgattaccctgatcttaatgggtattggtatacttatatccacaaggtatctatggtggcgttactcttcttcagttattcttgatgagtttcctgacagcttcttttcattgacgctgttagctgctgaaacgtatgcatggtttgttttattacttggttattttcaggtctgtttcccattgaacagggaaagcatacctttaccagataataaagaagaatggcctgatgtcgatatattcatacctacatataatgaaccctttactgtcgtgaagaatacagtttatggagcgctggctttagactggccaaaagataaattacatgtctggcttcttgatgatggtgccagagacgaattcaggaaatttgctgatgagtcaggtatttgctatgttgcaagagaaacgcatgaacatgcgaaagctggaaatataaacaatgcgcttaaaatagctaacggcgaatttgttgctattttcgattgtgatcatattccttccgtttcttttttaaaaaaaacgatgggctggtttattgccgataaaaaactatcgatgctgcaaacaccacatcattttttctctcccgatccttttgagcgaaacttggggcaatttcggcagaaaccaaatgaaggacatcttttttatggtttaatccagaatggcaccgatacatggaatgcttcatttttttgtggttcatgcgcggttatccgtaggtctgcattagatgaggttggaggcattgcagttgaaacggtaacggaagatgcgcatacatcgctacgcttgcatcgtgcagggtacagctccgcatatcttcgctatcctctggccgctggacttgctaccgaaacattgtctgctcatatcggacaacgaatacggtgggccaggggcatgatccaaatcttacgtattgataatccattattgggcaaagggctgacgttatcacagcgtctttgctatctcagtagcatgatgcattttttatcaggggttccacggctgatttttttattcgcgccactatgtcctattttcttttcagttaatttgatagatgcgtcggttgcagatattatgtcttatgttctaccttatctatttgtgattatttttactaactcaagagttcagggtgaatacagacattcattttga

SEQ ID NO: 33538 - DNA, 1656 bp, Escherichia coli
atgtctggaaatataggggcaaatccacacacactcaaggcagtacctagaaaacataaagataaaatcatgtctgaatcccgcagcaattttccagcacgacatggtactccatggaatactgaagagttacagcgtcttctcgtatccatagcggagggcgtctcgctaaaaaaacttactcaaacacatcaacgatcgtccgggggaatacgtggagcaatcaaacgcctgcttccttctgagtttcttgagttcaacgatataaacacggtgaatgatctcagcaattacttcaacaagattcctcgccaagaacacaatagtatcatcaataatttaatatcattgagcactgcaaaaacaattgctcatgataaagttgaaatacaaaagaatagttttaaacaaaataccccactccccctctgccaacccaatacagattttaaagattatatagccgatgaacatgatgtcattatgctaattcattctgctatcgaaagtttatctaataaacgacatcaatatattcttctaatgcgactcggcacagatgattcacctcattctctggcagatattgccgtcaaattaggaatttcccgtgaaagggtaagacaacttcaggaacgagcccttggcttactagctgctaaatctcgctatgaagggacacctggagcttgccttaaagcccttattaactcaataggtaattcaccatatgatatagcagtatggatttatcgtattgttcatcgggatttcgttacatcctctgacttagccgccaaattcattatttttaccgcaggcattcctaaagcaagacgagatgaaataaaaagttcgctctcattaatatcacaattacaaaagcagaggttacgtgaacgaagagcagaattagcacacgctcgcgctcaggaaagagcccgaatcaagaaagaaagagttgagttcatattcagtaaatggctagacaatacacattggccaaaatatatcgcacctcctccccccgtagaacagctatgttcacagagagcggttaatgatactgacatatctggattcttttactctcaaaaattaggtcgtacagtccagtacgaatcagggcttgagtttaaaataatgaatctattagaatgttgcgatcaggttcttttctatcaagaacaaccattttctattccatattgttttaaaaacaaatcaaaaaaatactatccagatttactcattgcgacagttgatggtcggtgcctacttatggaagtgaagccaacagaccgaatgaccttgagtctcacgagaataaaaagtaatgcaggtcgcaaatgggcacatactcgaggatggggatggttggtcattagtgataggttctcgttacgtcagctggaagaacatgccatctcaacaaacacatggaaacttatagaggctgaactgaaaacatcaaggattttagcatggcgtgaaatgatggagttacgtacacgatacgagattcatcgtttagatcttattgcatatatcattcagtctggtgctgaagtggataacttttatcgaattaccccgaaaatatctaataatacatctaaccagagacaactaaatgagagcgactgtcataattga

SEQ ID NO: 33539 - DNA, 153 bp, Escherichia coli
atgccacaacgaacgtttttaatgatgttaatcgtcgtctgtgtgacgatactgtgttttgtctggatggtgagggattcgctttgcggatttcgtatcgagcagggaaatacggtgcttgtggcaacgttagcctacgaagttaaacgttaa

SEQ ID NO: 33540 - DNA, 1854 bp, Escherichia coli
atggcatttaaacactatgacgtggtcagggcggcatcgccgtcagaccttgcgaaacgactgacacaaaaactgaaggagggctggcagccgtttggtagtccggtggccataaccccttataccctgatgcaggcgattgcagcagaaggtgatgtggtcgtcagtggtgcaactgagccggagtggtactacgtcatcgtactggccgggcaatccaatgccatggcttacggtgaagggcttccgcttccggattcatacgatgcgccccatccgcgcattaagcaactggcccgtcgtaacacagtgactcccggtggtgaagtatgcgtatttaacgacatcattcctgctgaccattgtctgcatgatgttcaggatatgagtacgattaaccatccccgggctgacctgagcaaagggcagtacggctgtgtcggacagggcttacatattgccaaaaaactgcttccgtatatccctaataatgcggggatcctgctggtaccatgctgtcgtggtggttcggcattcacccagggcacggaggggacattcagcgagtccacgggagccagtcaggattcggctcgctggggagtgggtaagccgttatatcaggatctgcttttccgcacgaaggcagcattgcagaaaaacccgaaaaacgttttgctggcgatatgctggatgcagggggaattcgatatgacgaatgccagttacgcccagcagccagcagcatttcttgcaatggtacagcagttccgtgctgaccttgccgggctggcggcgcagtgtcacggtggaagtccggcatcagtcccctggatttgtggcgacacgacatacgcgtggaaacaagaacacggtacgcaatatgaagtggtatatggtgcatataaaggtaaagaatcccagcagatttattttgttccctttatgaccgatggtagcggagttaatacaccgacaaacaacccgtcagaagatcctgatattgccgggtctggttattacggttcggcatcccgaacgaacaaaaactgggtatcatcaaatcgcccgacgcatttcagctcatgggcgcgtcgtggcattattcccgatcgtatggcaactgctattctgaacgtagccggtcgcaccttagccttcattagtggtaaggcaccggaaatcaaaccctcgcccggcggcgacacgccatcggggccgtctgaagatgcatccatacgcacaatctccctgttgccgacagccggagacgctgctgcgcagggctggagcattaagaatggcggaattcagttgtcagatggtgtatttaagatcaccaagcagagcaataaagcctggtccctgacgcgcccggtggatgacgcagtctccctgctgacacggggtggcagactgagctgtaagtttcgactgtcaggcgcactgaccaacaaccagttcggtctgggaatttatctgtataccgatgtagcgttacctgacgtcgtggcgatgaccgggactggtaacccgttcctgatgtcgttcttcacccagaccacagacggcaaactgaatctgatgcatcacaagaaagcaggaaacacaaagttgggcgagttcgggaattacagtaacgactggcagacgctggagctggtgttcaccgccggcagtgccacggttactccgaaactgaatggagtggctggcccggcattccaggtcataaaagacagtctgacactggggctgaatgcgctgacgctgacggatattaccaaaaatgcagcgtatggcgttgagatagaaagtctggtgctggagataaatgcaccggcatcatcataa

SEQ ID NO: 33541 - DNA, 915 bp, Escherichia coli; identical to SEQ ID NO: 6605

SEQ ID NO: 33542 - DNA, 267 bp, Escherichia coli; identical to SEQ ID NO: 6604

SEQ ID NO: 33543 - DNA, 906 bp, Escherichia coli
gtggatagcgcacgcgcccttattgcccggggatggggagtaagcttagtcagccgttgtctccgggtgtcgcgtgcgcagttgcacgtcattctcagacgaaccgatgactggatggatggccgccgcagtcgtcacactgatgatacggatgtgcttctccgtatacaccatgttatcggagagctgcccacgtatggttatcgtcgggtatgggcgctgcttcgcagacaggcagaacttgatggtatgcctgcgatcaatgccaaacgtgtttaccggatcatgcgccagaatgcgctgttgcttgagcgaaaacctgctgtaccgccatcgaaacgggcacatacaggcagagtggccgtgaaagaaagcaatcagcgatggtgctctgacgggttcgagttctgctgtgataacggagagagactgcgtgtcacgttcgcgctggactgcagtgatcgtgaggcactgcactgggcggtcactaccggcggcttcaacagtgaaacagtacaggacgtcatgctgggagcggtggaacgccgcttcggcaacgatcttccgtcgtctccagtggagtggctgacggataatggttcatgctaccgggctaatgaaacacgccagttcgcccggatgttgggacttgaaccgaagaacacggcggtgcggagtccggagagtaacggaatagcagagagcttcgtgaaaacgataaagcgtgactacatcagtatcatgcccaaaccagacgggttaacggcagcaaagaaccttgcagaggcgttcgagcattataacgaatggcatccgcatagtgcgctgggttatcgctcgccacgggaatatctgcggcagcgggcttgtaatgggttaagtgataacagatgtctggaaatatag

SEQ ID NO: 33544 - DNA, 1347 bp, Escherichia coli
atgacagttcctgttcaccatagacaccgaaatgcatatcactttacgtcagtagataatcttgaatcaataattgaaactgggctgttttcgactaatcagaaaattgcacgtcgtatatcacatgtgaatgttgctgatgaaggaatacaggggcgtagggcagtgatgcaggtgcctaatacgaatggtcgttgtgttcatgattatgttcctttttattttgcaaaaaaaacgcccatgcaattgtctgttcttcataaaaaaaatgtagatcagcaatttattatctatctttcagtttctatattatcactcgaaacaaggaatgggtcatattttacagatgcttccgcaaatacagttaatccaccgaacttttattctggtaatactcaagctgaccagcttgatgtattagattgggctaccatagataataatgcatggggttatgctgacgagactcagaggcataaaaagatggcagaacttttgctgccagatcatgtctctttaagcgaaataaatcagataattacatggaatcgttctatgtctgatattgtgaggagtattttccagaacaaaggtattgttccaccaaatattgttgagggtgattttcaacattattattatcaacctggaaactggtcctcatccttagtcacgggaccggtagtgttaaaaatgctttttgatgaagctattgaatatgtaacttcatttcaacgagaaacgaggccaaaatttcaaagtattagtgatgctctaagtgcaattcgtggtaatttctcctccatccaagagcttgaagatatcgatggattggggacgagctacgggcctcataatgaagatgttggctctcatagtcgacgagtggctagtcttgtagttaattcaccagagttttatcaattagactctattcatcaggaagttttggagttggccgcttatttgcatgatataggcaaagggcctaaaacacgttggaataataattacatgcatgaggcagatggagagcatcctaggaagtcacttgcgatgctacaacgaattttgacagaagatctgccagtcatacaaaccgatctagttagaaaaataatgatgttagttacgtatgatgatttattgggggaaatagtagctaaagggaggaataaaaatcagttgttcgatatagttacatcttctgaagatatcaatatgttagtagccctaagtaaggctgatattggctcattaagtcaagtttggttagctcaggtttctgacgggatcgatgatctccgggatgaagttctccaaagattgcaggggaacagtttatga

SEQ ID NO: 33545 - DNA, 1191 bp, Escherichia coli
atgaatgacaccagcttcgaaaactgcattaagtgcaccgtctgcaccaccgcctgcccggtgagccgggtgaatccgggttatccggggccaaaacaagccgggccggatggagagcgtctgcgtttaaaagatggcgcactgtatgacgaggcgctgaaatattgcatcaactgcaaacgttgtgaagtcgcctgcccgtccgatgtgaagattggcgatattatccagcgcgcgcgggcgaaatatgacaccacacgcccgtcgctgcgtaattttgtgttgagtcataccgacctgatgggtagcgtttccacgccgttcgcacccatcgtcaacaccgctacctcgctgaaaccggtgcggcagttgcttgatgcggcgttaaaaatcgaccaccgtcgcgcgctaccgaaatactccttcggtacgttccgtcgctggtatcgcagcgtggcggctcagcaagcgctgtataaagaccaggtcgctttctttcacggctgcttcgttaactacaaccatccgcagctaggcaaagatttaattaaagtgctcaacgcgatggataccggcgtacaactgctcagtaaagaaaaatgctgcggcgtaccgctgatcgccaacggttttaccgataaagcacgcaaacaggcaattacgaatgtagagtcgatccgcgaagctgtgggagtaaaaggcattccggtgattgccacctcctcaacgtgtacatttgccctgcgcgacgaatacccggaagtgctgaatgtcgacaacaaaggcttgcgcgatcatatcgaactggcgacccgctggctgtggcgcaagctggacgaaggcaaaacgttaccgctgaaaccgctgccgctgaaagtggtttatcacactccgtgccatatggaaaaaatgggctggacgctctacaccctggagctgttgcgtaaaatcccgaggcttgagttaacggtgctggattcccagtgctgcggtattgcgggaacttacggtttcaaaaaagagaactaccccacttcacaagccatcggcgcaccactgttccgccagatagaagaaagcggcgcagatctggtggtcaccgactgcgaaacctgcaaatggcagattgagatgtccacaagtcttcgctgcgaacatccgattacgctgctggcacaggcgctggcttaa

SEQ ID NO: 33546 - DNA, 1128 bp, Escherichia coli
atggcagccagaccacgtaaaaataatgtttcagtacctaacttgtatccgctttatagtagaaaagtaaataaagtctattggcgatataagcatccagtgaccgggaaatttcattcgttgggcacaaatgaagctgaagctattgctattgccactgaagctaacactcgtctggctgagcaaagaacccggcagattctagctatcagtgataggatcgcaaccagcaaaggaaaagcgatcacaacgtcaacctggttagatcgctatcaagcgatccaggatgacaggctcaaaagtggtgatataagactcaacacctataagcaaaaagctaaaccagtatccttgctcagagaacgagcaggaatgaagttgatctcatccgttgatgttagagatatagcacaattgcttgatgagtatattgcagctggacagcctagaatggcccaagtcgttaggtctgtattgatcgatgtgtttaaggaagcacagcattatggcgaagttccgccagggtataaccctgctcttgcgacgaagcaacccaaaagaaaaattacccgtcaacgcctcagcctggaagaatggcaaaaaatattcgatatagcagacgccagtcatcgttacatgggaaatgccatgctcctagctttggtcactgggcagcgtttgggagatatatccaaaatgaaatttagtgatatttgggaagatcatcttcacgtcattcaggaaaagactggaagcaaaatcgctatccctctttctcttcgcctcaatgcgattaactggagtttacgcgatgtaatagcccgctgccgtgactatgcagtcagcccatacctagtgcattttttccgttcaacttcacaagcagaacgtggggcacaggttaaatccaatacattgacgatgaactttagtaaagcgagagatttagcaggaattgactggggtgatggctcacccgcaacattccatgaacaaagatcgttatctgaacgcctgtacaaggagcaagggatagataccagaaagctacttgggcataaaacacaacaacaaaccgatcgttaccatgatgaccgagggaaaggttggagcaaagtagctttgtga

SEQ ID NO: 33547 - DNA, 1116 bp, Escherichia coli
atgattagatatgttgatggtgattttttcgattatgctgctgacattagaattaatacagttaattgtgttggtgtaatgggggcaggggttgcttttgcttttaagaataagtttcctgaaatgtataatgaatacgtattgctgtgtaaaaaaggagaaatatctccaggaagaccagctgtttggaaaggtaatgatacgtatggtaaggaaatagaaatcataaactttcccaccaaggatcattggagaaataagtctaagtacgaatatatcgaaaaaggactgcattggctctcgaaatatttggataataaacatggaaaaacaatcaccctgccagctttaggttgtggtcacggtggtcttgattgggatattgtaaaaaaaatgatacaggattacctgtgtaataataaaaatgaaattctagtttttagtccgcaggcatcaaaaaataataaacacggaaaagcctcaccaaactttaactatccatccttaacagatcttaatgtatctgaaattaagcatgatgataaaatgtttcctttaaagttgtcaactttcaccggcaaaaatctttattatactgggcagttatttactgattttgatctttcgataatttcgagcacgtcaccaagtgatatagaaaaacaagttgttcttgatactattgatctttctgttaaaaaaggatattccttattatttggaggtactgcctttgataaaatgatggctgttgttgctttacgcaacggtatcaagacaggtgtttttttaccaagtggtatagccaaatcagctgaaaaattgaattcgcacggtgaatttaatcgtctaactattctttctttaggcgacccttttattccatttaatagaagtgagtatcttccatcagtttttagccgtattttgctaccgcgtaaagtattgttcactacaggtaaattacaatggctcaagaagtataaggaaattattttgcaaaatcatgttgattcatttttccttatttctgaggcaagtgacaatgacatagaagccgcgaacttaattagttcaaaggctatagatgaacatgggctatttgatttaatttaa

SEQ ID NO: 33548 - DNA, 333 bp, Escherichia coli
atggatataacattgaacgttacttcgaataagattattcattgcctttatatcacaacctttacgctaatgtttttcagcacaaatttgaaaggtgaaaattatttaatacccaaaaaaaatgcttatggatcgttagtattcgcagaaaagaagcatgaacatccgggtgtttatgatttatttcaatcaaacaaattcattacaaaagatacgacatactttgatctaactcctgattatgcaatgagtaaaaatgaaaatattatattgcaacaagaaaatcaagttttcttgactcttgcagttgaaagtgtcaaaaaaatattatag

SEQ ID NO: 33549 - DNA, 1638 bp, Escherichia coli
atgcggaagagtatggggaagacgccgatgagtgaactgttgcaaaagctgacccgtagctgttttgccgaccgggatgcactggatgtggcgcgaacacaggcggcgctgtggcagacatggctgctgccggtgacggcagacacgccggtcggggaagaccccggctaccacgacgatttcctgcgtatacgcgacgaaatgaacaaactttccggcgcagataccggcctcatctgccagcttgccgaatccctgctgctgacgcaggccaaagacgtgcgcatcgccacttactacatctgggcgcgactgcaccgcgacggtgagcgcggactggctgaaggactggcgctgttagccgggctggtggaacgcttcggtacgcaactgctgccctcgcgaccggcaagccgaaaaatggcgctggagtggctggcgggggaaaagatgctcgacagccttgcccgctacccggaggtggcaaaagaggattttgcgaacattgttgccgctcttaatcaactgtcggtttccttcactgcatggcccgaagaccagcattccccctccctgatgccgctgattaacgcgctggaatcacgtctggcgcagtcgggcgggatgaacgcggtggtgccgcaaaacagcagcggcgttccggcaccgtcttccccggtggatgcgccgcaggtacagaccatcacctccgggcgcgacctgctcgaccaggcgaaagtgctggcccgttatctgaacgaacagccgcagggctggctttcagcacaccggctgatgaaaaccctgcgctgggacacggtgcatgaactgccgccggacgtggacggcaaaacccggctggccccgccgcgcaccgaatcacgcaaccagcttaagcggctgtatgcccagcagaactggacggaactgctggagcaggccgacctgatgttcagcaccggtgtcagccatttctggctggatatccagtggtatctgcatcaggcgctggcgaaggcgggcgcaccgtgggacagatggacagcggttatccgtcaggacctggcgctgctgctggagcgcctgccggggctggaaaatctggcatggaacgacggcacgccgtttgccgatgaggtgacgcgcaactggatagcgcagcaggtcatgatgcgggaagacggcgcatggcttgcggggaaagccgctgtgccgacagacgacacggcaaacgacgtactggcgctggagccggaagcactggagatggctgacagtcagggcgtggaagcggcgctgggctggatacagacccgtccgggcatcaccacggcacgacagcgcctgttattgcgactgctgatggcacgggtggcggaacagtacggtaaaaacgagatggcgctcctgctgctggaagaactggataccgccgcacagggaataacgctgacgcagtgggagccggacctgctgttcgaggtaaaagcccgacagctgaaactgctgcgactgcgggcgcaccgctatgcggataaagccctgctgaaccgaaaaatggaaatcctgctgggaacgctggtgacaatcgatccggtacgggcagcggtattgtgtgatacgcaacataaggactga

SEQ ID NO: 33550 - DNA, 666 bp, Escherichia coli
atgaatatgcaaatttttatcgcaccagcagccacagttgctgcagtctgccttgctgcatattttgctttacgaaatgaacgtaaaaagaaagcacttgagattagaacaactcaactagatcgaatatcagagctagtaaaccgagcatctaccaatttgatgcaatatacaggtactcttgcctctatactggaagcgcacgccaaagataattatctaccgaacaaaaaatttgacattaatgtaattagcaaatggaaagattgcctcgatgagagtgaggtctgggcgattgatagacagcaactaagaacatgtcagcacagtctggagtttcatcgtgaaaaagaatgggctgaatggaaaaaaataattccaccattacttgataaaattgaccaattttttctcatatctaagccagggcaacctgttacgtttataaatggccaaaacaaaacagctgatgaactacttgttttctcaagatatttgagaaaacaaacagcagaaattgaatcagtacgtcagctgttactttctcaaatgagagaggaattcatcgagttaactagctttgaacctgtcacaatgtttagcttatttaaatcaataaagaaaaatgtcatgcaatttttctgtatcagtgctcttaaaaattga

SEQ ID NO: 33551 - DNA, 288 bp, Escherichia coli
atgacagatataacagtcacggtggttaatgcccgcagcatgcatatcgcgcaccatcgtcgcgacacgcttaataagcatacgctttacgcgaacatctggtgggttggtcgcccagtcagcacagtaatcttccagactgatggttggtgtcagatcttcggtaataataaacgaggttctggtcagcggattaatgcctttttcgccgaatgccaccccatacatagtatcaacgccgacatcccgcagtcgatgaatcgcattccattcgcggtctgcgcctaa

SEQ ID NO: 33552 - DNA, 249 bp, Escherichia coli; identical to SEQ ID NO: 14162

SEQ ID NO: 33553 - DNA, 249 bp, Escherichia coli
atggctactgtgtgtggcaataaacacctgcgtctgccgttccgtggcaagctgattaaccagcctcttcatactgacatggctgagatgattctccggctcctcaagcaacagcgcgtggatctctcccccctgctgctgatgccgctgcagcgcaaactccgttttgatgaaacactgtcttccttttccgcggtgacgaatggaaataccgtcctcagtaatgtccaggttcgcctcaagacctga

SEQ ID NO: 33554 - DNA, 252 bp, Escherichia coli
atggcgcagatagcgtctgaagcctgcgaaatgaccaccggagaatgtgctgaactgcacggaatagtattcatagggaaaattatcaggatcctgctgcaaaacatggtgtatatcctgaccgtattcctccatcatgggagcaatgcgcattctgagaccatccgcatcgatacccgccagattttgcctgccgttcaggtcaggctctcccccattactcaggaaaacgtcagcggtcagcacgggtaa

SEQ ID NO: 33555 - DNA, 231 bp, Escherichia coli; identical to SEQ ID NO: 7663

SEQ ID NO: 33556 - DNA, 795 bp, Escherichia coli
atgaagaagcctctggttattatcagtgcctgtcagttcaccaggctggcactggagtctctcatcccaacggacaggtatatcgtgcgggtgtacagcaacgtcactacagaggttgaattcgttttaaagacctcctgtggctacctgttagctgatatcccttcgcttccttcgggggagttggttcttctggcttgtctcgcccgtttgcggagtgatgccgggcaatggcaggtctgcctgaccggtgactccgactggttcgataatgctcctgctgcaagtctgtataacggcttcccacgcatcggcaccatgctgacagcgagtcgttatcagaatcaaattatccgctggttactacgtcctttgcccggcgatatgagcgatttctggctcctgactgcacgggagttgagcgtgcttaagattctgatgcagggcatgagtttcagtgagattgcccgttatgaacaacgcagttcaaagaccctgcatgcgattgccacacgggctttaatgaaacttggactgggaacactgagcgatttcaggctgctctatacgggatgcggtgacagcagagtgaaacggaatatacggctacatgcaaaatatatcggacaacattccgctcatcgactcactcagtatgtgcagaacatggtatccggaatcctttatccagagaaagttgccgttggtgaatcaataaattctgacgccatttccggaaaagtactttccggacaaagaaaaaatatatctaaaaaaagaccaggattgttatga

SEQ ID NO: 33557 - DNA, 327 bp, Escherichia coli; identical to SEQ ID NO: 7769

SEQ ID NO: 33558 - DNA, 261 bp, Escherichia coli; identical to SEQ ID NO: 5351

SEQ ID NO: 33559 - DNA, 357 bp, Escherichia coli
atgtatgatgttttttcatgttttggtgttctggctaaaaaccagaatacccgtgacatccgaaatattaaaaatttttcctcacatcaacattcactgggcgacatgtttgatgaattaataaacattattgataaagaacaagtattgagtacagaacaacgaaaagttatatttaggagatatgaagatctctatgttaagctaatgcactattctgtttttacagacaaaacacatcaaataataaaacaaaaatattttaatgacattgtaccaatgattctcgcactcgacatcaggaacacatatcgcccggataatgagatggcattttactatcatattgatttttaa

SEQ ID NO: 33560 - DNA, 579 bp, Escherichia coli
gtgaacctacaaattgagttttctcatggcggagctgaggtactagatagagttatccaagcgtatggattcaacacaaaactagccctagccgaacatcttgatatagcaagcagcagtctggctaaccggtataagagggatttttttccagctgatatcgttgttagatgtatggctgaaacaggagctactctggaatggcttgcgactggacaaggtagaaagtttaacgatgacgaattagacatcatgaaattgccacgcaagaagattgtggacggaaaactctatgagtctggtttcctaatgctcgataaggttacttttttacctggcaaacctttaccgcagaatcctatctgtgtgattgataacacaatgcaatacattgttgatcaacactttactgaagtttatgacgatgtttggcttgtcgaagttgaaggtaaaaccagcgttagaacactaacacgcatccctgtgggaaaagttagagtaagcggcgtaggtatggcttttgactgcggtattgacgatataaaaatcatcggccgcattgttctgacgattgaatga

SEQ ID NO: 33561 - DNA, 429 bp, Escherichia coli
atggcgattagccaggaacagcaaaagcgcgggctggagcatttaaaacagatccgccgcaaatacttcagcgaaagcagcgaggccgctgaatggtgggacaacttgacaccggagtggcgcggcgtagtacttcatgctgctgcggttacttctggtaccggggcatttaaagcccatttaagcaagtgctgctggcgtgagctttatgaacgcctgggctatcgggacatgattcaactgcgccagggcatttcacgggcgcggttaacgtttgaaggtttcggcagtttacgtgacagcgatttttcgaaacgtaccgcgaaccgcccaatcaagaaggttcatccaatttatagcagcagcggggtgcagatggtgattgcacctcatattgtccagaagttacagcaacaggggaatcactga

SEQ ID NO: 33562 - DNA, 597 bp, Escherichia coli
atggaattgaatactaagcaattgcagtattatatcagcctgttagcacaacagtggcttgacgatgatcgcctatttattgataccgaaaccacggggctgggtgatgatgcagaaatagtagaaatatgcatcattgatagccatggatttattctgcttaacacgcttgttaaacctactaagcctattcctgatgaagcaattgccattcatgggatcacaaatgaaatggttgcctatgctcctgcgtggacagatatatgcggcgcagtggaagaacttattagacgttttggctttgttatctataacgccgattatgatctccggttaattcgtcagacctacgcattgaatggaagaccttctgaaggtgcgccatggatgcttgctgctcattctgtttgcgcaatgaaactatatgcagaatatcgtggcgagccggggaaatatcacggttataaatggcataagttagttgatgccgccgcgcatgaaggagttgtgatcgaggggaaggcacaccgtgctttagctgattgcaaaatgacattaggtgtcatcaaagctttagcgcaaggcggtgcaaaatga

SEQ ID NO: 33563 - DNA, 330 bp, Escherichia coli
atgacaatcaaaatccatgcggtaaaaattgcgccgaaataccttaatgctgtggtggctggtcagaaaaaggccgagctgcgtaaaaatgatcgcgggtataaaaccggtgatgttctttcattgtgcgagtggaagcacgggaaatacaccgggcgagagtgggcggcagttatcacccatgttttgccggtgaatgaaattatcgctgatgccgaaaattgggtggttttatctatccgttcgctgtcaccgcttgaagtgctggaatacatcatttcaaacggtgtaacagagtcgttagttggcggaggtcattatggccgttaa

SEQ ID NO: 33564 - DNA, 207 bp, Escherichia coli
atggatcttttggaggcgtcggcacagctggaacgcattgagttattggccaaaattgcccatgtttacgaaagtaaccagagagagaaaacaatcgctttggcctggattggagagcttgcgggagaggttcgcgaaatggttaaaaaggaagggcaacgcccccagaatgggggcatttcaggcggcggggggcgctttcagtag

SEQ ID NO: 33565 - DNA, 804 bp, Escherichia coli
atgtcacatttaaaaactgactggctgtgtgttgctactgaaggggataccgttgacggcagagtaattgaacggcagtggattatagatatgggggaaacctatgattataaccattacgttgcattaatctggccagagcatgaggacgattccggtaattttggcgaagttctggaagccacctggaaagatggtgacgatggactagcgcgtttatatgtcagcctttgcccgaatatgcggctgattttcgccaaccatgaagatcagcttttgtttttctccattgagccggatgaaaactggcgcggtagcggacgtacttacctgaaagggctggcggtaacagatacacctgctagcgttggcaccacacggctgcgctttagtagtcggcgcaataaattaacaaagcagggatattacagctgtgtaatttcccgtgacggaaaaattaaacaggaagcaagaatgaagaactggcagaaactgtttggtattaagccaaagtttgaagatgaaacgccgcaggataatcctgccccggatgaagataaattacaggcgcttgccaatgtggtgaacgatctggaagcgcgtgtggcgaaaattgaaactcaactgaatgacgttcagggtgatgttgatactatcgctgaagtggtcgatacgcaggaatttgcggcaattcgcgataatgcaaaagaaatcgtaacccgttttaacgatctgggtaataaaaacacccgcacaccggggcgtactattaaagataaagccgggaaatttaatttcctgtaa

SEQ ID NO: 33566 - DNA, 705 bp, Escherichia coli
atggcactttcccccgcgcagcgtcacagccagcgtattgcaatggaacaaaagctgaagcgcagccaggcactggacaccacggaaagtatgcacatgctgatcagggcgctggaaacggatgtggaacatgttcgaagtctgcctaccattgccgatcgcgtcgagtataaacgtgatgtgctgttgccgcgctgggttcccactgtggaagcctatctggagagtggccaggtgtatgcaaatccggttttcgcctggtgtgttatctggctgtttgacgtgggcgatctggataaggcgctggactgggctgacattgcaatcagtcagcagcaggcaaccccggatcggttgcgcagcaatttccccacgtttgtggcggatacgatgctggaatgggcgcaggaaactgcagggcgcggggaaagtgttgagccttatttcacccgcacgtttgagcgggtggcaaacacctggcgactgcatgagcaggtgacggccaaatggttcaagtttgccggtctggagttgctacgcaatgacgatggacagaaaacggcggcgggcgtggatgatattaaaacgctggaaaaagccgatcagctgctggctattgcagaaaaacactactcaaaaattggcgtcagaacggcgcggcagacaattgccgcccgtatccgaaaactgacaactcaaggataa

SEQ ID NO: 33567 - DNA, 186 bp, Escherichia coli
atgaaagaaagccatttacaaggtgcacatacccatagtgtgagtgcatataaccatagtgcaggtgcacatagccattctctgagcggcgcacatacccattctgtaggggcgcgtagccatagtgtgagtgcatataaccataacgcaggcgcacatacgcacacttttaatactgagcactaa

SEQ ID NO: 33568 - DNA, 507 bp, Escherichia coli
atgagccagacgcagatccaaagcctgaccacattttttaaagataacgtcccgccccgtgcgatgcagtcatttgacagtgtgctggatgagatgaagttcattcctgcggcgaaggattacgggctgggacaatatcgccaggcggttatccgatatgacgcggttctgagctgggagcgtttcccgtatcgcctttgcccgccgcagttgcttatgtccttactggctgcgtggctggatgatgctgacagggaactactggatgaagtggggctgagtgaagctgaacctgactgggatgtgtcggtggatgatgaggaagtggccactgtggtgctgactgttccgatggtggaagaactggtgatcaggcaggacgaaaacggggctattccgtggcggggtgagcgctggtcactggttgagcctgaaatctggacggcactgaccgccagtatttacagcgtggatgaggctggtgcgccggtgggggatagcgaatga

SEQ ID NO: 33569 - DNA, 303 bp, Escherichia coli
atgcaggagcatgaaaagagcctttattcactgctgatcattggcgcactgattgccatcggcaatgtgctgaccagtaatgaccccatcacgccgcgcctgtttgctggtcgcgtgatcctgggcagtctggtttcagtggtggccggggcggtgctgattcagatcccggatgccagcccgctggccattcaagggctgggggcggcgctggggattgccggttatcaggcggtggaagtgtggctgcgcagacgtgcagcgggaaagcagaacgggagcaagacaaatgaccctgagtga

SEQ ID NO: 33570 - DNA, 258 bp, Escherichia coli
atggaacaaattaaactgtgtgtttgtggtgttgatattgtttttgagccaaatcagactgcctacaacaaatttattaatgaaatggcgatggataataaagttgccccggcacataactatctgacgcgaattgtggcaacggaaagtaaagaagcactggcagaagtattaaaacgtccgggtgcagcgcttcaactggttggcaaagtaaatgatatttatgcgcctgaactggaaattgaagtaaaaaactga

SEQ ID NO: 33571 - DNA, 1968 bp, Escherichia coli
atgaaacaattagattttacattgagcctgattgataaattatcccgcccgttaaaacaggtgcagggtaacgtcaccggctttgcggaaaaatcaaaagcggcctttatgcagattggcggcggcgcggtggcgctggccggtgtcgggatggcgatcaaaggcgcattatcaccggcaattgaaatgtatgacgcgctgaatgatgccgccgcaaaagggattgatgattccgcgcttaagaccgttcagcgtaatgccctgcgtttcagtacaacctacggtgccagcgcggtggagttcgttaaatccacggaaaatattaacgcttccattgccggactgacgggtaatgaactgccgaaggtgacgaaagtcgccaataccctggcgtttgcgctcaagtccacagcggcggacacggcggaatttatggggcagatgttcggtaacttttccgccgatgccgccagactgggcaaggtggagtttgccgagcaactggcaggcaagatggtttatatgcgcaaaacctttggcacagaaatggccactatcaaggatttgatggaaggtgcgcgcggcgtcgggactaactacggtgtggggctggatgaacagctggccgtgctggggcaacttcagcggacgctgggaacggaagccagcagcgcctatgaaggatttatgaccggcgcgattgatggtgctaaaaagctggggctgtcctttactgactccaccggcaaaatgctgtccatgcctgaaatgctgatcaagttgcagggcaaatatggcaaaagccttgaagggaacctgaaagcccaggcggaactggatgcagcctttggtgacagttctgcagtggttaaacagctttacggcaatgtcgcgttacttcagcggaacatcaccgaactgggcggcgcggacggtctgaagcgtacccaggaaatggctcaaaaaatggttaagccgtgggatcgctttgtgcaaatcctgaaagccattcagaccgtgatcgggctgacgctgatcccggtgctgtatccggttctgaatcgcctggctgatatggggcagacctttgcccgctggatgcagttatttcctaacattgcccgtgtgattggttatgcgtcgatggcactactgagctttgccgccgtgggtgcggtggccaatatcgtgatgggagtatccagattcatcatgatgggactgcgcgggatctggggggcgttaacggcggttacgaaaatctacacggccactgtctggctgtcgcaaatggcggtaatcgcctggaataccacgctgaagtttttgcgcggtgcgttactggcggtacgcatggccgcaataatggccggaattggtatcaacctgatgagctggccgatcctgcttgtgattggtgccattgcgctgctggttgtcggttgttatctgctggttaagcactgggacacgataaaagcagcggtgatgaataccgaagccttccagacatgtgccgccgtggtgaaatggctggcggggatctttgcttcagcctggcaatatatcagtgaaggatggaacagctttatttctttgctgacaggattttcaccgtctgaggcattaaagggaatggccaccgacattatgtcgctgtttgataatgtctggaagtcaatcaaagggggatttcttaaatcgtggaactggattgttcagaaactgaataaaattcccggcgtggatatttcactggccagtgaaaccacgcagccattaaccggaaatacactgtcgacgggtggtgatttaaaaggtgtggataaaggtggtatcagcaaaacaatcagcagcaacagtaaatccgtaaccgataacagccggaaaattggtgaagtgcatttccataccaaagaagcactttctccatcccagcttatggaatggcaggagcttggcgcatga

SEQ ID NO: 33572 - DNA, 1608 bp, Escherichia coli
atgtcacagacagccatcacactggcgtttgaaaactggaaagcgcagcagggcgcaacgggtgaaccggtactactggatgaatttgtttttgccagtgtgccggatttaaacccggatacacctgttgaccgcaatgaaacattaccaccggctgcacagattgttcaccggcagtctgttacccgcaccggtgtggtggatgaaaacggtgtgatctattccgtagtgctgggtgcagatgtgggtgatttcagttttaactggatcggtctgctcaataaggccagcggtacgctggcaatgattgtccatgcaccatcacagcagaaactgaaaacaaaagaaggtcaacaggggaacgtgctgacccgctcgtttctgatggagtacaatggcgcacaaacggaaaccgggattaatacacccgctgaaacatggcagattgattttactgcacgtctggccggaatggatgaacgccagcgcctggaaaatatggatatttatggcgcggcggcgttttttggtaacgggtatctggtagccaaaaccggcaatcagttttttgtcacgaaaggcacggggtatgtggctggacttcgtgcgtcactggctgcgaatcagaatattacggtaacgacaaagccggtaaaagtctggctggatgtgtgctggacagggacactgaccagtgtctggaatgtgcagagcaaaatcacggtggcagcaaatcttgctgattatgttcagaacggggttcagcattatgtgtttgctgtggccagcattgatgcggatggcaacatcacggatttacggccaaagggtagcctgggagaacagcaggccagcagcgattttttgcgtaaggatgcaaaccttgctgatgttagcgacaaggtgaaagcaagaaaaagcctggagctgggtgaactggccgttttaagtcgtagtgatgttctgccggttggtgttccacttccatggccagcagatattccacctcctggctgggcaattatgcaggggcagtcttttgataaggcagtatatccattattggctgctgcgtatccattgggtgttattcctgatatgcgcgggcagacgattaaaggtaagcctaacagcggacgtgccgtattatcttatgaacaggataatattaagtcacatacccatagcgccagtgcctcaaataccgatttagggacaaaaaccacatcatcgtttgattatggaactaaatctacgaataacactggtgctcatacccatagtgttagcggaacagctgcttcagcaggtgcacatacacatccgatatctcagggagataatgctaacgttagatccggtagagtagcttcgtcgaactctgctcaaactcacttaggtgcaacgaattctgcgggcgcacacacccactcggtatcaggtactgcagcaagtgctggggagcataaacatactgtcggtattggtgctcatacgcactctgttgcgattggttcgcatggacacaccattacggttaatgctgcgggtacttcagaaaacactgttaaaaacattgcattaaactatatcgtgagactcgcttaa

SEQ ID NO: 33573 - DNA, 588 bp, Escherichia coli
atgatatttaaaatgagtgatatcgatcaaacagttactgtttataaacttcatcctgagacgaatgagtttattggtagtgataacgcttttattcccgctcacacaggactaccagccaattgcaccacaattaaacctccattaacaaaagacggattcgtggcaatttttaatacagaaaaacagaaatggattgctattaaagatcaccgtggcgaaattgtatttgatacgaaagacgctagaaggttcgtgataacagcaccaggggattatccagctggaacaactactctggagcctgaaaacgcatggcaaaaatggaatggcagtaaatgggaggatgatgctgagtctatgcgagttgcattaacccgtgaggcagaattggaaaagataagactgcttaaacaggcccatactgccattgccacattgcaggatgctgttgttttaggcatggcgagccaggaagaaacattgttacttaccgcatggaaaaaataccgcgttttactgaatcgtattcaagcggaagatgcgccggaaattgtgtggccggaggtgcctggaaatgtggcgtga

SEQ ID NO: 33574 - DNA, 726 bp, Escherichia coli
atgtggcgtgaagcacgtctggccttcacggattctgttgctgcgctgaactgttcgatcgtccctgcgcatccgtggatttatgggctgggacagcagacagcgaacggggcatatctcagcccggttaatgctgttcgctatcttgctgaacgcctggccggaactggggggaatgtggacgtggtgattatgatggtcaccggacagacgcaggaaaactttatggccagcctgaataacctggtcgggattttccccgccccggcattcacgcaggtaaaacggctggcgcaatccgccgcagcgctggctattgaaaagatgcagatcccggcgaaaaccgccgcagcgttacctgcgtccattccactgtctgtaccaaccagcagggcagctttatctgctgcggcaatcaaccaggcacaaaaggtggcgggtgccggatttgatatcgaagggctgaaaaaacagctgggcgagttcacgcagctgcgtgaccagcttatcagtgatgtggccagcggcctgaatgacttacaggggaagagtgccagagcgtgggtttttactgccagcggagacaccggcacaacgttactggaactggtgaaggacattccgcagcagtctgccgtttacaccgcagccatgatgctggttggcgataatcttgatggaataaagggaatgattcatgacttcgatcccgacactggcgcttaa

SEQ ID NO: 33575 - DNA, 333 bp, Escherichia coli
atgaaaaatttcattatattagctgtaggagcagcagtttcattcaatgtgtttgcggctgaggttgtttatgtgccaacagatacgaaggctagttacacgattttagataagactcgcgacggcagcatggctactataacaaccgaaagaaaggggccgtctggaacatcatattcaaagcggctgtacgactgtactgccgggacagttaaatatcttggagacggtgagaccatcgagcagatgaataactcggcaccagatccaaatatggcccctatagttgaccgctcaattgcatactacattggacaaaaagcctgtcagtaa

SEQ ID NO: 33576 - DNA, 627 bp, Escherichia coli
atgaccacctacgatgaacttaaagaatgtatccgccttgaagtcattggccatgacaaatccttttcatggcgtaaagcgttacttcgtacccgacgcaaccagaagaagcacttcctgttctggtggcgtattgcttcatggctctatggccagaatagtaagttcaaaaaacgcattgcccgcagaattgaaaaccgcctcaagtaccggcacagcgttgatatttctctgtcctgcaaaatcggcaatggtttaaacattgctcatctgaacggcattgttattactgacaattgcgtgattggtgatttcgccgacctgaagcaaggcatcaccatagggttacgcaccgacagtgccgacgcgatgatagtcattggtgatcatgttgatatcggctgtaactcgtccattctgggcggcaaggttacgatcggaaacaatgtcaccattggggcgcattcactggtgcttcagaacatccccagcgacaccgtttataaaaataagatcacgccggtgtatacatccaaactaccgcagccggaatatcaggaaaagcagcctgttgtcactggcaatgctacaaaagaagcgtcccgttccgcagaagcagtgctgtaa

SEQ ID NO: 33577 - DNA, 1566 bp, Escherichia coli
atggctaaaaatgagaaacccaaaaaattagcttatagaataaaaagtattaatattgaaaaattaaaaggtataaataactgccctatttcgttcccagcagacagggctgtaactgctataatgggaattaatggctcaggtaaatcaacaatattgcacgctctatcatgtgttttcaaacccaaagaaaaatcatcccaagaaaataataggttttctgacttctttacccctcacaatgaaaataactggcaggatagtaaattctcagtaaaatttcgagcgggagagataaaaaataatggtaataaagtcttttttgaagaaatagataatgaagaaaagaaagatattgtttatggcaaggataaaaggtggaaaccagtttacgcaaggagacttgaaagagaatctatatatataggattacaaaatcttgcaacgttagctgacaatacaggagcatcaagatactcagaatataaaagagtagatatttatgataaaaatataaagaatcaaatgatattagctctaaataaaatcttagatgcaaattacaacgatttgtttgaatgccacactattaagggaaacaaaaaatttataggcatggttaaaaacggcattgagtatacagaacatactatgggtgctggagaaaagagagtctttgatatagtaaaaaatgtttataatggaaagttaatgcccaatggttttctaattattgatgaaatagatgttttgctacatgaaagagcttttcatgaattaattaaatttcttatcgaagaaagcaaatctatgtgttttgaggttgttttcacaacacatagggaatccataataaagtttaaaaatcaaataaatatagtaagtatatggaacataggaaatgggatagaggcttatcctggcgtttctgcggatgctcttcgacagatatccaatgtagaacctgatatggtcaatgtgtttgtagaggacaacttagcaaaaacagcactaaatattttagttgaaagtgaaggtatgaatgaacaagttgatatctcgctttttggttcggctgagaattcagctgtaattttgtcaggacttaaattaactggaaaacgaattgatacaagcctggcaattttagacggtgattactatattaccctccctgaaaagaccaaaatggttgatagagtgttatctggtacagataaaaaagtagaaaaaaaagaagtcttatcaagaatatttcaattcaatttagatgtaactgacgtcaaaggctctccagaaaaaaaccatcgtgattggtttgaatctatagacgaaaacaatgtttcggaaaatgataagacaatgtttcttaacctgaaaaaacattctaaaagtattggtgctttaactgattatcatgaatattatccagaattagctcgaagatcaaaattagataatgttgagtacaaaattttgaattatattagtaagtatagtaaaaaatgggatttttacataaatgatattagaaatgaaataaaaaaagcaattgcagcgatctaa

SEQ ID NO: 33578 - DNA, 942 bp, Escherichia coli
gtggataaaattttcgttgatgaagcagtaaatgagctgcaaaccattcaggacatgttgcgctggtcggtgagccgcttcagcgcggcgaatatctggtacggccacggcaccgataacccgtgggatgaagccgtgcaactggtgttgccttcgctctacctgccgctggatattccggaagacatgcgcaccgcgcgtctgacctccagcgaaaaacaccgtattgttgagcgcgtgatccgccgcgtcaacgaacgcattccggtggcttacctgaccaacagagcctggttctgcggtcatgaattttacgtcgatgaacgcgtgctggtgccgcgctcgccgattggtgaactgatcaacaataaatttgccggactcatcagtaagcaaccgcagcacattttagatatgtgtaccggtagcggctgcatcgccattgcctgtgcttatgccttcccggaagcggaagtcgacgcggtggacatctctccagacgcgctggcggttgctgaacagaacatcgaagaacacggtttgatccacaacgtcattccgattcgttccgacttgttccgtgacttgccgaaagtgcagtacgacctgatcgtcaccaacccgccgtacgtcgatgcggaagatatgtccgacctgccaaacgaataccgccacgagccggaactcggtctggcatctggcaccgacggcctgaaactgacgcgtcgcattctcggtaacgcggcagattacctcgctgatgatggtgtgctgatttgtgaagtgggcaacagcatggtacatcttatggaacaatatccggatgttccgttcacatggctggagtttgataacggcggcgatggtgtgtttatgctcaccaaagagcagctgctggcggcccgtgaacatttcgcgataaacacgcaaacacaacaataa

SEQ ID NO: 33579 - DNA, 201 bp, Escherichia coli
atggaactgaacatcatcacattaatgaaagcgcttattggcggtgcaggaagtggctttgctctttctggcgggctgtctatgatcatacctactttcacagtgacgactggcgttgcctacctttttgccattactggcggtctggctatggcaggtacttacattttaaaaaaaatgagttccggtagtgcagactga

SEQ ID NO: 33580 - DNA, 336 bp, Escherichia coli
atgtcaggtgagaaaccgaagtaccgcgttctgcgcctctctcatatccacaataacctgtggccggagggctctgaaattgaatacgacggcgagccaggtagtgcactggagcccatcaacgatgcagcgaaggcggcgaaagcaaaggttacaggtaaagcagcagaaaccgtaaccagtgccaaacccatcaacgatgcagccgaagatggcgatctggataagatccgcgaagagtatgaactgctctttaacgagaagccgcaccataacgccaaagccgaaacgcttcgcgagaaaatcgcagataagcgcaaagaactgggcgtgtaa

SEQ ID NO: 33581 - DNA, 372 bp, Escherichia coli
atgaaagaagagattattcgatcaaagaatagtatgggggaattgactgccgagttgaaagctaaagatgacgaattgagatccgccagtgctcagttagcagctctaaatcattcattaaaagagatatcggaaactctgggaagaatgaatgaggcatataagaccctccaaaatgatttcgacgaatacaaactcaaataccctgaaaaatctcaaataaaaagtcttgcacttggcaacggccaaacaattagcaactttttggagcaacacaacttatccggattaaaatctggtaagccagacgtttttaataactttggtgttctatctggattatcaggtttcgaggataaaaataaagactaa

SEQ ID NO: 33582 - DNA, 504 bp, Escherichia coli
atgattacacaacaaattatcagtagtgagttggaagttttaaagaaacatattgactcaggagatattagaatcccgtctctatggcagggattaaaacctggtcttatcatcatgggatggatgattttttgtcccttactaatgtcgtttctaataacacaaaagacaagtgaaacactcactgctgtgttagtcggaggatggcttgggctcattgtcatgattattatggcaaatattagaatgttatacttatccttgccagaaaaatttctaaaaacatcatcagtcatgagtgttatatcatcaaaacttaaagcatattacatcgtgtatatgggggtcgtatttctattatcttttttagggtttattatatacggttttggtgtgatattagtaacagttattatggcattcttgattcaattagatatcggtagatatcaatttgttggtgttattgatacaatcaatagttacgtcaaaagcaagaaataa

SEQ ID NO: 33583 - DNA, 132 bp, Escherichia coli
atggctctttccgacatcgccttaaaacgctctgtaacgcgttctgagcgtttttcccgtttcgttgtagtcggctacggtttgacggtgtttaacgccgctcaacgctttttagcggccttgttgctgtga

SEQ ID NO: 33584 - DNA, 2763 bp, Escherichia coli
atgtcaaatcgtcttactaagaaaaaagtaaaaaataaattacacactggggatgaaattaaccaacttcaggtggcattttcaatctatgatagtcatttcgaaaaactttttcgtctattatcacgtaaggccaataaaatagaatggaaagagcaaaactatccgtttttacctttcaatggtctttctaatatagaatcatcgaccgaatggttattacctgctgataatagtcgtaataagcatttgcatatagagtcagatggaagtttgtctgtagaaatggatttgataaatggagactctttttatttacaaactggcagtatgaatattaatgggttgccattggacaaaaactcctggcgtatcaatggtggattcaagtatcgattagtattaaatgcatcatatggagagaatcgacctgaatgtgcaatttttattatccagtatgatgaaaataaaagaattactcacaaatatcaacttatttataacggtattaatcatattgaattcgatacaatgcctgatgcgcgttactttagtatggcattacgttttaaagggcaaggttcacttcgtattgaacctattaaactctacattgaagaaactttacccgtgaatgcaataaggcttgataattgccaaagccatgaggaaattatacgacactttgaagtgaaagcaaaaacgctgacaaaagctttcgagacgcgaattctctcattaccagaatcaccacaaatacaaaagcaaaaaattgacgagcttaaagacaagcttgctacagctctctacgagaagcagaaactagaaaggtctttatactatcgtttaggcaaaactatggtagagactaaacgtagcagcctgaaaggttttctttccttgcctcaaaagctaataaagattcgtgcggctaagcgtaaaggcaaatttgatcacccccctcttaactgtagtgtcaagaagcaattgcttgaaagtgttggtgtttataatgaggtaaaacatgataatgagattagttggcctgtctttgaatcacatgcacatttgcgaaatcagcatatcaatgttgtaacgatctgtgataagtttacttatgaatgctttcgctatgaggcaaactttattccgttaaccaagcaaaattggaaatcagagattgacgaatcacacccagtaatgttatttcttgaatcagcttggaatggtaataatggtgagtggacatataccatggtgagttataaaaaacatttgggtgatccacttcgcaaagttatcaaatactgtcaatccaagaatattcctgtagtattttggaataaggaggatccaaccaactacgaagtctttattgatgttgcagctgattgtgactatatattcacaactgatgggaatatcttagaaaaatacaagtctcgtgttggacataatagagtatacgcacttccttttgcggcacaaccagctatccacaacccaattcgtgataagaataaaaaacttccagtttacgaagtatgttttgccggtagttggtataataatggacatgatactcgtcgagcacaaacagaaattgtccttgatggaacagcacatcgtgaattgcatatatacgaccgaatgctgcatgcaaccaaacatagagaatcacgaatctttcctgaaaaatatcaaccatttatagttggttcacttgactatgaacagatgctcactgcttatagacaatacaagctattcctgaatatcaacactgttcaggactcaccaactatgttctcccgtcgggttttcgaaattttggcttgcggtacaccagttgtatcaactcattctgatggtatgaaagctatgcttggaaaccatgtacatattgtaaataataaagatgaggcaaaaaatatcgttcagcagttgcttaaatctgatctaaggcgtgaaattcttgggcatcaagctgcgcggcattgtcttctgtatcactcttatgaaaaacgatttaaacaaatccttaatactgtaggaattaatacttctccacttaaagatgataaaatctcgataattatatgtacaaatcgcctccagaatatagatatgctgattgataattatcagcgccaatctcatgagaacaaagaattactactaatccttaataatgatgacttcgatatagatttgattaaaaataagactcgaggtatacctaacgtatatatatatcaactatcacaggaaacaactcttggcgactgcctgaactacggcgttgctcatgcttcaggacattacattgccaagatggatgatgatgattattatggtagcaattatttattggatgcattgctagcttttaattatagtggggctgatgttattggtaaggattcttacttctgctatgtggagtccaaaaatgtcatggctattaaacaaccgggtaaagacaatcgtttttcagattttgtatctggtggcactttaataataaagaaatatgtatttgagaagattaagtttcaaagttgtaatcgcggtgaagatactaactttcttaaagaatgtaagatgaacggatttactatttactcatcagataaatataattttatccaaatgcgctataaaaatactgccgcgcacacatggcaaatccaagatgaagattatcttaaaaattgtcaagtggttaaagatgaatttgataaaaaattgtcttttatataa

SEQ ID NO: 33585 - DNA, 792 bp, Escherichia coli
atgcctaatttagttatttatactgctgttactgggcattatgatgaactggggaatgtttatgaggaaccttcagttgattatatctgctttacagactacaactttaccggtacggtacctaaaccgtggaagcaaattaaattgccgccttcaaatttctctgataaagacttagcaagatattgtaagcttaatcctcatgtcctattgcctcagtatcagcattcgttgtggattgatggcaatattcgaataaaaggtaaaatacgaaattttattattgacattttgagcaagcatcgaattgcagcatatgaacattggtggcgagacaaaacagaacaggaatttcatgaatgtgctagaagtggtttcgatcctgcttggaaattatataaacaaattgagcgctataagcatgaaggatacacctcctcagatttttttgagaataatatactcatgcgtaaccatatggaaagtgacataatcaaaatgcatgaaatatggtggggggagtatatttcaggaggtaagcgtgatcaatattcttttacttatgctgcttataaaagtgatgtaaatatatattcattaggggttcatgatgctagagttataaaacaatattttgactatgtgacacactccaagaaaaggccgttaaaacaatatatctggattataataaatagaatctatatttctctaacgagatggagcgtaaatgaaccatctcggacaaataaattagtgctaaataatgaaagagattcaaatgaaaaataa

SEQ ID NO: 33586 - DNA, 447 bp, Escherichia coli
atgacgcccggcgagcgcagtctcattctgcgggccctgaaaaccctggaccgccatcttcatgaacccggcgtggccttcacctccacccgtgcggcacgggaatggctgattctgaacatggcgggactggagcgtgaagaattccgggtgctgtatctgaataaccagaatcagctgattgccggtgaaaccctcttcaccggcaccatcaaccgcacagaagtccatccccgggaagtgattaaacgcgccctgtatcacaatgccgcagccgtggtgctggcacacaatcacccgtccggtgaagtcactcccagtaaggcagaccgccttatcacggaacgcctggtacaggcactgggcctggtggatatccgggtgccggaccatctgatagtcggtggcagccaggttttctcctttgcggaacacggactgctttaa

SEQ ID NO: 33587 - DNA, 315 bp, Escherichia coli
atgcagtcgctgattctgccgccaccggcacgccaggcgctggcacaggcggcactgacttaccgttatggtgacgaacatcggcccgtcaccaccgccgacattctgacgccacgacgccgggaggattacggtaaggacctgtggagtgcttatcagaccatccaggagaatatgctgaaaggcgggatttccggtcgcagtgcaaaaggaaaacgtatccacacccgtgccattcacagcatcgacaccgatattaagctcaaccgtgcattgtgggtgatggcagaaacgatgctggagagcctgcgctga

SEQ ID NO: 33588 - DNA, 315 bp, Escherichia coli
atgcagtcgctgattctgccgccaccggcacgccaggcgctggcacaggcggcactgacttaccgttatggtgacgaacatcggcccgtcaccaccgccgacattctgacgccacgacgccgggaggattacggtaaggacctgtggagtgcttatcagaccatccaggagaatatgctgaaaggcgggatttccggtcgcagtgcaaaaggaaaacgtatccacacccgtgccattcacagcatcgacaccgatattaagctcaaccgcgcattgtgggtaatggcagaaacgctgctggagagccagcgctga

SEQ ID NO: 33589 - DNA, 315 bp, Escherichia coli
atgcagtcgctgattctgccgccaccggcacgccaggcgctggcacaggcggcactgacttaccgttatggtgacgaacatcggcccgtcaccaccgccgacattctgacgccacgacgccgggaggattacggtaaggacctgtggagtgcttatcagaccatccaggagaatatgctgaaaggcgggatttccggtcgcagtgcaaaaggaaaacgtatccacacccgtgccattcacagcatcgacaccgatattaagctcaaccgcgcattgtgggtaatggcagaaacgatgctggagagcctgcgctga

SEQ ID NO: 33590 - DNA, 753 bp, Escherichia coli
atgaaaaactcaatcaatttcatccttcagggtaaaggtggtgttggaaaatcatttgcgaccgcaatactggcacaatactttattgatgaaaatcacatggataatatcgtagtcggtgacacagacccggttaatacaactacggtaaaagtaaaaagattaaatgcagatttgatacaaatcactgaaaacagcaaagtaatacaatccaaattcgatccaatgttcgaatcaatgctgaccaatagtcagaatacctttgttattgacaatggcgcatctacatttttaccgttaattcagtatttcaatgataactgtgttatggacatgtttgaagatgtagaacaagacgtttatatccatactgttatcgttggtggacaagctcttgcggataccttgcagggatttgaagaactgaaagaactggttaaaggaagtaaggtaaaacttattgtctggataaatgaatttcagggtattccagcacttgaaaatatcccattaatagaaactaaattcattgaaaaaaacaaggatgtaatcgctggcgttgtggttattcaggacagaaaaagtgatgcctttgcctctgacatcaaagaactaacagaaaaatcactaacactgaaagaagctattgaatccgaccattttggattaatggctaagtcaagattaaaacgagtcttcaatgacatttacaaacaattagatagcatctatgacgatgaacacggtgaataa

SEQ ID NO: 33591 - DNA, 321 bp, Escherichia coli
atgacaacgttcaccgacaaagaactgattaaagaaatcaaagagcgtataggcagcctggacgtccgagacaatattgagcgtcgggcttatgaaatcgcactggcatcgctggaagcagaagcgccaaatttgcctggtggtttcacaattgaagaagcaaaagaattacacgaaaatctggtaaaaagtcacgtaagcaaggctttaagtggcgaaaaaatgaaaaaagaaaatcgtgatgccaatttgcgctggattcatggcgtaatagttcaggctgcgtggtttgtgaaagcatcactagggcagaacgcatag

SEQ ID NO: 33592 - DNA, 258 bp, Escherichia coli; identical to SEQ ID NO: 29581

SEQ ID NO: 33593 - DNA, 879 bp, Escherichia coli
gtgaaactgaaaatgcaggatttgaggctgtttaatattgtgttcgagagcgatcctggctggatactggatttatctaaccgcaccttgtctgcttttttcgatgaagaattgaacattgatattgatgatgaacgttatcagaaagaggggacgtcaaaagccaaacgagttagatgcttgctgaaacaggttgatcgtgagaccgctctgcgggttcttggtgcgctctggcagtataaaacggaatccatgcctgaacaggctgaacaaagccgtaatgactatcttgcactgatttcccgcttagaaaacgctgacaccgatgaagccaaaggcgttaagcctgtccaggcatggcatggtgttgactggcattcacttatcgctgaaatgaacgagatgaaatctctgccgccacatccacgtggttttcggtttgaagcctggcttgctgaactgttcagtatctttaagcttgctcctcgttcgtctttccgaaatacaggagaacagattgacggaagtttccggctgaatgatgaattttacctgatggaggcaaagtggcatcagaaaagaacgtcggctgccgacctccatgtatttgaaggaaaactcagtaccaaggcaacctggacacgcggtgtttttatcagttggatggggtttacgcctgaaggcctgacggcttttggtaaagggaagcgggttatctgtgtcagtggttatgatctttaccactcactgaatcataggatccctttacccgaccttctggatgctaaaacccggcacgcggctgaaacgggagagccctatgctgagttcgaccgactatatgcactgaaagacaaacagttcggcacgctgaaataa

SEQ ID NO: 33594 - DNA, 441 bp, Escherichia coli; identical to SEQ ID NO: 12669

SEQ ID NO: 33595 - DNA, 315 bp, Escherichia coli
atgcagatcaaataccggatttatatggctcacgcgttccatgccttcaggcaacaatgcatggactgccagttgcgacacgaccgaagatcaaaatggttcaattacagtttacgccatttgccagtgacgatacttatcactggcaaaccacgatgtaactacatttccccgacaggtcagttcggtgagtaccgccataaaagttgtattcgtcatagaagccgcatttcacaattcgattggcatcataggttgcaactgaccccgcaaaataattcggcttccacccgtgcggattttctgcattactga

SEQ ID NO: 33596 - DNA, 315 bp, Escherichia coli; identical to SEQ ID NO: 33595

SEQ ID NO: 33597 - DNA, 600 bp, Escherichia coli
atgtcgccggaggactggctgcgggcagagatgcagggtgagattgtggcgctggtccacagccaccccggtggtctgccctggctgagtgaggctgaccggcggctgcaggtgcagagtgatttgccgtggtggctggtctgccggggtgagattcataaattccgctgtgtgccgcatcttaccgggcggcgctttgagcacggggtgacggactgttacacgctgttccgggatgcttatcatctggcggggattgagatgccggattttcatcgcggggatgactggtggcgtcacggtcagaatctctatctggataatctggaggccacagggctgtatcaggtgccgttgtcagcggcgcagccgggcgatgtgctgctgtgctgttttggttcatcggtgccgaatcatgccgccatttactgtggtgatggcgagctgctgcaccatattcctgaacaactgagcaaacgagagaggtataccgacaaatggcagcgacgcacacactccctctggcgtcaccgggcatggcacgcatctgcctttacggggatttgcaacgatttggccgccgcatcgaccttcgtgtga

SEQ ID NO: 33598 - DNA, 462 bp, Escherichia coli
atggcagaaaaagcccgtcttgcagccctgttaccggagggatggtcacgggatatgacgacgttcctgtcactcagccaggaggtactgttatccctgctcagtttctgcaccgcgtgcagcatccacggcgttcagacccgcgagcatggtcacacgtcacgcagtccgctggactcgctggagagcgctatcggattccacatgcgcgactggtggcagccgacgaaagcaaacttcttcggacacctgcaaaagccgcagattatcgatgccctgaatgatgccggactgtccggtgctgcgcgggacgcggagaaaatgaagaaaggcgatgccgctgaacatgcagagttccacatgaaagacaaccgctgggtgcctggctggatgtgtacaccacgtccacaggcagagacggaaaccacggagtaccgtgacgaccaggcagaagccgcctga

SEQ ID NO: 33599 - DNA, 315 bp, Escherichia coli; identical to SEQ ID NO: 33595

SEQ ID NO: 33600 - DNA, 717 bp, Escherichia coli; identical to SEQ ID NO: 12768

SEQ ID NO: 33601 - DNA, 1317 bp, Escherichia coli
atgaacgataaaaacatcattcagatgcctgatgggtatctgaataagactcccttgttccagtttattttgttatcgtgtttattcccgctatggggatgcgcagctgcattaaatgacatattaatcactcaattcaaaagtgtattttcgctaagtaactttgcttcagcattggtgcagagcgcattttatggaggttattttttaattgcaataccagcatcccttgtgattaaaaagaccagttataaggtggcaattttaattggcctgacgctgtatattggtggttgtacactttttttccctgcctcgcatatggcaacctacactatgttccttgcagctatttttgcgattgcgattggcctgagtttccttgaaactgcagcgaacacatacagttcaatgatcggtccaaaagcctatgccacattgcggctcaatatcagccagaccttttatccgattggtgctgcgtctggtattttattgggcaaatatctggttttctccgagggggaaagccttgaaaagcagatgtcaggaatgaacgccgggcaaattcacaactttaaggtgctgatgttagagaacacccttgaaccgtataagtatatgattatgattctggttgtggtcatggtgttgttccttttaacccgcttcccaacctgtaaagtggcacagacaagtcaccataaacgcccgtcagcaatggatacgctgcgctatctggctagaaatccgcgctttcgtcgcggtattgtggcgcagttcctttatgtgggtatgcaggtcgcagtatggtcatttaccattcgtctggcgctggagttgggcgatatcaacgaacgtgatgcttcaaacttcatggtctatagctttgcctgcttctttattggcaagtttatagccaacatccttatgacgcgttttaatccggaaaaagtattgattctctattccgttataggggcgctgttcctggcatatgttgcactggctccaagtttcagcgcggtctatgtcgccgtcctggtaagtgttttgtttggcccttgctgggcgacgatctatgcaggaacactggatacagttgataacgaacatacagaaatggcaggagcagtcattgttatggctattgtcggtgccgcggtggttccggcaattcagggatatattgcagatatgttccactcactacagctttcattcctggtttctatgctctgctttgtctatgtcggagtctacttctggcgtgaaagcaaagtacgtaccgcactggctgaagtcacagcgtcctga

SEQ ID NO: 33602 - DNA, 198 bp, Escherichia coli; identical to SEQ ID NO: 8562

SEQ ID NO: 33603 - DNA, 555 bp, Escherichia coli
atgaacgaaaattatattgcatatgagacacttgtagcaaaccgtgctgctgctgagtgggcttgttgggcaatgattgcatcttgggtgagtgctggagctactattgttactttgtttttggcgttcaaggcattgtttacgtggcgggaacaagagaaaacaaaagtaaaaatagattttaggaatgcattaaagaaattaaagacagctctattatttatgcctgtcaatattgaccccgagcaactcaatgatgaacgagagcaagttattgcgaaatggctatttaaagatgtagatcttattagtcagcaaattgagttgggagaagagaatgttaaaagatttgatgaacttttgagtattttcgattgttgccagtcttcatggtttgcgacagagcacttatttgataatactgagttagaaaaagtttggcatgagttcgagtctaactttaataaatatataaatggtggtgagagtaaggatttacttatgaaaatgcttgataagctcatctcttctagatttgtatttgagtcaagataa

SEQ ID NO: 33604 - DNA, 1266 bp, Escherichia coli
atgttgattgagtttacagtacaaaactataaatctatttcagagaaacaaacactgagtttagttgcatcaaaacttaacgatttgcctaataatctgttcagtattgatgaacctaaatctcttgaattgcttaaaagtgctgtgatttatggccctaatgctgccggaaaatcaaacattattaacgctattacaactatggctgaacttattgtccggtctgctacaggttataaaagtggtgataaacttgatatcacgccttttagactagactcaaagaagattaatcaaccatctgaatttgaaattaactttatttccgaaggcatcagataccagtatggtttttctgcaacagaagattttattcacgacgaatggttatttgcattccccaaaggcagaccacaaaaatggtttttacgtctatgggatgaagaaaaacaaacccatgaatgggagttggggccatcgttgacaggagaaaaacaaacatggttgaaatcaactaggcctaatgcgctctttctttctacagcggtacaattaaacagtgtacaactaaaacctgtatacgattggttttattacaaagttaaatttactgaattaacaggttgggatagtgattacagtgcaaagcaatgcttaaatgataagaaagatgagattctcaattttttaaaagctgccgatgtaggtattgatgacattcatgtaacaaaggaaaaattcaatcccaatgctcttcctgatgatatgcctgcagccatcaaggaactagtgattaagaatatgcaaggcaaggaagaatatgtcattaaaacacttcataataatgaggctggagagccaattccattcgatttaaaagatgaatcgcatggaactagaaaaatctttagtttcgcgggtcccttatcacattcactcgagacaggaaacatcctgtttattgatgaattaaatgataacttacaccccaaattagttgagtttattgtaggtttgtttcacgataaaaatatcaataagaatggtgcccagttaatctttacaactcatgagacgtctattttaaatcaagatgttttcagacgagatcagatttggtttgtagaaaaagacaattcaaagcaaacaaatcttttcccacttacggattttagtccaagaaaaggaagggagaatttagaagcttcttatcttgacggtagatatggggctttaccactcattgggaaatgggagagatattaa

SEQ ID NO: 33605 - DNA, 687 bp, Escherichia coli
atgggaagcgaagatctgttcaaaaaaagaaaggctcggcgtaataatgaattcaaacgagttagtaaagcacgagctcaaatgaagaaaattctcatcgtctgtgagggagagaagactgagcccgcatattttacagattttataaaacattgccgtataagcacggcaagcatagttgagatttctggagagtgcggctcaagccctatgaatgtggtatcttgggcaaaagaaaaatataatacggaaaagaaaaggagcgacccttatgataaggtttattgtgtctttgatagagacgctcaccctaactatgatgaagctcttagcaggattaattccttaaatccaaaagggatttttgttgctataacttccataccatgtttcgagtactggctgatactacattttggatacacccgaaaatcattttcacctcagaaaggcaaaagtgaaggcgcacaaatgctagctgagttaaaaaaatacatgccagattatgagaaaaaggcatcaggtgtatttaataaattgcaagatcggctcgatacggcattaatcaatgctaaaagagtcgaagatgccgccaaaaaagacgggtcgataaatccttcaactaaagttggcgctttgattacagatctaattaacattcgtgatgactttgaaaatgagaagtaa

SEQ ID NO: 33606 - DNA, 1116 bp, Escherichia coli
atgagtaaagtctttatttgcgccgccattccggacgaacaggcaataaaggaagaaggtgccgtcgctgtagccactgccattgaagccggtgatgaacgtcgcgcccgcgcaaaatttcactggcaattcctggaacattatccggctgctcaggactgcgcttataaatttcttgtttgcgaggataaacccggtataccccgccctgccctcgattcctgggatgctgaatatatgcaggaaaaccgctgggatgaggcgtctgcttcctttgtcccggtcgagactgaatccgatccgatgaacgtcacttttgacaacctagcccctgaagtacagaacgctgtcatggttaagttcgacacatgtgaaaacatcactgttgatatggtgattagcgcacaggaattgttgcaggaagacatggcaacattcgacggccatatcgttgaagcgttgatgaaaatgccagaagttaacgctatgtatccggagcttaagctgcatgccatcgggtgggttaagcataaatgtaagcctggtgccaaatggcccgaaattcaggcagagatgcgcatctggaaaaaacgtcgcgaaggtgaacgcaaggaagccggaaaatacacgtctgttgttgatctcgcccgcgccagagccaatcaacagcacactgaaaattcaacaggaaaaatcaacccggtcattgctgccattcatcgcgaatacaagcagacatggaaaacactggatgacgaactggcctacgctctctggcctggtgatgtggatgccggaaacattgacagcagcatccatcgctgggcaaaaaatgaagttatcgacaacgaccgcgaagactggaagcgtatctcggcatcaatgcgcaaacagcctgatgcccttcgctacgaccgccagactatttttggccttgtccgtgaacgtccgatcgacattcacaaagaccctgtggcactgaacaaatacattactgaatacctgactacaaagggcgtgtttgaagatgaaggaacaaatcagagcgcaactgatactctctcgtcgccagtaccagaaactgatgcagtggaaacggcaattccagacaactaa

SEQ ID NO: 33607 - DNA, 1740 bp, Escherichia coli
atgcatgcgatcttgaaacaatacgtcgaagatctttctaaccaatttgcgatagaagaagatgaaccgaaactcttcgagtatttttgtaattatgttattgcttctaaaaagtatttaggacgatttagccctatcgatatcactactcaagaggatgatgcctcattagacggaattatctttcttattgatggtgaattaataactactgttgatgatgctgaggcgatatttaaaacccataaaacatcattgccagtggagttaatacttactcagattaaatctggtgaggcttttgttaaatcagatattgcaaatttcaagattggcttggatgattttttaagtcttaaaccaaaattaccaaatggtatctataacactcaagctattgaaatattgaaagtaatatttgcaaatgtaaaaaaaattaaaaacaaaaaaccatcgcttacagttcattattgcactagtggtacttatgttgaagagagagaaattaaagctacatttgatataattaaaaaatcatgcttcgatactgacttttttgattctgttgacgtgagacctctcgggcgtaaagaactaatggatatgtggatatccataaccgaaaaaaatgaggctgagttacagttgattgattacataggtatcgaggctatgccaggtatccctcaatcatatattgcaattgtaaaagcaaagcattttattgagaagcttgcaaaagatagtgatggaaaaataaaagagtcaatttttgaagaaaatatacgtgcgttcttaggaagtgataataatgttaataataaaatatcctcaactttagaagataaaaaaataaaagcaaaacaatttccagtgttgaataatggagtgactataattactccagagttatctatacaaccaaacacaaaagttataaatcttacaaattatcaaattattaatggttgtcaaacaactaatacactcttccatcattacgataatttaaatgatgatgttgagattgttgtcaaatttatagagtctcaagatgctgatgttgcaagtagcataattgaagcaacaaatagtcaatcagcaattgaaggagcagcgttttttgcattgcgtgaaaaagctaaaatggtgcagaaatatttcgatctacagaggaaagacccaaaactggaaagtatatattttgagcggcgtgaaaatgaatatcggccatatgatatacaatctacacgtatatatgatattaaagaactggctcgttgcttcatatctgtatttaagcggaacccgcacaatgctgctagatatgttaaaaaagtacttagcgaaagcgataatataatatttggtgaggccgataatgagtgcgcatattatactgcggcgtatatatgttataagtataatactatgattaacgggcgaagagaaaatgcacaaaagtataataaatatagatggcatattgcaatgttatatccttgggtcgtaaataaaaaggttgagaaagttgaattaaattcaaagaaaatgagtgcctattgtgagcgtattcttaaaacattttataatgacaactatattaagcatttttcaaaatgccatgagataattgatgctcttgctttagataatgagaatggtgttacagatgatcaactaaaacgtgcacgatatactactagtttaattgaaaaagctactgagattttgaaataa

SEQ ID NO: 33608 - DNA, 1182 bp, Escherichia coli
atgtgtatgaatcctttcccgcagcaaaacaaaagctatcaattctattacgatgaatctaataacgttcgtaaactatatctatccaaacaaattgatggttataacattgaccatgatccagacaagcacaacagcgtaaacttcgtgttagccggtgttgctcatactggttcctcatccagtgccgactttgatgatttacgccagcgcatacagctacaggccaacgccaaagagtttaagctgaaacacttagccaaaggcgacttcctgactatgctcacgtctaagaagctcacagcgttctttgagtggcttctctatggtgatctatacctacactacttccacctgaatatggagtattggggatacgtggacatcattgatgattgtatcctgttcggacgtgagaagggcttcatcccggaaatgagtgatgaacagttctatggctacatgttggcaaacaaggatgctctacacacctacgttaaggctaacaaggttcccttcatccagttcctcaagtcctatgacttcccatacatcgaggggagggaacaggctttcatacaagggctattaagtcagatctccgctcattgcgtaaacctctatacagctaccaatagagatgagtttcagcttcggttagctcatggcctcctgcagctcctgatggcctgctctgaccaaaacatagatgatatgacactcactatggatattagggatgaaccgcctacagacgacgacaaccgccttgttgatggttttgctattttctaccagaaccgggcgcaaatgttcgaggcttccagccatatctttgacatagagaaggtagtggaagcagatcttcaaaaggcagcagaagccaaccctaatctaacgcttaattactctttcgctgattcaaagctaaatcctctggttcaagtgagtgatgttgtggctggctttatgcagcactattttgattatctcaatagccatagctacgaacagattaaacatgacagaaacagccttaacgaaaggcaaagattaaatatggagtttttaaggctcctgataaacaaatctcatgataataacccaacattattacattgtgttatgtcagctttagagcatgaaaaacataaaacatttacttacccggatgaaccataa

SEQ ID NO: 33609 - DNA, 1194 bp, Escherichia coli
atgcaaaaagacaacgataaaggttttgcacttcttgaaattctgggaggactggttgtcatcagcctgctcatgccgctgttctggtcttacattgaagactacctgaatgaaatgcgcaaccagagcgccgcatttcatgcagatgcctacaatactgcagccaggacctacatcgccgataacaatgcccgcctgcatagtggaacgcttcctgccaccttcacggcggatgagttaatccggaaaggatatctgaagggtcttaaccgctcgccctttgggcagagttataccaccggcatccgtcgtaatacgagtaccggtcgtctggaggccctgacctgctccaccggaggggagaatatcaaagacgatgccctgcgcagtatcgccagcctgctccccggtctgggcggatttataggaaaaaatggcacagcaaccggtgtttttggtggatggacagataaacccggcgactatggactcagctgcaatggcgggcacatcgccatcgtaatgatgggtgatgacctgcaggaaagcgatcgcctgtatcgctttcaggtaccgggacgaccggagctgaaccagatgaacacggccatcaatatgggagggaacaacctgaacaatgcaggaaacatcaatggacaaagtgcaacactgaaaggtgatgttacaagcgaaaacggctggttaatcaccaaaaatgataaaggctggaagaacatcacctatggtggcggttttacgatgacagacagccagtggatacgcgcagtcggtggtaaaggaattataaccacaggggaaatcaaaggaggaaaagtcagtggggggacagtccggtctgacggtcgcctttccacaggtgagtatttacagctggataaaacagctgtagcaaatacaaagtgttcaccagatggacttgtaggccgcgacagcaaagggacaatactttcgtgccaatccggtacgtggcggacaataggtggaaaactcaaagttactcagctttccaccacaggttatctggggcaattcgacttctgtgccattgccagaatgggcaacgcagaggatgcccactactgccaggtagttgagagcccagcaggttcacgcaaatggtacaaatacgagcataagacaggttgtattgcgtcgtgtgtaacgctcaattaa

SEQ ID NO: 33610 - DNA, 279 bp, Escherichia coli
atgaacagattacgctttgaagtgaagaataatcagggctgcttcattttcccggaaacctggtatgaatcactactggagaagtttgacgaactgcttgacgcctttgacgaggatgagctcagcgacaggtcttatatcaatgccctgaagcatatcacacaacaggaaccggattttattgatgcgtatgcatacatggcatatgcctttctggagcaggagacaccgcgaaaagcgctgaatattgcactcaaaggactggcggcaggtatatga

SEQ ID NO: 33611 - DNA, 303 bp, Escherichia coli
atgattttggagattggtgaaaaactaaaactaatgcgtgaaagtgagcgcattacaagtcgcaatgaggctgcggagttaataggtattccgcataacgcgctatggcgttatgagactggcgaatccatacccaaaggggatgtaatgatgaaaatcttaaattgcccgcggttcgaaaaatatgccttgtggtttatgactggaaaaattgcgcctgaatccgggcagatagctccggctctcgcacactatgggcaagagccaacggatttacccccatccgaaaggaaaattggttaa

SEQ ID NO: 33612 - DNA, 342 bp, Escherichia coli
atgaaacagcaacgtaattcacgcttccgcaacggtgcggaacgccatgctaaccgtttcgctaccagtgcatcacgtagcaactctcgctacagcctgagcgaaacacacgcaacgccggatggctacccagtaaaacaaatcggcgagcacgcctggttgattgagaaagctggaatcgtggtccacaaatgcccacgcaatccgtttaccggaaaccgcatttttgcactgagcagcggcgacaatcagttcgggcaggatttcacattatacgaagcacttcgcacggttgatcgtctgcttcgcggacaaagttttattaaacaggttgatttataa

SEQ ID NO: 33613 - DNA, 144 bp, Escherichia coli
atgaccaaagagtatgcacaaggtgtatttatccgttttattgattttcgcggtgaactgttattacgtgcatcagctattgatgctgtagcccaggcagaaaaaaagcagttactcacgtttatgcgaacaacgcacaactga

SEQ ID NO: 33614 - DNA, 186 bp, Escherichia coli
atgttcagactatgtgatatttacaacactaatatacattcaatggacttcggtaaagttccatggcagtttgtctttttacttgtgatgagcaagcagagatatacccgacatgaacattctccagactatattacaggagaaaccaccaccttcctaagtggtggtttggagtttacagcgtga

SEQ ID NO: 33615 - DNA, 297 bp, Escherichia coli
atgagtgaaatggtattttgtcgcggatgcggcaaggaaatacataaagatgccacatcctgccccaattgtggagcacctcaaagaacagcaagttcaaaaagcagaatgacagccgcactactggctttctttttaggtggtcttggtgcacacaaattttatttaggtaaagtggggcaaggattcctttaccttattttttgctggacattcattccggcaatcgtggcatttattgagttttttatctatctatgcacctctgatgaagactttgcccgcaaatatggctaa

SEQ ID NO: 33616 - DNA, 402 bp, Escherichia coli
atggctgacttcattaatgataatgcacttcatgatagtgttcaattattggggtggcgtaatgatacacctattttacttaatgctatggatatctttgtattaccttccctttgggaggggatgccattagctattcttgaagccaaaagttgtgggcttccttgtgtcgtatccaatattcaagggaatcgcaacataattaacggagttgataatggactattgtttgatttgaatttaaattggcatgatttacatgataaattaaaactgcttattgaagattcaagattaagaactatccttggcaaaaactcgcgtcttgatgtgatgattaatcataatatttcaagtagaattaaaaagatagaaaaactgtatttaaacaagatcgtgtag

SEQ ID NO: 33617 - DNA, 2346 bp, Escherichia coli
atgcccggtcagtaccagatggaaatcaaagtaaatgatcagagcatttctccgtcggcatttcagataacgtttcttgaaccaccttattcagattcggataacgagaaaccgttaccagaaccctgcctgacaccggagatggttggtcatatgggactgacagaggcgtcacaggaaaaaatcacatactggaataacgggcagtgtgcggatttccgacagttatccggagtggagatacgcccgaatccggcagagggaatgctgtacatcaatatgccgcaggcctggctggaatattccgatgcctcctggctgccgccgtcccgctgggataacggtattccggggctgttgtttgactacaacatcaacgggacggtgaataagccgcatcaggggaaacagtcccagtcgctgaactataacggaactgcgggggctaacttcggtgcatggcgtctgcgtgcggactatcagggcaacctgaatcacaccaccggcagtgcgcaggggacggacagccagttcacctggagccgtttctacatgtaccgcgccatcccgcgctggcgcgcaaatctcacactgggtgagaactacatcaattctgagattttcagctcctggcgctacaccggtgccagtctggaaagtgatgaccgcatgctgccgccaaaactgcgcggttatgcaccgcaggtctcagggattgcggatacgaatgcgcgtgtcgtgatttcgcagcagggacgcatcctctatgacgccaccgtgccggcaggtccgttcaccattcaggacctggacagctccgtgcgtggccgcctggatgttgaagttatcgagcaggacgggcggaaaaaaacgttccaggtggacacggcatatgtgccctatctgacccgtccgggccaggttcgttaccggctggtttccggtcgttcgcgtaactatgagcacaccacggaaggcccggtctttgctgccggtgaggcatcctggggtatcagcaacaagtggtctctttacggtggcggtatcgttgccggggattacaacgccctggctgtggggctgggccgggacctgaatgagttcggtactgtttccgctgatgtaacccagtccgtggcccgcattccgggagaagagacgaagcaggggaaatcctggcgtctgagctattccaaacgttttgatgaagtgaatacggatatcacttttgcgggttaccgcttctctgaacgcaattacatgacgatggaccagtacctcaatgcccgttaccggaatgacttcacgggacgtgagaaggagctgtacaccgtcacgctcaacaagaacttcgaggactggaagacctcggtcaacctgcagtacagccatcagacttactgggaccgccggacatctgactattacacgctgtcggtgaaccgctacttcgatgcgttcagctttaagaatatcgcgctggggctgtctgcatcccgttcgaaataccagaaccgggataacgattcggcgtttgttcgtctgtccgtgccgtggggaaccggtacggccagctacagcggcagcatgagcaacgaccgttacaccaatacggtgggttacagcgacacgctgaacaaagggctgagcagttacagcctgaacgccggtgtgagcagtggcggcagccagccatcgcagagtcagatgagcgcgtactacaaccacagcagtccactggccaacctgtcagcgaacttctctgctgtggagaacggttacacgtcattcggtatgagcgcatccggtggtgcaacgataaccgcgaaaggcgcggccctgcatgcagggggcatgaacggaggaacccgtcttctggtggataccgatggtgtcggaggtgtgccggttgacggtggccgggtctccaccaaccggtggggcattggtgtggtgacggatgtgagcagctattaccgcaacatcacctcagtggacctgaacaggctgccggaagacatggaagccacccgctcggtggtggaatcggtcctgacggaaggggccattggttacagggagtttgaagttctgaaaggtagccgtctgtttgctgtgctgcgtctggcagacaacagccatccgccgtttggtgccagcgtgacaaacgcgaaaggccgtgagctggggatggtggcagacagcggtctggcctggctgagcggggtgaatccgggtgaaaccctgaatgtcggctgggacggccggacacagtgtgtggtggacatcccggcacatccggacccggcacaacagttgctgctgccctgtcgtcaggtgaagtga

SEQ ID NO: 33618 - DNA, 231 bp, Escherichia coli
atggcaaaccgcaaacagcaccgcgctatcgcggagcgtcgtcacatccagactgaaatcaaccgcagactttcccgcgcattccgcgtcgctaaaatcatgcacatcaatatgctgcatgagcgtagctgcgaactttcaaacctctattcatccgctgttttcagctatctggcggatgatctgcgcgagcttcagcagctcatccagcagcaaaacaaactccattaa

SEQ ID NO: 33619 - DNA, 213 bp, Escherichia coli
atgaacgaaaagacctggtttcgcgcatacatgtgggcgctggtatgcgtcctcttttctctcattctgtatgcgggactactcccccgaatgatttcatcagacagctccttcctggtattgctgggcatttttgtcgccttgctgtacccggcgggcgttgtccgctttttcagtaactacatcaaagcaactatggaaaccaaacaatga

SEQ ID NO: 33620 - DNA, 219 bp, Escherichia coli
atgaacagaaggagaattacacgcagacatcgccgcacgcgcctgagctccccgccaacactaaaggaactcattcaaagcgagatcggtgatttcttcgctgggtttggatcacctagcgaaccagaaacaccagaagcgatgcagcgcgaactcatgatgcgcatcgataacgtttttgactttttcctgaataacaaaagagagcaaccgacatga

SEQ ID NO: 33621 - DNA, 123 bp, Escherichia coli
atgagcaccatcaaccaccaggaaccacgcgaactggcgactgccgtacaaagaatgtctacccaaaaatcactgccattccgtgtgagccctgtccgacgggtacaggagtcacacggatga

SEQ ID NO: 33622 - DNA, 1068 bp, Escherichia coli
atgaccatcgatactattgatgacaaagcaatatatcaattgaatgtttatttaggttcagaaagaaactacaaactaaacttaattaaggctttcatcactaaatggaaaaatctcaattaccctggggtagatgcgactgccattagaatgctggagaaaataaaaatcattccaaaccaaacaggagatgcagttaaaagacgagatccaaataaaggacctttaactgaaacggaattcaataacattattaacgccgttggaaaattttatcatgagaagaaaattcaatgctttttgtattgttatatccttttgctggcaataacaggaagaaggccattacaattgatatctctaaaagctaaagatctcattaaaaatgagagagggtgctttttgaatgtaccaaaagtaaaacaaagaaaatgtttcagaaaagaatttaacatggtaatgatagaaccgttcttatatgacagtttatcaatgctaattaatcaaaatcaggcgtttgttgaagataaattcagtgttgggattaataactatagaggcgagttaccaatcttcatgaatttagataagattacggaaacaaaaaggattgaggattttttatctgatttaacaacagattttttccatatgaaaaattcagttatgtcaaaactattaaaacactttccgtcaaaattcgatgttaggtcagaaaggactaacagctatatagaacttaatgctagaagattcagatatacgttaggaagtcgactggctaacgaaggagcctcaattgaggtgattgctaaagccttagatcataaatcagtaaactcttctatgatatatataaaaaataatcctgacaacgtttatgacatcgataagagactaagtgcgttttttaaccccttatctaatatacttatgggcatagggattgaagaaaacaagaacttttttatcaagtgtgtttcagatgcatttttcttattagaagatacgaaagaggatttgaaatgtttaatgtgtaaaaaattcaatccctggagagcattatga

SEQ ID NO: 33623 - DNA, 936 bp, Escherichia coli
atgtcccgcgttcaggcactgacgcgaatcgaccagaacagcccgcagtttaaggcgctacgtgagcaggcgttaaaacttggctctgaaacgcagttcaccgcaggcgatgccgccagtggacaggcatttcttgcaatggctggcttcactccgcaggccattcaagctgcgcttcccggcgtgctgagcatggcaacggctggcggtatggatctcggcgagacggcagatattggctcaaatatcctgacacagttcggcctttctgctgaccagatggaccgggtcggtgacacactcaccgcagcgtttacccgtaccaacactgaccttcgcgcactgggcgaaaccatgaaatatgcaggtccggtggcgggtaagctgggaatatcgctggagcaggccgcagcgatggcgggcgtgctggcgaatatgggtatcagagggagtgatgccgggacggcaatgcgtgccagcctggctcgtctggcatcaccgccaaaggcagcagcagaggcgctgaaagagcttggtgtggcagtctctgacgcgaacggcaaaatgcgcccgatggaggatgtgctggccgacctttataaagccacccgcaaatacggggaagttgaccgggtatcgttctttaaggacattgccggagaagaggctttcacatcgtttatggcgctcgttgatgcagcgggtgacggttccttacccaaactgagaaaagaacttgaaggcgcgcgcggtgaggctgaacgcaccgcaaaggttatggccaacaaccttgacggcgatctgaaatcactcggcagcgcatgggaagggttgcgcatccgcattgcagatctgattgacggtccgctgcgttctgtcacgcagtggctcacgcgggtggtatcacggcgctggcgcaggcccatccggcactga

SEQ ID NO: 33624 - DNA, 681 bp, Escherichia coli
atggctgaagcgattacctaccgccagaaattcaacgaacgtgaagtgatgctcttgtggccggacttcatcgcctacaacccgaaaagtggcgaaaacgaaacgttccccgcgcctgcctatgcgtgcggccttcgtgcgtacattgaccatgagcagggctggcacaaatcgctgtccaacgttccggttaaaaatgtgctggggatgtccaggcatgtgttctggtcgttacaggccgaagacagcgatgccaacagcctcaacaacaaagaaatcacgaccattattcgtcgcaacgggttccgcttctggggcaaccgcacaccggaaacgaacgcctacatctttgaggtgtatacccgaaccgcacaggtgctggctgactcaattgcggaagcgcagtttgaaaccatcgacagtccactgacgcctgcgaacgtgaaggatgtaatcagtgccatcagggcaaaactggattcactggttactgccgggaaactgattggcgcggagtgctggtatgacgtggtggataacagcaccacggatttacgtcagggacgtgtgcgtattcgctacaaatatacgcccgttccgccactggaagacatggagctttaccagacgtttactgatgaatactttgaacccgcatttgcggtgctgggaggtgcctga

SEQ ID NO: 33625 - DNA, 150 bp, Escherichia coli; identical to SEQ ID NO: 17113

SEQ ID NO: 33626 - DNA, 222 bp, Escherichia coli; identical to SEQ ID NO: 9129

SEQ ID NO: 33627 - DNA, 405 bp, Escherichia coli; identical to SEQ ID NO: 13528

SEQ ID NO: 33628 - DNA, 336 bp, Escherichia coli; identical to SEQ ID NO: 12930

SEQ ID NO: 33629 - DNA, 558 bp, Escherichia coli; identical to SEQ ID NO: 28300

SEQ ID NO: 33630 - DNA, 192 bp, Escherichia coli; identical to SEQ ID NO: 28060

SEQ ID NO: 33631 - DNA, 369 bp, Escherichia coli; identical to SEQ ID NO: 9121

SEQ ID NO: 33632 - DNA, 192 bp, Escherichia coli
atgaattcagcatttgcgcttgttctgacagtttttcttgtttccggagtgccagttgatattgcagtcagtgttcacaggacaatgcaggagtgtatgactgcagcaaccgaacagaaaattcccggtaactgttacccggtcgataaagttattcaccaggataatatcgaaatcccggcaggtctttaa

SEQ ID NO: 33633 - DNA, 222 bp, Escherichia coli; identical to SEQ ID NO: 8150

SEQ ID NO: 33634 - DNA, 237 bp, Escherichia coli; identical to SEQ ID NO: 9333

SEQ ID NO: 33635 - DNA, 339 bp, Escherichia coli
  misc_feature (321)..(330): n is a, c, g, or t
atgaaattattactttgggttccgccttggtccgcacatggtgatttgaatttttataaaaatgctgttcaaaatcatctaatcccacaaggtaatattctttctgaagaaggttgggatgtcacattatttcttccttcgaaccttgatattctgcgctcttttgcatgtaaaaatataaagataataaactttaatataaatgatcaaataaattgctttggttcgctcaatgatttgtcgattgagttttacaagcaaaaggataatgttaaaaagaaaattgaaaatatttccagtaccctatcaaactatttggannnnnnnnnntcattatga

SEQ ID NO: 33636 - DNA, 927 bp, Escherichia coli
  misc_feature (903)..(912): n is a, c, g, or t
atgttccctgatgcattgatagtaaatcaaatgcctggagtattcagtagacctccatatccacattttataacattcgatattaatgggctttataagagtagcactctttcaatttatagcgaagatattaaaaaatgtaattttcaagagaatgaaataagtttggctaacttatttatagatagatcaaaatatgagataaacacacttacaccatttaaaagaaaagaccttgatcctacagaaaagtatgagaagttaattcttcttcccttacaagttagtgctcattactcttttcaatcggatacaccatactccaatcagatggagtttttacttgatgtccttaaggattccgatgaaaaaacaggtattgtagtcactcaatatataacacctagagttgcggatacaatattaactaatgatgtggttagcagtcttaaagctaagtggccaaatctcatatactatccaattttcgataaaattagcagcatatctcaatttttattaccattagtagatgaggttgtaacatgttcgtcatctcttgggttacaagggatttcttggggacgacaacttaaagtttatggaaatacatatctaactccttattccaataacagttctccattacattaccagactttgaggaaagaatcgctaaacattctgtcatttatattaacaagaaaccaaccccttgcacactctgtcatcaaagatgggaagtttttgtccagacttcttaaagatttattaaatgtcaagcgtagtggtataaataatatatatgacttaccttcatttttatctattgatgaaaaatatgaagacaagctattcaactcattccgaacagaacgagtaatcaaagacctaagtcaaatnnnnnnnnnnaagtcaaataaataa

SEQ ID NO: 33637 - DNA, 2019 bp, Escherichia coli
atgctacacattagtaatggggtggcagaaaacttttctcgaattagacacgtctcagaggtcgaagctaggaatgagaaagactcaaaagaggtaacattagatgaaatttacgataagataaaagagttttacaagctggatagagaaacaattaataacatgaaatgggcggaggttgagtatgaaacaaaaataattaaacctcgccctgctggtaaaaagctgtgggatatagcaaaaaaaacaggtaaacctatttacatcatatctgatatgtatttacctaaggatgctattcttaacatccttaaaattaatggatatgatggctttgagaaagtatatatttcaaatgaatacggtgtcagtaaaaaagaaggggggctttttgatcttgttattaatgagtccggagtatctcctgataatattttgcacattggtgataataatatctctgataataaagagcctaagtctagaggtattaaaacatatagacttatacgttctatcgaccgtttgcgtagtagtgaggtctactcaaaaatatatccagaaaaaataggtaataatgaattgtctcgctctttattagccggattaacagcacaaaagatttttgatagtgaaagtgatccgggtgctaaaaagagccatttctatggtgatcctgttaatttaggatatgcagggattggtcctttcgtctctgctttcatgttatggctaggacgcaaagctaaacaagataatatttctcacttatatttcctgtcacgtgaagggtggcttttaaaacaagtttatgatgttatacataaagatgataaagatgtaccatcgacaacatatttgtatgcttcaagaagagcaactcgtgttgctagtttgagaacacttagtgatgtaatatctttatccagccatccataccaaggcaatattaccgttggtactcttttagaagacaggtttggtattaatgtaacgaagataactcaggaacaatgggaagaggctggctttataggtcctgaagataaattaactactgactttgtagagcgtaaaaagttatcaaatttatgcactattattagtgatataatactaactcatgcaaaaaatgaaagaaaaagctatcttaattatgtcaatagcactggtcttagcacagaaaaaaaaccagcaattgttgatatagggtggcgagctaatatgcaaggtgcactttcatctctaataaataaaccattagatggttattattatgcaaccttacaaggaacagagatttggtttgacaaggggctgaaatgcaatggttttatgggggatttactatctgctaatcatccaagctatgttgtccaaaataggcctctaatagaatatttaatatgtcatacagaacctagcctgatcacaatatctgatgatgatggttttaaaccaatcttccgtccagaaagtagtattggccatcgacgtattttgttagagttagttcatcagggggcaattcaatttgcaactgacatgatgaataattttagggattctattgatcaaatctggattgatcccttccttgctgaacgtacgcttagctcttttttacaaacacctgattttgcagatgcacagttatttatcggacacacatttgaagatgctcttgctggtgtgaaacggaaatatataatttcacctacggataaagatttttcaaaagactctgtatggcgtcagggggctgctgttttatattcaaaaaaagcagtggcgaacaagtcttcaaaaccatctccacaattgaaagagtctgttaaaacgccgactaatattacttccaaggaaactataaaatataactggaaaagggctgttgaggctaaaataataaagtcactcgtatctcaaaagaaattccttaagtatgaaaataatagggatgatttttttaaagactcaaaatacaaaatcataaaaaaaatggcctcctggaaataa

SEQ ID NO: 33638 - DNA, 600 bp, Escherichia coli
gtgaataaatttgatagttttaaatataacaataatattattattcattctaatgctaaaatatcatctgatgttaatgtaaatataattggtactgataatgttatcgatataggtgactcggttatattgaggcgattaaatataaatatattgggtaataattgtaagttgattataaagaataactgtagtatacgtggggctattcatttgaggcagaacaactcggtcattatcattgattcttataccacatctgtgtctgctaatatattttcaatggaaggctcagagattaatattggttcaaattgcatgttatctagttctgtgtatatacgaaactctgatgagcatcctatttatgatcttgaaagtaatgagcgaataaatcatgcaaaaccagtattcattggtaataacgtttggttatgtgaaggtgttactgttaataaaggcagcatcattccagatggatgtgtaattggagcaaaatcatttgtttcaaaagaactaaaaaggaaaaactcaatttattctggtgtcccggcccagttaataagagagaatataaagtgggacaggacttttaaataa

SEQ ID NO: 33639 - DNA, 4026 bp, Escherichia coli
atgaacagaatatattctctcagaatgaatgacagaaaagaactggttgcggtagcggaaacggcgggcggcaggaaaaagtcgtccggcattcccggtgcggggatgctttcccgtcttcttctggcctcaggtgccgttgccggtgttctgttttcttatccgtcgctggcatccgttgtcgggaataccctgccctggcagacctacagggattttgctgagaacaagggcgcgtttcatgccggtgccacaaatattccgctttatggcaggaacggggctgtcggtgggcggctggacaaggcgccgatgatggatttcagtgttgtggaccagatactgggggtggcaacactgatttctccgcagtatgtggcgggggttaagcataacggcagctacaacacggtgcgttttggttatgcggatgatacgacatatcgccttgttgaccgtaatgagcactggcgtgattttcatactccccggctgaacaaactggtgacagaagttgccccggtgagcgtcacggatgccggaaccggcaagggggtataccagaaccgcagtcgttatccggtgttttatcgtatggggagtggaacgcagtacaccggagctgcttccggtgcgctgaccagaatagcgggtgcttacgcctggaagacgggcgggacggtgggaagtccgctcatttctgactggagtctggtgtcaaacccggggtatctgtaccagagtgtcaatggtccgctggcatcttacgggacaccgggagacagtggctcaccgctttttgcctgggatgcggtgaagaagcagtgggtccttgttgctgtacttaatggttatgccggtgagaaagggaagacgaactggtttacggtgattcccgcaggggatgtgaataacacgataaagcaggacagttcaggcactgtcgtgccggcagttgccggtggtgacattgtgtggaattacagtaagggaagcggagagggaaccctttctcaggacgggaaggtatggaagatgaacggcttcaggggagggagtctgaatgacgggaaagatatcacctttgggggtaagggcacggttgtcctgaagaatgatgttgtccagggggcgggttcgctcacgtttaatggtgattatacggtcagaccggaagggaatcagacctgggtgggcgggggaatcatcgtgaacgacgggcaccgtgttgactggatggtgaacggacttgcgggagacgcacttcataaaactggtaagggaacactggtggtggccggcagtggtgaaaatcctggcaccctgaatacgggggacggaacggttattctggcacagaaggctgatgctgcaggcagggtccgggcattcagtgaagtccgtattgtcagcggacggccggttgtggtgctgcaggacagtcatcagattgagggggaccgcatccgctggggataccggggaggcacgcttgatatcaacggcaatgatatgaccttccaccggctggctgcggctgatgagggggcagtactcacaagccgggcgggttctgccacagttcgtctggatttcagcccgtcagggcagaaggccgtgatgtggcatggtcattttaccggcaacctcagtgtcctgaacaacacgtcatcagcggtggatttcatcatggatggcggagcggatatgtccggcagttttacacagcagggcgggggactgtatatccaggggcatccggttgttcatgccgtgagcagtgaggcggttgcggctgcattgcgaaagcagggtgataattctgttctgacgcggccggtatcatttacccagaaggactgggagagcaggacgttcagcatcgggcaactgaaactgaaggaggcgtcattcagcctttcccgcaatgcgacactgacgggggatattgatgctgataatgccaccatggtgctgggaagtgactcgctgtatctggatatgaaggacggcacggggagcagcagtgcgccggttaaggggacatctgctgcgggcggtgcatccggtaccagtacattccacgggaatgtgaatatgcgtcattcttccctgacggtccgcgaccattttaccggcagtataacggcatcggacagccggatagccgtgagctcagagaatgtgcgtctggaaggggattcccgcctgacgtcttctgcacttactgtcagtgacggcgggcgtttacatgtgaaggggggactggagacagatggtggtgtgacactggatggaggaacccttctggttgacgggggaagtgtgaggaatgatgtgtatgaacgtctgctggcctggtcagaggtgcgtggcgggctgaacggaagcggtgagtatgattttatgacgggggcagctggtctcctgcggggttatgtcagagggagtgcaggtaatgtgaatctgcagaatgcggcctggatgatgacgggaaactcatccgtgaagcatcttgagtcatcgggaagtgctctgtatttcagcaggccgggcggggagttccataccctgacggcaggcagtatggatatcagcgacagtgttctggtgatgcggacggaccttcaccactcagaccagcttcgggtgacagaatcgctgcggggtaagaataatctgttgttggttgattttactgagcgttctgacgggcagaaggcgctgaatatccctctggtgacagcgccggccggtaccggcgcggatgtgttcagtgtgaaaacgcgtgataccggcttcagtcatatcacacctgttgtcagggctgaacaggggacgggcggcacggcctggcagctgaatgttgtgcagccggaaactgccgcagagcctgtggtggatgaggtgagcaggccgtcgttgccggtggtgatgcggcaggatgcaaagacaccgaatcctgtggaagccgtatcaccgctcccttcaccggtttctgctccgtcaccggctccggaggcgtcagtgacggatgtactgaccggagagaatgcgggggaatcaggtgagtaccgtgatgagacccggtggctgctgacaggataccggagtacggttaatgcctctgcggtcagggatgccgggatgctgatgtcaatggggcaccgtaacttcattaatgaggtcaacaacctgaacaaacgtatgggtgacctgcgggacatcaacggcgaggccggtgcatgggcccgtatcatgagcggaaccggctctgccggtggtggcttcagtgacaactacacacacgttcaggtgggtgcggataaaaaacacgaactggacggtctggacctcttcaccggggtgaccatgacatataccgacagcaacgccggcagcgacaccttcagtggtaaaacgaagtcagtgggtgcgggtctgtatgcttcagccctgtttgattccggggcctatatcgacctgattggtaagtatgttcaccatgataatgagtatacggcgacctttgccggacttggtacaaaagactacggctctcattcctggtatgccggtgctgaagtgggttaccgctatcatgtcacagaggatgcctggattgagccacaggcggaacttgtttacggtgctgtctccgggaaacagttcagctggaaggaccaggggatgagcctgtccatgaaggacaaggactacaatccgctgattggccgtaccggtgtggatgtgggtaaatcgttctccggtaaggactggaaagtgacggcacgagccggtctgggctaccagtttgacctgctggcgaacggagaaacggtactgcgtgatgcatccggtgagaagcgtattaagggcgagaaagacggccgtatgctgatgtctgtgggtctgaacgcagaggtccgtgacaacatccgttttggtctggagtttgagaaatcagcctttggtaagtacaacgttgataatgctgtcaacgccgggttccgttattcattctga

SEQ ID NO: 33640 - DNA, 147 bp, Escherichia coli
atgagttccgacagaaatgccgtaaaaaagggagtttcgcactctccgccagaaaatgccagggctgtaaattgtattaaagcgccggtttataccatacaaaaagtgacttgtgaatctgaggcaggttgctggttaagcgggtaa

SEQ ID NO: 33641 - DNA, 249 bp, Escherichia coli
atgcgtgttgagatctgtatcgctaaagaaaaaatcagcaaaatgccaaaaggttctgttcctgccctgcagcaagagatgctgcgacgtgtcagtaaacgttatgatgatgtagatgtgatcgttaaatctgccagcaatgatggactcaccattttaagagctgtagataaagaatccgcgcacgaatttgtacaggaaacactgcaggaagcctgggaaaccgctgacgactggtttattcaataa

SEQ ID NO: 33642 - DNA, 219 bp, Escherichia coli
atgtttgaagtgctgacagtgataaccaggtatcacaatgaagcggtaatgagcagaagggagatagacacttaccgctacaagagtcgccgtacagcggtaaaaaagtttgggcaaattgcggaagtgattaaaaacgatctctaccgtgtgcgccaggtaaaaggaaacccgtgtaaatacgttacatcagtggagttaagatatgttgcagaataa

SEQ ID NO: 33643 - DNA, 306 bp, Escherichia coli
atgagcgaaccaaaatttggtgaaaaactttacaagcacgacggacggatcacgattcagcaaataagcgcagctacaccaggctggtgggttgaaacagacgaaggatcatcacccgtggcatcatgggcgctttgtgtgcttagttaccctgaccgcgatgtgtatcaggatattctgcctgtgatatccactgacaaaggcatgaaacccgtagacatcaaaaacatgggttttcagtgcgtaatgctcactgaaaaaatgatggaagagatgaaaaagaataacgccggatcgcttcactga

SEQ ID NO: 33644 - DNA, 453 bp, Escherichia coli
atgtgcaataaaaccacaccggacgcagcagctgccgcactcactacgctgatgcacgcgcttattgatattgaatgcacagcagagcttgcacaaaaggaagaaagggaagaatacacactattcgctatggaatgtatccgatacaccgcaatgcggtcactgaatgacgctaaaaatattcttgttgctgattgtgaaaatgggggggttatgcgtgatgatcgttttaattccctgaaacaggaattttccggcgtatctgatgatgcgagtgatgcgctttcgtcaatatccgaactgataagagcggcctttttcttacttggcacgaaagaaaataaaacaacggggtttgatgtactaaatatcaccgctgattatgcggaatatgtggcagaagtcgatttaagaaaaattccgaattgtcgcggcattaataacgcttcttga

SEQ ID NO: 33645 - DNA, 180 bp, Escherichia coli
atggcaacaaaagcagttaatgcaaaatccaaaaagcttgaggctcgagtaccacacgcaatagctgatgctgtagaaaatttaaaggaagatggcgaaagtacagggcaatttatcgtttcggcacttgaaggcgagatcaaacgccgccagcgccgcaaggccaaagaatcagaataa

SEQ ID NO: 33646 - DNA, 270 bp, Escherichia coli
atgaatgagttacagcatcagggagctgaactacgcaacaaagccaaagaattggctttacgcatactcagagctcacccagacgcccaaaaaaacggcaaaggagttaaacaatctgaagtatttcatcttagcggcttgaattggggagaaaaacggaaagcaacaagttcgcaccaacaatattgggtcgttgcactattgcgtgagctagaagaggaggggttagtcgagcagattgaagatagaggcccctggcgtctaaggtaa

SEQ ID NO: 33647 - DNA, 249 bp, Escherichia coli
atgcgtattgagatctgcatagccaaagagaaaatgactaaaatgccaaacggtgctgtggatgcgttaaaggaagaattaacccgacgcatcagtaagctttatgacgatgtggatgtgatcgtaaaatctgccagcaatgatggactgacaattttaagatccgtggataaagagtctgctcaaaagttcgttcaggaaacgctgcaggaagtctgggaaaccgcggacgactggtttattcggtaa

SEQ ID NO: 33648 - DNA, 174 bp, Escherichia coli; identical to SEQ ID NO: 24696

SEQ ID NO: 33649 - DNA, 1440 bp, Escherichia coli
atgacgtcaggtaaaaccaatctctttcgcttcaccaagtcagctattaaccagatcccgccatcgccaaagggcaaacagcttgaatatcttgatacacaggttaaggggttgcgtctccgcgtgggatcaacgggaaaaaagacgtttgttattgtcaggaacggcaaggagggatttatcagggtcaaggttggaaactttcctgatatgtccgttgaaacagcgagagcggtcgccctgaagaagctgggtgatctctcattaacgcgaaagaatccgaacaaagagaaaaaagcagccgaagaaagtaacgaagaaaccaacgaacaacgcaacgtaacgctaagggaggcgctcaatcagtatctggatctgaggggcgagcgcatcagcgagactacagccaaacaatacacgtccttgctgtccaatttttcgcgtgactggtttgatcttcctttggcgaaaatatcaaggcgcaaggtgacgacaaggcacaagcaaatcactgacggatcggcctggtttggttcgccggaacagaaaaacaaaaagaacgtagcgaaaggaagcaaggcgcaggctgatttgtgggggcgagtactgagggccgtctaccggtttgcgtatgattattacagggatgacgacgaacaaaggttacttcctgaacctccaacgcaggcgctgacgtcacaaagacaatggaacggttcgaaacggaaaacaacacgaataagaaaccacgagattgggcgatggtacagagcggttaatgctgttctttgtgatgctgaggctatcagcgactttactgctatgtcggtatgtgatgcgctgatttcttcactgtttacaggaatgagaaagggggaggttctcggcctcacatggaataacgtagatcttgaaggtggatatatccggctacaagacacaaaaaacaaaagagatacagaaatacctataacccaaacgatgcgggaaataattacgcgtcgtgataagtggcggatatatgccagtgattacgtatatccttcattctgtggggagaagatagaaaacccaagaagaacgattattcagattatggataaaacaacaattattgacggcgaatataaagcgcctgttaaattttgttttcatgacctccgccggacctttgccagcattgccgagctaagcggcgtagggatatatacaataaaaaaactcatgaatcacaaatctgggcaaggtgcagatgtcacaattggctatattaatatgacagctgacgaattattacagccatctcaaattatcgaaaagagaatattaaaggaaattggcatagcagataataaaaacaacgttaatatagatgagtttttagggaaactgtctccagaagaaatattgcttattaaaagcaagttatcaactatataa

SEQ ID NO: 33650 - DNA, 744 bp, Escherichia coli
atgacaactaacaacaacttaattaacagaattgacctgattatgaaagttaccgcacctttacgcaaaaaactcgacagcgcaaaaaaagcccttgaggtgcttgaaccagctcgcaaacaagtcgaggctttaacttcatcgaataagaacgaaaaaaccaaatcaaatttatggtattttgaaaacgagattctggaatactctgaaccaacagatcaaagggttttacattttttaataactaaactcaatgaactgaagagtaacaaaacagcagcaaataaattttttaaagattgcatttatatcgcattgaaaagagagcgtgaaagaagtattgatgatgtggcattacatcgttttatttctactggtgaggttgaggcagtttattttctattaaacagcaatatatcatcccgtgaatcacaaataataatatcttatttatttgtttatatttgctttattcaaagctatattgattatgtgaatgaaaaaacaaatatcaataatgatatttgtattatcagaacaaacagccattaccagaaactggcaatagatgcacaaaaaataatcattagagaacttaacaataaacgaaccaactacagaatagccaagattcttaaagatgaattatcattaaaatacaaacatgttccaagtgaaaacacgttcaaaaactggatccaagcaatcgaaaaatatcgaaaagaaagaagctataaacaatga

SEQ ID NO: 33651 - DNA, 210 bp, Escherichia coli
atggcggttaagaatgatttcagtcatgagcagcgcatgacgcgtaaacaggcggcggaatacataggcgtatcagaaggaacgctgggcgtatgggcgtgcacagggaaggtaaagctaccgttctacaaggctggaagatgccgcgttttttacctgaaacatgagcttgacgagtttttgcagtcaacaaggcgctaccagtcataa

SEQ ID NO: 33652 - DNA, 501 bp, Escherichia coli
atgttaacagaaaacaaacggattaaaaagacgttgacaaacgcaaataaaaaacatcagaatacccccgaaccttataaaacgggttacgggattggaaccccgcaagcgatcaaggcgacacagacgccttcagcgtcttttttgttgtctttttacatgcacgccctatcaatggtgggctgtatggggccgacttcggtcgggctggttcccttgatcgccagtagttccaaccccttacagtccaccgccagcgagcttggaacctccggcggtggtaataatccactgatcgaggaggctgcctttatggctactaccccaacccttgcacacgctaaaaccgcctttgtctggcgctttatcgcctttggtgtatccggccctcaaattatcaacgtaaccgcctggacggaacgcgaagcgcgtaaccgttgcccgtctggttgcgtcgctgtatttgccgcccgtatccgtcagggagtgagccatgattaa

SEQ ID NO: 33653 - DNA, 186 bp, Escherichia coli
atgattaaaaggtttcgtgtattttcccgtgctgtaaatgcgcgtggttacactatcggcatcacgcagaacgtgagcgcgaccagcgttaataacgccattgataaagtaaaaaaagattcacacactgccggactgacagaggtcaggatcgctcacgtgttgcagctaagaaacactgcataa

SEQ ID NO: 33654 - DNA, 210 bp, Escherichia coli
atggcgtttaaactcattatcacactgacaaactttgacgccggaaaagtcaggaagctgatttctaataacagatacatgacccaagaagaggcagaaacagccgcaaaaaaaatggaatacacatacaggaacggcgcggggcgtattacccatacttgcgcggttgatattcaggaatgtaacgacagacagggggctaaaaaatga

SEQ ID NO: 33655 - DNA, 243 bp, Escherichia coli
atgaaaatcgaaaacagcaaaccagcatactggaaaacagaagaaaaaacggaaacggtaaacatgtatcagattaacgcttctgcctggtgtgacttccgtcgtgtgtttatctgttctggttttgacggcaggacaattgaagaagcaaaagaaaaagcacgtaactacgcggcaaatgaaggctattatgattttgagattatcagcgtgattaattttggcgcttttgatggaaaatag

SEQ ID NO: 33656 - DNA, 273 bp, Escherichia coli
atgcaagaaattaacagtaataaaagccatgaatgcaataaacaatttacatgcttactgacagaggaagcagaagacagattacaggaggttaagaatattattttacttttctgtaattgccttgattacgaagatacatccaccaggtttacaaatgaacaaatatttagattgtttgaaatgcttgcacgcaatattgattttattttttctgagtcgttttatccaagaggattattaaataaaagagacatcaacaagataaattaa

SEQ ID NO: 33657 - DNA, 2136 bp, Escherichia coli
atgaaagcacccaatttaaaattacagcaatccgacaaaatgacggaggtaattatctttgcgggtagtgacgcatggagtcacgcgaaagagtggaaggaatgggcaggaaaggagaacgcgggagataatacacctcccgtaattcttggccctcaacaacttcagaatcttaataatattgagattattgataagggccgtcactatgctcgtgtttatcgtgcaggagagatatcagaaaaacaccttttgcatattgcaaccttgatttccctggctgacgttaaagaactgcgtatttatcgcggtttcgatgaccgagagccggaaaatcttaccgctcgacttccggcgctaaaacaggatgccgagagcgggaaaagtatcgttatgcagggaaaagcgcagaacctacagacaagcagacaggaggagctaaaaccacgaattgaggtaagggaagagggggtttactgggtcacgccaaaacttgaaaggtcaggcgaaatcatcaggcctgaagaatggttatgtaaccccgtggagatgatcggagagggggtaattaacaaagagcattacagggttatgcgctggaaaagcgacgtaacaggagagacgttaacagcggcgatcccgtgcggtgatattggcgataacgaaggctggaaagcacttaagcggggaggtcttaaggtcacggctaataaatcgcacaggtcaatacttgctaactggatgcagcttgatgggtgtcatgatgaatggcacttaagcaacacatctggatggcactttggacgctacatcatgcccgacgggcaggcgatcggcgaatcagacaaaccaatactgttcaccggaaaaactgccgccgtgaatggctattcagtgaaggggacggcggaaagctggcgcgacagcgtggcgcggctggctaatggtaatccctcaatgatgatttctgtggctgcatcacttgccgcgccgattatcggcattatcggtgccgatagtttcggattgcatttgtttgagtcatcaacggcagggaagacaaccgcgcaaagcgtggcctcaagtatctggggtaatcctgaaaggttgcgtttgtcatggtacggaacggcgctgggtatggctaacgaagcagaagcgcatcacgatggcttattaccgttggatgaaatcggccaggcagcaagcgcccgtgacgtttacgaatccgcatacacaatctttaacggactgggaaaacttcagggggcaaaggatggcggtaacagggagctgaggcgctggagaacggtggcaatcagcaccggagaggtggacattgaaacatacctcaagaaagaaggggtaacagttaaggcggggcaactgatcaggctgcttaacgttcctatgcagaaggcgcaggagttgcacgagttttctaacggtaaggatcatgcagatgcactaaaagaaaactggtcagaaaaccacggcgcggcggggcgtgagtggatcaagtggctggcagagcatcagcaggaagtaaaggacgcagcaaaggaaagccgcaacaggtggcgaaagctggtccctgaagactatggcgaacagtcccacagggccgccgaacgattcgccattatggagacagcgcttgagttgtccacctggttaactggatggaacgccgcgcaatgcagggaagcaaccgagcataatttttctttgtgggtcgatggctttggcaagggaaacaaagaccatcagcaaatcctttaccaggcaacggaatttattaaccgctatggcgagtcaaatttcttgcctttgcccgccgatcctgagagggcgaagattcaacatctatacggatacaggacggcgttttacgagaaggagaaacgcgccactgattattatgtttttcgttcggtttttgaggaagaaatcgccaaaggatttaacaagaacacggcggcggcggttctttaccatctgggatggttgaaaaagagcaaatcagaagaaggatggacgtcgagaacgccgaggcttgagcacaagggcggtaaaagggagcgggtatatcacatccatattgatttcagtgctgaggatgaggatcaggagtag

SEQ ID NO: 33658 - DNA, 987 bp, Escherichia coli
atgagcatcagaaagatgcaggacgggcgctatctggttgatgtcagaccgcagggggcggacggcaaaaggtacagaaggagatttaacacactcggggaggcgcgatcatatgagcgacatatgttaaccaattaccatcaaaaggaatgggtagaaaaaccgcgcagcagacagaaattgagcgaaatatttctgacctggtggcaggtgcacggatcgcaccttgaaaacggaagcgagataatgaccagaattaaggccgttagcagggagctttcagatctgaatataaccatggtggatcatttaaaccggaaatcaatcacgctataccaaacagctatgagggagcgaggtttaaaggcatcaacaataaacagaagttgcgcgatgattagcggcgtttttacacggctggcagagtgcggttttttttctggtgaaaacccgttcagcgacaccaaaaagctaagagtagatgccagtgaaatggcatggctaacaagcgaggaagtagagaagttgatcggcatggttgacggtgataaccgaagggcggtaatcatgtgcctggctactggcgcacgatggggggaggtgcagcgcgttaaggctgaacatatttttgatggaaaagttttgttcatgaagacgaaaaacggaaggcggcgggccgttcctgtgtctgtggacgtcgaaagcatgattaaaacaaaaaaatcaggcaggttgttttgtgcaaactaccagactatcagacaggcgataaagtccgtaaagcctgatatcccacacggtcagggtgtgcatattttgcgtcatacgttcgcaacgcatttcatgatgaacggaggcaatattgttgtgctgcaacggatattagggcacgcaacaatacagcaaaccatgacctacgcacattttgcaccagactatctggaagaggctaccaggctgaacccgcttaaagggatcgccatttaa

SEQ ID NO: 33659 - DNA, 198 bp, Escherichia coli
atgagcaaaaaccagaaaatcacagcaaaaacacgctatcgcggaatacgtatacctggagaacttgatcgcctgattgaagccgaaagcagaaagcagaaaacgacctacagcaagatagtcatccgcctgcttcgctaccagttgataccaggcgggcagcaatacagggttattgatgaaatcctcgacgactga

SEQ ID NO: 33660 - DNA, 720 bp, Escherichia coli
atgtccgaacaacttaaacagctgtcagagcaataccaggcagcaagcattatccttcatgatgctatcaacacttacagaaaaaaaaccgagcttgtcgataatcttgcggagtctgaaaaggtgctgagggcgcgaattgatgcgcattccgctgaatgggccgaaaaactggacgcggaaaacgggcgcattactggcgatgtcgacaaggtggcgctacttaccgcagcgtcatcggcagagctgcccgtagtgatccagcgccagcaatctgccggactggaaaaactcgaggcacttgccgatcttgtgagcaagggaaagcggtttattgctgcgcgtcgcgagctttgcaagggggcggcagaggaagagattcagcgactgaccgaagaagcgatcagcgccgtgcgtcttgtttttgcgtttaaccaggtttgcggaggggttaagggtttccataaactacagggggtaattactgatgcgtgcgattgtggtcatgaatcacttgacgcagcacgccagcacctggaaaaacagattaaggacggaaataacacgcttgcacagttgccgcgcgaagcggttccgtcgattctctcaaaaacgcgcaagtatccttctgcggcgcagatgtatcgggcaaaacgagatcctgactacgccttgcaactcatttctggcgctgtggcgatgacggggggcgaatcatga

SEQ ID NO: 33661 - DNA, 1347 bp, Escherichia coli
atgagcggcattagcaagcgctttgtaggtggtgtaaaaaaactgatgggtgttgagtcgtcacgcgctgataagttccaggaaccggaagtaaaaaacacggatgcgcaccttcatgagcatggtgatcatgagcgcgacactacaatcacacacgctaacagtcgcagcaaaacggcgatgacgcttactaggttgtcgggggatgcaccggagcagaagaacagcgctggtgattgcggagatagttatgctttttgcggagcagctgccgcgcgtgactctgtgacggcagaaaaaaaccgccacgcgcaacgcgtgcttaatgcactggcggaaggtttcgcaatgaagccgattgattcgatcaggatgtccggcgatcagtctgaaacaatccgtgtgcaggcggaaggggtcgaacctgtgccagtgcgatcgctgaagctggtagaaagctggagcaccaactttcttgagagaatcaatattcttcggctggaagatagcaaaattgaagtctgtttgattaatactggcgggaccattgcatcaacgggcggcaatcgtcacaagcgtaacattgacgcggggaaaaacacgccgcgcgtttatgatctccttcaagtgaactttgatagccaacttagttacgacacgctatcaggagcttcaggggcttcagatgatgttcttgtatccaggtatctggaagcaatcgagcggcgcaagatgcttgatgtgattatgactggcttttcaggtacacatcacgcgcttatgtccaaccccgctacatatccgaaccgcgaggattgcgggcgcggctggttgcaggcaattcgtgaagaagcggcgcaccgtgtttatagtgggatgtctgtgtcatcttttgagcagactggtcagattatcagtgtgggggattatgccagcgttgacgcgcttgtaatggatgcgcttaacaccgccatagatgagcatttccgccgcgatttggttgccgtttgtagcagtaagctgcttaacgtgaaaaatcaccgactacttaacaacctttcggggtcgaatgcgcctaatagtgagattctcatgcatgacgagatcagggctaacccgagtcttgggggcgttcctgcggtgtgcgtgccgttcttccctgatgatgctgtgcttgttaccccgctggctaatctgtcctggtactggcagaaaggaagctggcgcaagcactttaaaaacgaaccggaatttaaccgcatggcgttctacgaatctgtaaaagcgtgctatgtggttgaagaatatgatcgaacctgtctgattgaagctataaaactcctgtaa

SEQ ID NO: 33662 - DNA, 429 bp, Escherichia coli
atgacaaaaccattaaacgcctttatgagcgcgtggggtaaaagtccggcagatgccaccaaaaagaaagggacaaccacccaccggaacgcgcacagggaaaccacgcaaatagcaaccgtgtcttatgtacttttaacggcctgccgccacctgaaagtaagccgcagacagttcgccaaaggttcggggctatctcacacgactgtaaacaggttgctacggggagaggtaaagattacgccagagatagcgctaaaacttgaatattacacgggggttgatgcggccttctggctggccctccagttacaggagatgcgcgaaaccacagattacggcacagccatacaatcatctctggactggagggagtcagtagagagattggtcactgtttcacagcacaaccagcaaggcagacaataa

SEQ ID NO: 33663 - DNA, 141 bp, Escherichia coli
atgccgcaaaaaacgatcatcataagtattttatgtctgaccatgctgctgactgtgtggatgatacaccgttcgccgtgtgagttcaggcttaagatcatgtggtcagagtttgcggcgttcttgcagtgtaaaccgtaa

SEQ ID NO: 33664 - DNA, 243 bp, Escherichia coli
atgttcgctttgattcaacgcggtcagatatacacggacagagctggataccccgtggtgattactcgcatcactgagcactcagtgttctttcgacggatggatgggcgaacacagtcagtaaaaataaacgatttcaatgaactgtttgaacggattgaccaccaggagtaccgcaaaattctggcagaaacagagcaggaagctcatctgaaaaaattacgagccatgaaaaggaagtaa

SEQ ID NO: 33665 - DNA, 843 bp, Escherichia coli
atgaagagcgttaagggactttcagatattcaggacttctttaactggatgtgggcggtggatcccctgctggcttcccgcctgaacaactggcacgactattaccgccgcgcctgtaaacaggctgcccgcagcatcaccacatccggggatttctccttcaccgttgactatgcagacaatcaccagttgccaggtgatattaattcgcaacattctaaccacatcagcacgcaacacaaaaaccgcttgccagcgctcgtcgtgtcgggttacatttccgctgcacctcataaaacgggtgccgggtttcgcagcctgctgacaaacgtagcgcacaaccgcgccagcggtttttttgtgcgtactgtatcgccacgtctttttcgcacacgaattatggtggggcgtacggggccgacttcggtcgggccgggttctgcgtttgccggtactgcgaacctcgtacgtctcgccacccacagtttcgcagctctggatggtgagttttcaaaacttacacacgtagaggccacaccatggcaaaccgcaagcaacagcgcgcccgcgctgagcgtcgtcacatccagactgaaatcaaccgcagacttttccgcgcaacacgcgtcgcacaaatcatgcatatcaacatgctgcatgagcgcacgcacgcactatcaaaccgttactgcgctgccgtcttcagctatctcgccgaagatctggcagaactgcaaagcctcatcaaccagcaccgataaaccacatcctgaagccatcccgcacccgtgcgcgggaggcttccgcacgtctgttaccggaggttctcatgaagagcgttaa

SEQ ID NO: 33666 - DNA, 222 bp, Escherichia coli
atggcaaaccgcaagcaacagcgcgcccgcgctgagcgtcttcacatccgcagcgaaatcaaccgcagacttttccgcgcaacacgcgtcgcgcaaatcatgcatatcaacatgctgcatgagcgcacgcacgcactatcaaaccgttactgcgctgctgtcttcagctatctcgccgaagatctggcagaactgcaaagcctcatcaaccagcaccgataa

SEQ ID NO: 33667 - DNA, 210 bp, Escherichia coli
atggtcgccatcctgaatgtgtgttgctgccccccccctgaacgtggaaagaaaagcccgcgcatcgctgcgtttattccgcgacggcgtgcggaatttttcacgcataaaaccccacgactacctggtaataagaatcggttttcgctggcgattgctgagcaaaaacaacggggcgtcatgggatttattaacgcacgaaacctataa

SEQ ID NO: 33668 - DNA, 195 bp, Escherichia coli
atgactgactccactcaaacaaaagacttatacagcgatttacgcttcatcatcatacaacagcaatcaggcaggatggatccaacacgtgcaagcaaggcctggaaagaagcccttaccgatcaggggatcgatgtaattagcgaagtcatggctgaagtgatttttaggctgacaagaagcgaatcactgtaa

SEQ ID NO: 33669 - DNA, 165 bp, Escherichia coli
atgcaggcctgccagaacatattcattgcccagtgcgatgccaatgccaacgccagaaaacaaagctgccagcacaaaaggatggcgcgtgtgctgcataatcagcgtcgaaccaaaaatcagcattccggcgctggcgacacccgccaggacgcgaatcaataa

SEQ ID NO: 33670 - DNA, 261 bp, Escherichia coli
atgggaagaaagaaaaagaacaacttaaaacgtattgaaaaaaacagtaacttcaattcaaaaagacaacgtcaccaacacaccaacaaaattctaggggaagagataatctttattcttgaaacagaatcccctgaattaagcgatgaagaattagaaataatccagtcaatgccaggcgtttactttcgcccaagaacaagaaaacaaactatcatttctgatggcacgcagaggcgttggcaactttttagggtttag

SEQ ID NO: 33671 - DNA, 309 bp, Escherichia coli
atgacagacaacattctggaagttatggacactctttcggatcggatgatcgccctacagacacgtatcaatcaagcctattcagatttatgcgattacacgctctctcaatgcgttagtagcttaatgaaggtgaatgtaagccttgacgattttatctctctggtgagcgatttaaagctatcagaggacgatgccaagatgtgcactcaaaccatcacagacaccgcaagcacgttaaaggctgcaagtgaagagattcagcaattagtaaatgatttagcaaaaagtgctattccctctaaatga

SEQ ID NO: 33672 - DNA, 177 bp, Escherichia coli
atgatccttgaacgtgacaagaaaaagttcgtcgcttcccttgttgcactttcagacaaggtgagcagtaagtccttttctggagcaccaaaagaacaagaacaagcgctgatcaactttttcaaggaaaccaatgagcgcttcgcagcaacctctagagagaacttacatatctga

SEQ ID NO: 33673 - DNA, 468 bp, Escherichia coli
atgagcgcttcgcagcaacctctagagagaacttacatatctgatgtaaaggttaacagccttttctcagtaatcagcaaccaattcggatatgatccgacagaatgggcaacagaaattgttgcccttatgactctctggaaagatcgtggctacattgaagtataccagaccaaagaggatcgtgctttcggcctgattaaagattccagcatcaatgatcgtggtgcgattagtccctattacattggtctttttcatgcaaggttaattgacggtgataatgacccgttaataattatcaaatttcatgaggttgaaggtgagaatccttatgctgatatgaaatttatgctcgatcattgtgatatctttggcgacaagtcccagaagttcgatcaagctcaaatgcgcttcatatggaagcaaattgatgaatttattcagaaagcagatggttctctctga

SEQ ID NO: 33674 - DNA, 1632 bp, Escherichia coli
atgctcaattcaagaacctatctttatcagcgtaacggtgtcttttacatccgccttaggatgaagaccactggtcgcctgaccgcttcgcttccttctcacaaccgttataaactagcgtcagtatcactacggaccaaggatagacgtaccgctatggctcactcccggcacatcaagtcagcacttaaagcaatacacgcagacaaccctagcgcgtcctatgaggaactacgggagcacctgaagaccattgttgagtgggaacttagtgtcagccgtgatgacctgaacgacccgaagtcctaccagctttacgttgaccagtacgacgatattaagtccaaccttcgggaagctgtagcgactgagcgtctgactgtagaccagcatcgctatatcaatgacgttatcggtgtacttaaagcgtgtcaggatagactcaagggtgatagctctggtttgttgtcttaccttgagcctgagaccagcagtctaagaccgtccgtctccctatctgtattggcggaacctgaagtccccgaacctctcgtgactctggaacgagtaactaaagctctgaccctcacgtctctcattgagcagtacgagcaggagaacgcccagaactggaagccagcgaccctaagcgagaaccgagcgtcacactctacgttaatcgagatattcgactatctggatattcaggatgtcggcaaggcgacccgtgcagatatgcttagggtccgtgaagtcctccagcagctaccgaagaaccgcaagcaacgctttaaggacataccgctgtctgacctgctgaaccgggagtctaagactgactgtctggatgtagtaaccatcaacaataaatatcttatcaagatggctgctgtctttaagtgggcggtacgcaatgacctgatagctaagaacctgacagaaggtcttgaactgaaagtcccgcagcgtaaagcctcagacgcccgtgatgcgttcagtcctgagcaggtagtgcaactactggtcgccgctaaagcgtactcgcagaagacctcaggtaagccataccattattacgtcaccgctctggctgcaatcactggagcaagacttaacgaggtggctcagcttcaggtcaaagacgtcaggaccactgaggccgggaccgtgtatatccatatcaacgaagacgatagcagcctgccgggtaagagcatcaagaacgcccatagtgaccgctgtgtcccgcttgtcgatggcgcttatggttttgtattgtctgactttatgtcgcttgtggaagaccgtagaaaggctaagggtgataatgctatggtattcgatggcctcaagctgatgaagaacggctacggtgagcaggtgagcaaatggtttaacagaacgttgctacctaaagtcctcgctgatcgtagcggcttagcgttccactcattcagacatacagtggcgacccagttaaaacaacatggggtcgagctagcgtatgctcaggcgattatgggtcatagctcagggtctataacttacgaccgttacgctaaagaggtcgaggtggatagattggttaatgtgatggcaggtgtttataaggagactggattaaatggctga

SEQ ID NO: 33675 - DNA, 660 bp, Escherichia coli
atggctgagtattatccggcggtgtttgaagcagaggcttttaactgtcctcattgtggtgtatatgcccgtcagttctggcgtaggatgtatggaagtgcgcgtgagttggcgcaaaggacaaccgagttccgaatgtcaacatgctctcattgcggtgatgatgcttattggtatgacggcaatatgattattccggcggctggcaatgttgaactaccaaatccagatatgccagataactgcaagtccgactatatggaagcccgaagcatcattaatctgtctcctaaaggggccgctgcactccttcgtctttgccttcagaagctaatggtccacttaggcgagctgggagaaaacattaataaagacatccggtcactcgtccagaaaggactacctgtacgcatccagcaggcggcagatatctgtcgtattgtcggcaatcaggcggtccatcccggagagattagtcttgatgatgacccgcagttggcacacggtctctttaagctgctgaacattattgtcgatgaccgaatcacgagaccgaaagaaattgaggctatgttccagagtatgcctgaaggtccacgtcaaggtattgagaatcaggacagacaggcgagggagcagcagcaggccgctaacgaatga

SEQ ID NO: 33676 - DNA, 729 bp, Escherichia coli
atgtcccaacaagaaatcagcgtcattaacctcgaccagcttgtctccatgacctcagttgaaattgctgagctgacaggcaaggagcaccgaaatgtcctgcgtgatattcgcaatatggctgaggagcttaacgcgctcaaaactgagcagtgctcaaaactgagcagtcatatcggggtgactgaagatgtctatctaaacgcgcaggggaaacagcagccgctgtatcgtctcgaccgtaagcatactttcattctggtcgctggctattccgttcacctccgcgccaagtgttacgaccatattcagacgttagagcgtcgagtccttcaactggaagaccagaagaagcgagcagccattcagtccgctaaccgccgaggcgtgacttggggcgactactgcaaaacctatggtctgcccgctcagaagctaatgaccgcacttctccagcatcgtggcctctttcgtaagaacccaatcagtaacgagtggtctgtaaatccgaagtattccgactgctttcgtatcattaagccgtcagaccagaagttctcagcaggtgggtataacttccggttcaacgctaaggggctggaggtcttcggtaagcctgagatggttgacaagatgcgaggcatccttattgcattcactggcaccgaccagcagaagcaagagcacctcctgaagctggcacaatccggtaaggtggagggaatctaa

SEQ ID NO: 33677 - DNA, 378 bp, Escherichia coli
atgaacgatcgatcaccaacggagataattcacgggattatcgaagagcaggaggaacgcgagttaacccttatgattgccgagcagatagagcgccagcgcaaacaggaggccacgcagttggttattaacaccaccgccggaaattatgcgcgtgttgttgctgaggtgatgcgccgtgatggtatcgaactgaacgggcaggactgtctggttatccgaacaagggtgcttgatatgctggcagcaagacaaaaacgggagcaacgccagagcgcggccccgtaccagtggaagacgccagagcgcggccccgtaccagtggaagacgccggagcggttgcggcggtagtgtcagcattatttgtgagtcactaa

SEQ ID NO: 33678 - DNA, 393 bp, Escherichia coli
gtgcgcgatattcaactggtgcttgaacgctggggagcatgggcggcaaataatcatgaggatgtgacctggtcgcccattgcctctggatttaaggggcttattccgccaaaggtaacgtcacgtccgcagtgctgcgacgatgatgcgatgattatatgcgggtgtatagctcgcctttaccggaacaaccgcgatctgcatgacttgctggtggattactacgtgctggggaaaacgtttatggcgctggcacggaagcatgggtgctctgatggacacatcggaaagcggctacagaaagctgaaggcgttgttgaaggcatgttgatgatgctggatgtgagccttgagatggatcggtatgttgagcgtgaatcagtgacggcataa

SEQ ID NO: 33679 - DNA, 570 bp, Escherichia coli; identical to SEQ ID NO: 4461

SEQ ID NO: 33680 - DNA, 411 bp, Escherichia coli
atgcgtttcattaagctgatgtatctctctgaccgcaaagtaatggagttgtatggttttcccattagtggtgatcattatttctctacatggatatctgatgtagcggatcataaggttgaaatgtggcgtacattttcttctgttgatgagctgggggagttatcgcccgcagaaatagagtcaatggacataatttttggtcaatatggaggttgggatgcgttcaggctttgtgatgaaactcacagaatttgcggtgagtggcgcgatccgcatggttcatcaattccaatcagccttaaggatatatttattgctcttggaaagtcgccagaagcagcaacagtaatggcgaatagcatttatgcgcaaaataatcttgatatattattaggtgatctgaggtag

SEQ ID NO: 33681 - DNA, 489 bp, Escherichia coli
gtgagcaagattgattatcaaaagcttcgtgaaatcgctgaaaaaacaaaaattgctggtgaagcacctgtaatgcctttcgatcagcgaattaatgcgcttaacgattttatgaagcacttttcgccagatatcgcgctggcattgttggatgagatcaacgcattagaggaaacgcgtatcaacgatgtttgccgtattgcggaactaacaaaacaactggagttggcaaaatcaaaactcaacgagcagcgtgagtattacgagggcgttatctcggatggaagtaagcgcatagcagagttagaaagtgattctcaggcacaaaagttagttgaagcaatcattgttgcgatagaaaacgaacaggaacgtctttttgatgaagattacctaatggattcgaaagaatgcattgacgtaattcgtgaagaagtaaagcgatggaatgattcccgcgccgctggcattcgcatcaaaggagagtga

SEQ ID NO: 33682 - DNA, 231 bp, Escherichia coli
atgattcccgcgccgctggcattcgcatcaaaggagagtgaggtgaacggacaaatatcaattattcgccctggcgcttgtgacgaagagataaggctgattatccgccttgcgatgggtagaacaataactgctctcattactccagaaaatctcgcattagcattaaccggaaagtcagacctgccagtagagctaaagctgcgaaatgttgagattaaggtgaaatag

SEQ ID NO: 33683 - DNA, 801 bp, Escherichia coli
atgaagaatggggtgaataaaaaatactcattagcattgttaatagcggctttactattaacaggttgtgattctgatgaagagcgagccatagatctagttgaaaaggatattcgctctacactgctagatcctgatgctggtcggttcacgaatatgcgagctattcagttaggtgaaaatagctattcatatatggtatgtggagaggtgaatggtaaaaacgtcttgaacgcctatacaggtgcgaccgcattcaatgcacacatctttgatgttcgtgaacgtaacccgattgtattcgttgcaatggataaaagtaccaactcggcaagagaacgattacgttttgaacgccaaaatctagcatgtaaagaaaatggtgtgaaactttatctggaaaacgaatctaaaatcaggaaggaaaaagagaaaatagatgatttaaaaaaaactccattaggtcaggctgtgtttgatgctgcaagtgattcgacatatgtgagtagagagttgggcgaatcgagaggtgttagtgaagtgtatgcaagagaaaatgataaatatgctcttgttagcgtcaccaattatgacactcctgacttttacaaatttaggaaaaaagacaacggtgaactagaacctgttaggggactgtcttataccggctatccattcgcggttacactgtgccattctgaacaaatagattatgacaaatgtataacagaagaagaaatcaagttgcttcgagacgaaaagaataagctcgatgattttgtcgtgccaccagaagaataa

SEQ ID NO: 33684 - DNA, 324 bp, Escherichia coli
atggcattcttggcattctatataggaaatacagtagccaaacctttaacgcccgttcagcaagattacattaaaaatattatagaaaaacaattactggccccggatgcagctaaatacaaattcccagatcacgttgaaggtagcaatacatattgtttcaaactaaatgcgactaactcatatggtgggtatacaggttacagatgggtacaaattccttacaatgacgtgttaaccaagaacagcaacactattgtagatctaaatatcctacctaaagaggtttttgaagaaagctgtaaagaattagggtataagtag

SEQ ID NO: 33685 - DNA, 738 bp, Escherichia coli
atgcttaaaaaaagaacaaatggtagtgtccgctattgccagtacacctcaccaattctcgtaaacatcccatcaatcccggataacgcaacaccggcattgatgaatgctgtgcgcggatttctcgatcatgaggttgctcacattttgtttaccgatattcgtgtgtccaacaaaatgagagaaaaaggacgcgttccttcccggtcactatggaatgcattagaagacgtgttcatcgagcgaaaaatggggcaggtctttaacggaacgagacgtaatctgatggcaactcagcgccttataatcgaaaaagtctttaaaccaaaggcttcagaggctattgcttattgtggcaaagatcagcgcgcgctttttctaaacttctttctctgtccggttgtaagagcctgggatggccaagcaccgttcgtagatttcatggatgaatactggcctgtcattgagaaaccaatttcattattaaaagaacatggtatcgatgtggccgtgcgtaacatgtcctgcaccgaggattgtgtaaaggtggctgcgaccatagctaagatcctcaaagacactgaaagtgaaagcaaaggtaaggagtcagctccgggaaaaacttccgatccttcagacgctgaccagacggatgcctctggagaaaacaatgaagacaacggagatcatgagacacccgaagcgttagatagccacaaatctatcaaatctgaataa

SEQ ID NO: 33686 - DNA, 1170 bp, Escherichia coli
atgaaaattaccggtgttgtcgaagagagcaatggcctgacgcacgaacgagccgaagaaatctggaatatgtttgagaaatccggcgcgtatgccttcaacaaatcacactctgttgcttactccttaatcagttatcaatctatgtggttgaaaactcattatcccgcagagtttttcgctgctgctctcactattcttggcgaagataaacaccaagggctggttaaagatgcgctgacctatggtattcgcgtattgccaccagacgttaacgtgtcatctaaccgaatcgagatccgcacgcttgaagatggcagccaggtgctgtatgcgccattctctgctgtgaaggggtgttctgagaatggctgccaagccatcatgagagcgcgagaaaaagttggcggcaaattcgagtcactggcgcaattcgaagaagctgtcgagaaacgtgcctgtaatagtcgagtgcgcgaatcgctgcaaaaagtaggggcgtttgcatccatcgagccaggtagtctgccagcaactgctccagagcgcctacgcgaccaggctgaattgatgggaaatcttgtcatagacgcagttaaagcctcacgtccgtttgagatgaaccccaaacgttcggctgaaattaacgtactcatgacgcggatggcggctgaaatgggcttaggtgatgaactaatccgccccagcattggtattaagccgaaaatcatgatcattctggacaatgcgaacggcaatgatgctcgaaccggttactttatggagaacggatacgacgactttaaggccaagctattgacggctggagatttacgcatgggcgatctctatgtcacaggcgtttgcaagaaggttaaagacaaagaaaaagactacaccaaagacgagatcggccagttcaccgactttatacgtgaagagatcaatctggtgcgtccgacctatgtgctgacgtgtggcagccgggcaacttcattgtttaacaacaaaaacaagccatccgatttggtcggcaggaaggagtatcttccagaccttgacgttactgtcttttacgggtttaaccccaacattctttacttcagacctgaagagggagaacgactagaagcgatattagccgacgtagcagaaactattaagacgtga

SEQ ID NO: 33687 - DNA, 174 bp, Escherichia coli
atgatggaaggtacagcaagcacaacggaaaccagcaaaatcgatagcctgggagagtcggtatctgcttattgcaagattgtccacgatactgacggcggatttgatctgagcaagttggatattttgtgtcaggaaatcctcaccgaagcggagagttcggaggctgtgtga

SEQ ID NO: 33688 - DNA, 399 bp, Escherichia coli
atgcatactgcgcttaacgcatctcgttctattcagacgataagagactgtaccaagatgatcgcatcggttccgttgcggcattggaatgactcgctccaaattcgtgaaatgaacaaaccgggtatgcttaaggatcagcgtttcatcgttaaccttaaaagtgacgttgaagaaggcaagtttaccatcaaattgtttgcagaaatgatggtgctcaacaatcggttacgttttcttgttaagccagaaaaacagtttcccgatgttgtgcgttgtgaacaggatgctttctatgagattgaaagcaaaatagctaaatttatcaaagataaataccgcgtagatgttaaaatagcaaaactggattcatctacggatatgcggcttgctaactaa

SEQ ID NO: 33689 - DNA, 690 bp, Escherichia coli
atggttaactctgatttttctgttttacggctcacagagtggtccttgatcgggtctaattatgattactgtttgacagtgtcatttgtaggcgaccatgatgcagattggcttcaagaacatgcaatggatcttgacgagcaggggtattcagaagaagagatagttcatagtgttcgtgaattagttggtgatgagcaagaagatgatgacggcattcagatcgccaggttcgtctacaaacgattccagtttcgctcacaaaaaggctctcaccttggggtccagattaaaggggcatttgtaaccccttcaaaggaacaaaagggacttgctagaagagtttacaattttcttctcaattggcatgaccatgtagtatgtgatgaccatcagacggtttacggtgccagaatttgggctgtaggtatgcttttggtcggtcgtgtccaaatctatgacaatttaaataaagaatttatagatgtccttgttgaaggtggtattgggcagaatggcgtcaaaccgtgggatgcgctgctattgaacagcgaggctcagttacgtcactggaaccctatggctgtcagcatagacccatctagtcagattctcaccatcatctccaaagaagaccgccacattgaagtgggcgttacaacatttgatgccaggtctaccaaccactaa

SEQ ID NO: 33690 - DNA, 522 bp, Escherichia coli
atgaccgaactttgccatacaggacgcgggctgtccgaagagtttgatgaagatttccagaacagactgacggcatatttttgtcgtgatcacgagtttcttactcgtgcgggagatctggttgtgcctagccaatttgccaatgcggccaatgccatattggttaatatggtttcgggctattaccgtatgtacaagagcgcgccctcttcatctgcaattctggatatgcttaagcgtgcgaaacgcgataagactatccgtgaggaactattcgccgatgttgttgctgcgtttaagcgcattcttgcagaaaaattgtccgatacctcgtacatggttgaccaggtatcaaccttcgcaaaaagtgtagcgtttgatgatgctctgattaaggctgctgaactgaaagagaaaggcgactttcagggagcgatggcaatcatggctaaggtcagcagattggatcgaacgaagcgaccggaatctatgactactacacctccgcaagtgagcgattga

SEQ ID NO: 33691 - DNA, 876 bp, Escherichia coli
atgtttttagttgtcggggagacagcaagaagtcaaaactatgctctgaatggatattctcgtggtaccaatgattttacaaagaaatataatgaacttatatcctttcataatgtgcagtcgtgtggcacatccatagccatatctgttccatgcatgttttcagatatgaagcgaaaagagttcaattcccgtaaagcggtaaattcggaaaatgtactggatattctgtacagaacgggggtaaatttactctggattgaaaatgacgggggatgtaaaggtgtatgtaagcgaatccctacaattaatattgagccatcaaattcagataatacattatgcaagaaaaactcatgttatgatgaggttatgctaaaaaatattgatgagtatataataaataactcagaggataaacttatcgtatttcatttgataggtagtcacggtcctacctactatctccgttatcctgagtcacataaatattttaaaccaacatgtgatcgtagtgatatcgaaaattgtacgcatgagcaattgattaatacttatgataatacaattcgctatactgactatataatatcaaaattaattgacaagcttatcgaatataaagatgagtatgatgctgttttattatatgtctctgaccatggagaatctctgggagaaaatggattatacttacatggaacaccatataatgttgcaccagctgagcaaacgcatgtgcctcttattacctggatgtctccggggttcgtttcttctaaaaaaattgatttgaattgtttgtcagaacatgctctaaacagaacagtaagtcatgataatatattttcatcgttactggggtatggaatgtaa

SEQ ID NO: 33692 - DNA, 309 bp, Escherichia coli
atggctaatacgcccactggtgttaccagaattattaaagcagcgggttattcatggaaaggcttatgtgcggcatggcgctatgaagctgcctttcgtcaggagtgcattctggttctgtcagctctgataatatccttttggctggatgttaactctgttactcgagtattactcattggttcggcaatgatggtaattattgttgaaataattaacagtcaattgaagcagttgttgacagaattggttcagaacatcacgaattatcaggcagagcaaaagatatcggttcagccgcagtgttga

SEQ ID NO: 33693 - DNA, 1890 bp, Escherichia coli
atggctaatgagagaataacagaagggattgtgcgagatgtacttcgtgattatggttactatttgcccggaaatgggatatctgtggaggagcaaaaatcagaaattcagtcggtcaaatcgcttttatcaaaggccggaaaagctgctaaaggaggcgcaggctatcctgaatttattatttccacgcaaactgatacgcagtttataattatatttgaatgtaagtcagatgtcagaaagcatgtaagcagtgacagaaatcgcccggttgaatttgctgttgacggagtattgcattatgcaaaattcttgtcagaaaaatatactgttattgcagttgccgtaagtggcatcactaaggaacaactgaaaatatccacatttcttttcgccgcaggtgcggatgaaggtaaaacgcttgttactgaatctggtatgccggtgacagacttacttccttttgatgattattaccggttggcatcatttgatcccgaagttgcacgtaaacgtcataatgatttgctggatttctcaagagaactccatgagcttatctgggcaaaggcgaaaatatctgaagaagataaacctctgttagttagcggtactttaattgcgttaatgaacacgacatttatgaaaacgtttaacgcgttacctgctaatgagttacaggatgcatggttagatgccattcgtaaggagttaaataaggcggatatcccacaggccaagaaagacacgatgcttcagccatatacttacattgctgtacatcctaatcttgggaaacctgatgccaaaattgccagggaatatccagatggtgtatttaagaaaattatcacggatatttttgagaaagtatggccatatataaatatttatcatgattttgatgttgtcggccagttttacggggagtttctgaagtatactgccggagataaaaaggcattaggtattgttctgactccccggcatattgctgagttgttttctttactggcaaatgtcacaccggaatccagggttcttgatatttgtgccggaaccggtggttttttgatttcagcgatgcaacagatgctaaaaaaagctgttacagaagagcagcgtcaggatatcagaaaaaatcgtctgataggtatcgaaaatagccctaaaatgtttgctcttgcagcctcaaatatgatcctccgcggagatggtaaagcaaacctgcatcaggcaagttgctttgatgaagtaataaactgtgcagtaaagaaaatgaaacctaatgtaggaatgttgaatccgccgtatgcgcaggcaaaaagtgatgcggagttacacgaattatatttcgtgaagcagatgcttaattgcctggagccggggtcatacggaattgcaattgtgcctatgtcatgtgcaatttctccgaatccggtaagagaggaattgctcaggcatcacactctggatgctgtgatgtctatgccagcagaactcttttatcccgtcggtgttgtaacctgcattatggtatggattgcggggattcctcatgatgtctctgatcgtaaaacctggtttggctactggcgtgatgatggttttgtcaaaacgaaacataaaggcagaaccgatttatataaccggtggccatcgatacgggatcggtgggttgaaatgtatcgcaacagggaaatcattcccggggaaagtgctgcacataagataacggaaaatgatgagtggtgtgctgaagcatggattgaaacagattattcttctcttactcaggaagtatttgagagagatgtgaaacgatactttttatataagttgatgctggatatacataatgatccggaggctgcagatgttgctgggtaa

SEQ ID NO: 33694 - DNA, 384 bp, Escherichia coli
atgggactcgatatttactttctggctcgtgataaccatcagaatggtgccgttgtggaaacacaggaacatcaggaggtgggggctttccgtaaggtgaaaccgcttctgacatggtttcgtgaacataccggtgcttcagatgagcagcatgctttccctgtaacccgccgctcactggctgcattattgcgcgacctcagtatgctgacaccggggaactgccacaggctgtttccttatgtcacaggctcgcgtttacggggggaagactatgccggtgattactggtatgacgtggatgacgtaaaagcgtgggtcagcgatacgctgaagacgtttgattttgaacgtcgttcactggtgatgctggcgttgtggtaa

SEQ ID NO: 33695 - DNA, 336 bp, Escherichia coli
atggcggatatagccgagcattttctgctgtaccgggttaatgacgctttcatcaccggcggttgtggtgtcctgtctgaggcgggctatcacatccagggtggtgaactcaaagtctcccactcgcccctgatggcgtgcgcgcaggcgggtcagatattcctggacggcacgcagatgtttttttcccttcacgaccctgacccgcaactgaccggtgttatcggtgtcgatggccacataatccagaatgtcatccggtggcaggtctgcaggatccagcataaagcctccttacgggcagcggtgctcggaaaatatgttttctgtcattaa

SEQ ID NO: 33696 - DNA, 537 bp, Escherichia coli
atgatttcgcagatatacctggtccgggttgcagacgctttccaccaggcgccgttcatcatccgtgcgctcggtcgccacctcatgccaggggcgacggcagtgcggacatatcagctgaaccagacgctggctcagcaggccaatgaacagttgcgggtcggcaatcatcctggcctgcaccccctccatctcaagacgttcgaggatgttaatcgggtcgttcgcatggatggtggtcagcatcagatggccggtcatggcggcttttattgccgtaatggcggaatcgtggtcgcggatttcaccgttcaggatcccgtcggggtcaagacgcagtgccgatttgatggagtccacccagccctgcgcggtatccatgacggcggtctgaatggcaccgggaatacgcccttccggcggggattcgatggtgaacagcctgcgacggggaagaagaataccgccggtgttgttgaagccgtactgttcaaggtacgccgcagaggcggttctcagcgtggtggattttcctga

SEQ ID NO: 33697 - DNA, 135 bp, Escherichia coli
atgtcactcagacaaatcgtaacccttgctgatgcggttgtcaaaggacaacccacacgcattccgccaatgaaaggcgacgaatggcacgagttctgttggtggttggaccacctcagaggctacgccatgtga

SEQ ID NO: 33698 - DNA, 951 bp, Escherichia coli
atgccttcaagtcttatacaggagttacgtattgcagcattgttacacgatgttgggcatggcccacttgcccaccaattcgatagttttgcaatatccctaaaagatttcaaagaaaaatgcaaaactgaaggaaataaacaatacgataagattatatctttaagtgataatgacaagttaacccacgaacaagtatcatgtatttttattaaagaaattattgaagaattaaaaaatgaagcccaagataaatcaaatgacgacgatgtctataaagaaaacatagcggctattaatccagaaagcattataaaaattgttgataaaagatatgattttaaaaataacattgagggagtaaatgtatatcctttattaggttcaatcatatcatcttcacctatagatgcggacagaatggactacctacttagagatagctacttctccggcgttaaatatgggatttatgattatggacgattattaatgtcatttattcctgtgaaagttaaaaatagtgtttacctggcatataaagaaagtggtatggattcaatactagaatttgtcaatgcaagaagtgggctttatagtcaagtttattttcataagaccaatcgtgcactatctgcgatgcttaacaaagcgtgttctagaaaaaaaactgatgatgttgtctctttaaaatctaaaaacactctcattgagtccatcaaacacttttatcgtgaaaacccagacaaaacgtttttagaaaacactcttaaaaacacattagataaaaattctcaagctataattcaagatattgttgatagaaatgtttggaaaaaatatatgaaaaaaaacacacgttttctaatgttaacatttccgacaacagatacaaagaatataaacaaaatatatctaagaaaatcaacaaaatcattgaggataaattaa

SEQ ID NO: 33699 - DNA, 636 bp, Escherichia coli
atggcatttaaacactatgacgtggtcagggcatcatcgccgtcagacctcgcaggaaaactgacgcaaaaactgaaggaaggctggcaaccctatggtagtccgattatctcaaacgcgggttatggtgctgaatttatccaggctatagtcgctgaaggggatatgacctctccggtagtttcaccggggggagatggtacccggactgttgttgttgaaccagaatattactttgtcattgcgctggccggacagtcaaacggcatggcgtatggtgaaggcctgccgctgccggagacatatgaccgtccggacccgcgtattaaacagctggcgcgtcgcagtacggtgacaccgggtggtgcggcctgtgcatataacgacatcattccggcggaccactgcctgcatgatgtgcaggatttgagccgtttttctcatccgaaagccagcgcagagcagtatgggtgtgtcggacagggattgcatattgccaaaaagctgttgccctttatgccggaaaatgcgggtattttgttagtgccgtgctgtcgtggtggctctgcgtttacagccggtgctgacggaacgttcagtgaaagttcaggagcgtcggataagtctgaacgatag

SEQ ID NO: 33700 - DNA, 201 bp, Escherichia coli
atgacacagtttcaacttgcattaatcgctagagaagttgatggagaagtcatccatcttcgcaccaaagacggatacatcaatgccaccgcgatgtgcaagtctgcggggaagctacttgctgactatacacgactaaaaacaacacaagatttttttgatgaattaactccgatatggggattcccatatcggagttaa

SEQ ID NO: 33701 - DNA, 585 bp, Escherichia coli
atggggattcccatatcggagttaattcaatcatttaaaggcggaagagcagagaatcaagggacttgggttcatccagacatcgcaattaatttagctcagtggctatctccaaaatttgcagtgcaagtatcgagatgggtgcgtgagtggatgtcaggtgaaagagcgcctgccgaactccctatccaccttaagcggtatatgacaaaccgaggcagagttcctcatacgcacttttctatgcttaatgaactgacgtttaacttggttgcgccacttgaacaggccggatatacgctgccagaaaaaatggtccctgatatttcagagggtagggttttctcgcaatggctccgtgacaaccggggggttgagccgaagacattcccaacatataaccatgagtacccagatggccggacattcccggtacgtctatacccaaacgaatatcttgcagatttcaaacaacacttcaacgaagtgtggctgcctcagtacgctcctaaatattttgctgaacgagaccaaagggcattgacgttgattgagaaaatcatgctacctgaccttgattcctaa

SEQ ID NO: 33702 - DNA, 216 bp, Escherichia coli; identical to SEQ ID NO: 24719

SEQ ID NO: 33703 - DNA, 276 bp, Escherichia coli
atgggcaaaatggttatccaaatccttgctgccgtagctgaagcggaacgtgagcgtattctggagcggacaaacgacggcagaatagcggcacttgccgcaggcgtaaaatttggcaggaagaagcatccacgaacgcctacagcgttggagcttatatcacagggagaatctctgggcagtgtgacagaaaaaacaggtatctctcgatcgacgtacttcaggttaaaaagaacaataaagaatgatgctaaaattgcaaccttttctaaataa

SEQ ID NO: 33704 - DNA, 756 bp, Escherichia coli
atgcgtgccattttcaattttgcatgttcttcaacacttcttaatttaagtgagaatccgtttgatggtatgaatgtcagacaggaaaagaaacgtaagaaaacactgacgaagaaacaggtaaaacgaattctgctgattcttgaacagtttcatgaagaggagaagcgttctggtggtgtgcactggcgtagttgtgcgattcgtccggcatggtactggatgattgtggtaaatacgctgcgttttaccgggatgaggctaaatcagttacttcacctgcgtctgcgggatgttaatccggatgaaagatggattgatctgtgttcggagggaagtaagacacaccatgagtggcgtatccctatggtcagtcatcttgtcccgggaatgaggcacttgattgatgaagcgatgaaacggggggcaagacctgaggattatcttttccattatcatcgttatgtgtcattgatgtcagaagcaccgttcgttaccggacttccggaactgcaaccggtaaaaggatttttcagacgtctgacgaaagagtgcggtttccctgtatcacctcatcgctttcggcatacgctggccagtacgctgatgagtgcaccggaacgtaatctttatatggtgaaaaccatgctcgggcacaggaatgtttccaccactctggagtatgtggaaatcgatttgaaggggacggcaagagtgcttgaaaaagaactggcagaacttactgatgtattttag

SEQ ID NO: 33705 - DNA, 762 bp, Escherichia coli
atgagcactgatttagtttctattattacgccatcatataattcagaagagtttatcgttcagacttacgattcgatacgtaatcaaacttacagtaattgggaatggattgttactgatgattgttcgtttgatagaacttgggaaatccttgaagagataagcgcagcggatccaaaagtaagaatttataggaataaagagaatagtggtgctgcagtatcgaggaataacagcattggaaaatctaaggggaaatatttagctttcctggatagtgatgacctatgggagaaaaataaactgcaagaacaactgggatttatgaaaaaaaatggttacagtttcagttttacagcgtatatgcttatttcagaaaatggcaataaaattaataaaaaaatagatgcaagaaatgaatcagtagcaattaattataaagaacttcttgctaaaaaggttacattaggttgctctacagtcatgttgaaaaaagatgcttttgaagatataacaatgccattgatacgtacagggcaagattacgcactttggttaaagttgctgaaaaataatgatactaaggcggttttatatccgcaagcattaacaatgtatcgtatcgtttcaggttctatttcaaggaataaagtaaaaaaagctctgaggcaatggtctatttatcgtaatctggaaaatattaatttaatagaatcactgtggtattttttaaattatgcatggcgagccgtttttcgatga

SEQ ID NO: 33706 - DNA, 1200 bp, Escherichia coli
gtgaagacaagtacatattctgcaattgcgaagatcatttcaagtaatatatctgcatcaatcttaacttttgtatctttactgatattaagtcgagtatataatgtaaatgattatggtctatttaccaaatattattatttgcttggaataatgtatgttttattggacttggggctaccaaatgcattagtgatttcactttcagaaaaagggaaatcttttagaataattgatgtatttagaagatatcataagtattttattgtagcgataataatagttttttttgttgcattttactcattttcaccggtgattgcattatcatttatagtatgtagcattgtcggtattactttaaaattaaactctgtaaaactgcaaattgttaatgattggggaggaagttcaagggttattttttatcttccttttctacgaagtctagggatatttggggtctgttttctaatagttttcatcaatgagaagcttgacgcaaatactatatacttagtaatgatagttgtgagtatagttgctatgttgctaagttttgagaaaactaaaaatataagttatgcagagttggatggtgcacaagatcttacgaaaatggcatggaaattgtatattgcgaatatattcgcaatagtatgtatgcgtgctgatgtcatttttatatcgcatttttttaatgatgcggcggcaggagaatatgcaaggatatcaatgatattttttgcagcacctttgcttgcaggagctattaatacggtattcattagaggactgtctgcacaagaacttgatattgatgcagtaaaaaatatcacgcataaattatttttatttacagtgataggcctattattacttttagcagtagcttaccttagtaaagctattattatggaatattgtagtgctaacgatatttacatatttgttattttaactatagcatatgcgggaactctggtttttggtgtttgggaggcatttataaatcatagagatcaatctttcttcctgattctaaaagtatcgcaacttatatttttcattgttacatttttaatatgctataaaacggtcggttttattattggtgcgattgcatttcttgcatctagattaggtggctggatattgcaatggatttattgtaaccgacgaaaatatctttttacttaa

SEQ ID NO: 33707 - DNA, 930 bp, Escherichia coli
  misc_feature (7)..(16): n is a, c, g, or t
atgtatnnnnnnnnnnaagaagaacaatcaaataaaatttcttatggggttctgattgtcttagttgcattgttatccggttactatgtgcaatatttatcggatacaatttacggtattattatttcttatttaatgcttttagctgtagtcatttcaagctttaaaggtttagattctgctgtaaaaatatatttgttattttcgttaattacacctcaattttcgagaacatttgttgaacaagtagtgaatagcaataatcaagaggttggatctttttatagctttcactctgtacaattatgggggttaggtttatcagtagttgcaattatatatataggtttaattgctctatgtaagttgttttatactcacgctaagctacaaagaacgaatgtctcatcttatttcataagtttatatgtggtttgtggatttctattattggctacgataatttccactgctatcggcaaagtgcccgatatgcgaaatattatatcagatgcccgtttatttattgtatggactattggtgctttagttgcgaatttaatttataaagataagaatataatagtaaaaatttatgatattctctttttttcaatatgtgtggttggggtaagaactttatattttctgctaaatgattacgtgacgggtactccaaatttagaatacgcaactcaagcttatgtggcgtacccattaatgtttgtttttgctatggcaacgcgtaataaattgaaaagagcagtacttactggtctttcattgttggcagctatatcaatgaaacgtgaagatatagcatttgtatttatttgcataatgctgttgctttttcttattcttctatttagaaataatattcttcgtacaaatgctattattgcgctagtaatattaatacttatttga

SEQ ID NO: 33708 - DNA, 585 bp, Escherichia coli
gtgaataaaaaatttgttgtacgcatgatggtaggcaccctgctaatgggtacttcagtggtgtctatggcagcagccaataatgttggtagctctcaggcaactatttcaggttctgttgtgtcaccgacttgtacagttacctcttggcctacagacattagatttgatccagttagtgtggctgactatgctactctgtctcacaactcagtaattcagaacatgcaacaagggcgatttgaactggaaaactgcccagctaacacagcgatgaaatataccgtaactgcccctcaccgtgcgcaaggtaatgccttccaggcgcttgttcaggatgcttccggaaaagaggttagtggtcttgctctaagttttaccgcacaatccggtggtaaatctggttactggtatcttgacggatcagaacgaggtttgggtactacaaatgcacaaggtagcttaagtatccctgcgtacgctgttcttctgaagcgcggtaataatccagctccaacagttgatggggcagtatattctggcaactttagcacggttattcaatactccgttagctatgactaa

SEQ ID NO: 33709 - DNA, 678 bp, Escherichia coli
atgtataaaacattaatactttttatttttatttcatttggagctatagctagctctgggggaattactttagatgtttcgagagttgtttttgactctcaaaacaacagtcagtcattcactatgaaaaacacatcgtcacagatggtcttgcttattcgtgctaccgcgaataactattattcaaacgataataaagatgttccatttttcataacccccccactgaatagaatcgaacctaatagcgatatccagtttagaataaataaattagacagcattgaaagattgccaaaagatagagagagtttatttgcgataaatgtacttgctattccaccaaaaaaagaaaaaactgaagtacaaatggccttaaacactaagatcaagctaatatacaggcctagagaaataaatgaccctttaactattgagcatttgcaagataaactaattttgtcgaaaaataaaagcggtataagaatagaaaaccccactccatactttgtcacaatagcaaattttaagtttaataatttaaataccaataggcagccagaaatgattaagccattttctgatataatattgagagagaataatattaactctatgtctttttcaatcattaatgattttggtggtaatagcgccagcagaaacatttcattttaa

SEQ ID NO: 33710 - DNA, 2481 bp, Escherichia coli
atgaaaacaaaacaaatagccttatttgtcttttttgtcatacattatagcaatgcagaagagttagcaaccaactacacatttgatcctgcatttattaatattggtaatgataaaaaggttaatgctcctgatttaagttatttctctcatgcggacggagttcttcctggagaatatcttgttgatgttaaagtcaacaatgaatcattcggtacggaaacgatccgattcgtatcatcaggaaaaggaaaggttgttcctctacttacagagacgagtctaaaaaagtggggggttgatgtaacgaatttaaatataactaatggcagtattctttctaatgaactttcaaaacagatcaaagggtttgaagtaaaattcaataagagcaagcagattctaagtgtaaacattccacaaagttggatctatcgtcctgtgtggtcagaaataccacctcaagcatgggatgatggtgaaacctcactgcttgtaaattaccgttattctgatgtacgacaaaggctaaactcaacatccaagaacaatcaatcactggcaattaacagtggactgaatatcggggggtggagagtgagacataatgggtactggaattcaagtaaatatggctggacaaatttgaatacctacttgcgtcatgactatagcttcggacaaggtggacaattgacatttggacaatcatcaactgatgatggagtgtttgaaagctttccgtttgaagggatatcaatagggtccgatgatggcatgctcgtcccttggatgagcacttacagccctacaattagaggaatcgcattcactccatcccaaataatcgtaaagcaaaataatatgataatctggcaaggtgacgttcctgcaggtccattcgagctgcaagatgtcttccctttgtatggaggggatatggatatcgaaatacgagaaagtaatggcgagattagacactttacacagtcatcatcaacattaccgattctccaacgtaaaggtcgcatgcgttatcacgcagcaattggtaagtatagagatatcaatagctcattcaaagacaagcccttattcttacaatattcaacggcatggggtataggatgggacactacaatctttggtggaataattgttgccgaaaactatagttcggcttcatttggagttggcaagtacatatcttcaattggtgctttttcattagatctgagctactccgattctgatacggtgtctaaagataatggaaaaagtgaaaatggttctgtaactcgactaatgtttgcgaaaggatttgagtctacaggtacttatttgaatttgacagagcaactttataattcacagaacttctattcttttaatgattatcaacagatgaagattggtaataattccaaatttaataaaataaatagaattaccactcagttgcaacaaagtattggcaatactaaccaattgaccttatcctcagactggactacttatagaaatgctaaagatagtcgccaatttcggctatcgtattcgtttcctgtaaaaaaggtatttacatccttgtcattaaactataataaacaaccacaatatgaagatatagataaatctgtttatctttcagtttcagtgccttttagttctttttcgaactatagtaatgcatcattgacaacaaatgtatacaattcaggaaatagcacaaatacacaagcaggtgtgagtggttattttatagaccagcaattatattatagtttcatggaaggttatcatagcggtagtcgtgactccagttcaggtaatgcaacgctgagatataaatccgccaagggagagatacaatcaacagtgtcacatcaacataactcaaaacaattacaatttggcattagcggtggagtagttgtacacaaaaaagggattgtattgtctcagccgttatctcttgacggagctaatgcattgatcgacactaatggcgtagaagacatcaaagtaaaaagaggtattggtattagcacagatttcaatggatatgctgtggttccttacctttcaccctatagaaaaaatggaatatctctagacgtaaacaaggttaatgaagaaactgaaataattaaatctgatttaacggtagtaccttcccgtggggcgttagttcacgccaaatttaatgtagtatctggacataaggcacttattactttgattagaaaaaatggtaatttcgttccttttggcgctattgcctcgttaaaaggagaagccggagatatcagtgtaacaagcattgtttcgaacgatgggcaggtatggatgagtggtatgcctgacagaggtgaaatgcatgtccaatggggagacaataaagaaagccaatgctccgcacgatttgaattaaaagcaaaccaaagcaagataagtcgactctccctagtttgcgaatag

SEQ ID NO: 33711 - DNA, 768 bp, Escherichia coli
atgttgccatttaaaaacatgatatttaataaatacaccttagtttatgtcaaacatcaatcaataaaaatttatttgaatgagcatcaagagatagaacttttaaaaaatacatttttcattattagcaaaaagagtaaaattgttggtttgagcggacgtgtttctgctgacgaaatttatactattcaagatgaggatattggaattattgtgaaatttctctcctgcgttaatatacacccgaccaacaacaaaccaccattaattatcggaccaagtctgaacacggaagaagagttagcctttagacaacttaaaaatgaaaaatcaggttttagacgcgttagcatactgttatttttattcagccgcatagacacctatgaacttacaaacttctttaagcagtcaatgccagtaattttgatttcagaaaaagtatcatccatcttagaaaaaaacttaactcaacaatggcgtataggcgaaatggcttccgctctttatacttcagaatcctcattgaggagaagactaaaagaggaaaattatacttttacacagttaactttagatactaaaatgaaaaacgcgttacaactattagaacacaacactgggaaagttggttttgtcgccaagtgtttaggatatacaagtgaagcatactttatctcagtgtttaagaggtacttcaatatgacacctaaacaattttacctgaaaaataaacagccacacaaaactttatatatctcaaaataa

SEQ ID NO: 33712 - DNA, 426 bp, Escherichia coli
atgaaaatcaaacatgaacatatccgcatggcgatgaatgcctgggcgcatccggacggcgaaaaagtaccggctgcgaaaattaccaaagcgtatttcgagctgggaatgacgttcccggaactgtacgacgacagccatccggaagccctggcccgtaatacccagaaaattttccgttggctggataaagacacccctgatgctgttgaaaaaattcaggctctgttaccggcgatcgaaaaggcaatgccgcctctgctggtggcccgtatgcgcagtcacagctctgaatattaccgtgagatcgtcgaacggagggatcggctggtgaaagatgtggatgattttgtcgcagcggcgatcgcctggggcaccctgactaacagtggtggtcagcctggtaatgctgttgtcgtgcattga

SEQ ID NO: 33713 - DNA, 243 bp, Escherichia coli
atgaaagtcatttctgttattaaatctaaaattgctgtggcttcaaccgcgctttttgtttctgcaagttgttttgctgctgatggcgcaacgggtagcactgactatgcaggtcaggcaatggattcactgctgactcaggcaaacgatcttattgcaaaagtatggcctgttgttgtcgctgtcgttggtgcgggtcttgccattcgtttgtttaaaaagttctcttcgaaagcagtttaa

SEQ ID NO: 33714 - DNA, 255 bp, Escherichia coli
atgaaaaatcaaacagaaaaagcgatgtggaattgcaaaacctcggatacaccatggaccttcagttccctgctgaaaaaggcagtctgcgcgattttgccagatccaacaccggttcaagataaagaagcatcaaaaaacgtttttgagctgtttagttctgaaaaagaaagactaggagaattgccagcttttttagactctcgtacctattgggagtatcagcaatgggaagagcaaaataaaaataattaa

SEQ ID NO: 33715 - DNA, 1599 bp, Escherichia coli
atgtttaagttacggaagttttttacctccggttcagcagtggagatacccgatgacgggcggtcagtgccgggaacaccggaaggcttttatgcgccgctgacgacagattcactgctgatgccgaagaacagggcgcagtgtctgaagcagatacgggataacaatatgatgccaaagccattgtgtgaggcgatgtgttgtgctcccgtatacagcctgcttctttccacgcagaatgtcccggcggcccgggaggggcgctggtcacatgcagggggattcggggacctgacgttgttgcataccagttacgctgtccgtctggcccgtgcacatatgtttccgccgggcgcctctgcggaagagcaggccgcacagggggcggcctggcatgcagtgattttctggtcagccctgttttatcacctgcctctgcttgcgcatctggaaggcaaattgttcagcggccggggatggcagccgggaatatccgttcctgatgaggcgtatcgtttccggttcaggcagctcccgccacagggtacggaagctcagcaactggcggcagtgattgccggtggtctgttacctgagggggctgcagcctggcttgcgacggtgccgggagcgcttcagaatctggccggtgcgttctggcatcagcatccggaaatggcactcatccgtgatgttctgcaggaggcggcccgccaggctgaaagtccgttgttaaacggtggaattgttgccacagccagtcatattgcttcagcagaggtctttacgggggaggtggttgtatccggtaaaacggagagcaccgtggcatcggctgtgtccggggaagaggctgcggctgaagggaataccgtgtccggcaatgctgcagagtctgttcaggaacaaccagagatgcggcaacaacaggctgagaaaccgacgacaccagacagcagtgaaggttcagagggcgatgcaggatgtgaaacggagagtataccgacagatgaagatacagctatgctggtaagcatgtttgcggaggaggcgagggcgccggaaaagggggaggatgactcgccatctggcgaggtggttgcgcctgtttcatcgacaggagagatatcagcagcgggccatggggaaatctgtcagtcgtatcaagacgctgagcaacaggaatactgtgaagcagaatctgatgctgttaatcctgatttaacaggagagcggtttcttgaatggctgaaagacggattgaagaatggttcactgtcgtttaacaataaaggcgataaaattcatgtggttgccggctttgtcttcattcctgtgccgggggttttttatgattacctgaaagcccggcaactccccggggagaagagagaggagctacaggctgcatttgaacgactgaatatccataagcgaaaagataatcagcgtttttatcatgcgcgaattgctgaggcaccagggaaaacacacgattataaaatactcaaaggttatctgataaaaggacgtggtctgatggatacaggggatctcaatgacagtccgaacttttttttcagtgagcgcaggaggtaa

SEQ ID NO: 33716 - DNA, 195 bp, Escherichia coli
atgaaattaagtcatgctgacatgcgctggaacgagcttatggatgaatattttttctgccgttcagtgagagtggctacggagtggagttacctaaaggttctgaatggattccggaagtttgttggcgagacccttttaccggaggatatccggcaacagcatgtgagggaatggaaacgagaggtgaggtag

SEQ ID NO: 33717 - DNA, 915 bp, Escherichia coli
atgaaaagtatagcaaaggcacaaaacgatttcaccatcttcaaattcggcgacagtgaaatccgcgtcatcaacaagtgcggtgagccgtggtttgtagcaaaagatgtttgtgatgctttaaatctgactaactcacgcaaggcgcttactgcacttgatgacgatgaaaagggagtaactttaagttacacccttggtggtgagcagaatttaagcattgtgagcgaatcaggtatgtatacattggttctgcgttgccgcgatgccgtcaataaaggttcagtcccgcacaaattccgcaaatgggtgacagctgaagttttgccatccattcgtaaaacggggtcttacggaaatacactgaaagctaaaaaggcgttgccggggaaaatcactactgaacagcaggaagccattaaacaactcgtcatgagtcgcggtcagtctctgccaaaggaaaaacaggcgaaggcgatgatcaccatgtggtcgtcactgaaatcacattttggatgttcgtacaaagaaatcagcgaggagcagtttaccgaagctctgtcacttgctgctcgcgttccgcttgaaggagagttaatcggcaaacaagagaagagcaccaacgagctttccgcaaaagaagcaaacagccttgtatggctatgggattatgctaaccgctcacaggcattgttccgtgagttgtatcccgcattaaaactgattcagtctggctattccggcatatgccacgactacggctatgagttctcgtataccatcgggagggcgaggggcgttttaattaatcacacgcgggatatagatatttatgagcctgacgggccgacgaaccttctggcatgggaaaggcttaagaacaaagagttgccgccttcactgcatcgctactga

SEQ ID NO: 33718 - DNA, 249 bp, Escherichia coli
atgaaaggtgcaagagatatcagtcccttgggaattaggattccagactatttaaagaaacgcattcagcaggaagcggataaaaacggcagatcaatgaactcagagattgtgcttatccttcaaaaacatgttgataatcttgatggccctcgctcacttgaaggattcgctaaccaagaagctgacaaattcaaagaggcgctgcttgagacgctaaagaccatgtatggtaaggatgaaaaataa

SEQ ID NO: 33719 - DNA, 315 bp, Escherichia coli
atggaggagtaccgtcgctggcgcaacgagtcctggcgatacgacgggagcgataaatacccgtggtctcagcctgtgctgtatcacatttgcctcgagatgcgttcaaaggggattgagcggcagatgaccgaaggggagttaaaacggcttgcagaacggcagctgacgaaatgggcaaagcatgttagtaacggcctgagtgttccgccagtccggcgacaactggcggcacccaaacgcccgtcggggccaacgccaattgagttgctgaaacaggaatatgaacgccggaaagcggctgggcttgtctga

SEQ ID NO: 33720 - DNA, 843 bp, Escherichia coli
atgaggaaaaaatcgtttggacgttgcccgtttgatttcgacgaagatgtaaaaaaaatagccgcgataaataaatatatccatgcgaaatttgagaggcataaaaataaaatagataacctaaagggggtggaacaaaaattgatggttttacattactttaatgtactgaatgaacttagtaatcaggctatattttctttgaataccggagccttttcagcatcggaagtattaactagagttataatggaacaggctgccaatcaattttatatagcaattgatgatggaaaaaatgcacaagcattactcaagggtagtaagaaattagttcatagtaatgggaaacggtggctggagtgtttaaaatccaaagaaatgactaatccagcagcagatgaaaggattcgtatcggaaaagagctaactgatatgtttaatagattgtggccaaatacacctgaatatcctggaaccaaaaagcttttcgaagtaattggctgggaaacacactatcatgcctattacgtccctctttgtgattcaatacatacattctctgatgatatggcaaatatagtatctctatataatgcaatccaaagcgataaaactactgctatcgaactcactcttgcagttaaacaagaaaataaacggctggcaatttataatgtcgtaattgctattggcctgcggtgtgaggccttagtaaatgtatttaactctttaggttatcgagatattataactgaaatggcgccaacaatagatgcagtcaaccagattataattcgatatgatgatttcgaacattccagaattttttattgtcaataa

SEQ ID NO: 33721 - DNA, 1374 bp, Escherichia coli
atgaaaagactatattatacccatcatgatagtcgaaccttaaaacttgctatagaaggtgatgtttctgataatgcgaatatttttacagtaattgtaggtaaaaatggcgttggaaaaagcagattgttatctcagattgctaaagactgtattcaagatgttcatttcttgaaaacttttaatccattatttgacagagaaataacaccaaagttaattgccgtatctaccagcccattcgataaattccctccagggcgtaggtcattaaatcaccaaaggaaagaaaataattatcgctatgtgggtatgcgtggagaaggccccttcggcgtatcaaatgccgtatcccttttatcttcagcagcgagaggttggctagagaaacttgcttattcagaaaatcctgcaaatttactcgatgtttttcattctattgattttgagccccatatagagtttgtatttaaaccaacttacaacggaccggacactcctgactataacttcattggtgtatattcagatgagatattaacggaagttaaggagttatatttaaaatacaatataaaaattgacaggaagaatattgagagtctcttaaagttaaactccgaatcacgtcatgatatttacgaagcactggttgaaattaatcgatttgaacctgaacgtagggctgtaaccttgtcagtcgattttaccaatggtgaaacattggttggctcgacttatgcgaataattatttttctagatcaattcttaaacttatgaacgctggcttcatgagattgatggatatgcgactcataaaaaaaagctatggtcccatgtcacttaaacgtgcgagctcgggagaacaatgtttattagtgatgttgcttggaattgcagggtatataactgatggttctataatactaattgatgaaccggaaataagcttgcatcctcgatggcaggaagagtttatcattatgttaacaaaagcatttttaacttactcaggttgtcaattcataattgcaactcattcaccacaaataatatccaatttgccgaataaaggttgttatataacatctttgtcgaaaagttatctttataaagcaaaatactttagcaaccggtctgcagactatcaacttgcggaactatttgatgcccctggcattatgaatgaatacattgccagattagctttcaatttactttcaaaagttaagactgctaagttagtaacagatgataattggcgtgaattaaaacaactccagcttctccttgaaaacgttaatagtaatgaccctattaatgaactcgtaaattccgtatctcaggtgtgtgaaatttatgccaaaaattaa

SEQ ID NO: 33722 - DNA, 633 bp, Escherichia coli
atgccaaaaattaaaaatccaattagattcagcgcagagtcattagatattattgagaaaaaattgtcttctccagattttaagcataccaactggggagatgatgatttgcaagttctccgtgcagaaattagaaatcattacagagaagaacaaaagctagaatgtgtatattgtcatgagcctattggggtaagagctgcacaagctgctcctatagagcatattgtgccaaaatctcaatatctatgttttatttttgaacctaagaatctatgtgtagtatgtcctgactgcaatgaattcaaaggtaaaaatgaagtgttatttgaacccgtaataaatggggggcggcgcaaaaactatccaactgcatctgcatcatttcgcatcgttcatccacatatagatgattatgagatgcatattataaaagcaaatcgtgtttatgtggacaaaacacctaaaggacactataccattggaatatgtaaactaaatagattttttcattattttgggatgtgtgatgaatttgttaatgatacaaaaattgctgaggcaaatgaaaattttttcaaaaaaggtagtattactactaatgaattattatattgtaaagtaatcaggtaa

SEQ ID NO: 33723 - DNA, 231 bp, Escherichia coli
atggcaacaagcatccgtttagacgatgatttcgtcagtgacgtaaaggttcacgctgatgccgcaagtcgcagcataccaaagcaaattgagcactgggctaagattggtcgtatagctgaagataatccagatctgccattcagttttattagcgaagttctgctgtcacaaagcgaaatcagacacaacaaggtaacgcgttatgtcagaagaacagacaggtcgtga

SEQ ID NO: 33724 - DNA, 330 bp, Escherichia coli
atgtcagaagaacagacaggtcgtgaaattgatgtttatcagagtcggcgttttgaaaagtctctgagtaaactcccggaagcgcaactgaaagttgtggaagatgagatcgacagaataattgataatcctctgttgggaacgcaaaagaaaggagacctcagttttcttcgtgtgcataaatttcagctgaataatcaactggtgcttctgggttacagctggcttgacgataaacttgagctctacctccttagcatcggtccacatgaaaatttttataccgatcagaaaaaacaccgaaaagctgatttaaaactcatcggttag

SEQ ID NO: 33725 - DNA, 1308 bp, Escherichia coli
ttgaacgggtcaatgcagaaaaaaattcgtccggtttcactgatatcgggtaaacaggcattccttgcgggccttgactggaagaacatacctcccggttaccggaatgcccggcggtttgcccggtcacagggcgcagaactgtatctttcctgccacaaccacgacggtgaaaacggtgatgaaatgatgattgccctgctcagtcgtcaggatgcagatatcccccgtaacattcgccagtgcctgtcactggcaatgttaatacgcccgctactcaaatcaggtgggtatgccattttcatcatcgggaacgacgagaacgacgacgctgaactcacctgtgcgtttgtttcggtgattaatggcattctggttaacgacgttaccggtaccccgactgaaatcacggaagcccgcaacacgttcctgatgctcaatgcggaaccggaaaacggctgggtacgctacgaacctgacggtttttcaccagacagtcggtgtatcccgctaccgctgtcaaacctgatcagcaccagaaagcatccggcagaagcgcgtctgctccccgtgtccagaggcccacagttaatgacagccttactcatcatcacgctgcttggcgcatcgtggtacggctggcaacgttatgaaatctggcaggcggaaaaagcggaacgggaagaaagcgcccggaaatcagctgaagcacgtataacgccaccatggacggggcagcctgagaccggagaatttatccggcaatgcagcacaacatggaaccagacgcaactgtctgctgccggatggcgttataccctggctgaatgttcttctgacggtaacagcggtaatctgcggtcttcatacaccaatacagcaggaacgacagtgacagccttcatccggcgcatcactgaactcacagacacccggccgtttattgttatgcctgaagggaactctggcggcgttgcactgccggtcacattccggctcccggataatcctgtcccggttgattcccttccggaaacccgagacctgcaggaacgactgaccacgctcgcacagtcagttcaactgcagattgactggcaggaagtcaataacagcttcactgatgaaaacggaaacatcatccagccaccgtggaaagagtatgacctgcagatacagacgctactcccggctaaccaactggcagagcgcttcagcgagccatctgtccgttttctctccgtcactagacaactggaaaatggtcgtttccgttatcagttcacaggtaaatattatgcacgataa

SEQ ID NO: 33726 - DNA, 345 bp, Escherichia coli
atggtttctcagatatacctggtccgggttacagacgctttccaccaggcgccgttcatcatccgtgcggtcggtggccacctcatgccaggggcgacggcagtgcggacatatcagctgaaccagacgctggctcagcaggccaatgaacagctgcggatcggcaatcatccttgcctgtaccccctccatctcaagacgttcgagaatgttaatcgggtcgttcgcatggatggtggtcagcatcagatgcccggtcatggcggcttttattgccgtaatggcggaatcgtggtcacggatttcgccgttcaggatcccgtcagggtcaagacgcagtgctga

SEQ ID NO: 33727 - DNA, 1242 bp, Escherichia coli
gtgaaaaagttcagacacgatgacgacaaaggttttattctgcttgaaatactggcgggactgatagtgattggtatcgccacgccgctgatttattccgaaatagaaaactggctgaatgaacagctttaccagagtgctgcttctcatgcagatgcctacaataccgcagccagaaattacattgccgataacaatgccactctgcacaacggcagccttccggcaaactttacagccgatgatttgattcgcaagggatacctgaaacagggatttaatcgttctccgtttgggcagagttatatcacgggtatccgccgtaaccagactacaggacgtcttgaagccctgacctgctcaacaggggggcagaatatcaaagaagatggtctgcgcagtgtggcaggacagcttcccgggctgggtggttatattggtaaaaacggaacagcaaccggcgcattcggcgcctggacagacaaaccgggggattacggactcacctgttcggcaggtcacattgccgtcgtcatgacgggtgatgatctgcaggaaagcgacaggttgtatcgttttcaggtcccggggagaccagagctgaaccagatgcacaccgccatcaacatgggcggaaatgacatcaataacgccggtaacctcaatggtcagaaagccacggtgaaaggcgatataaccagcgaagacggctggcttatcaccagaaacaacaaggggtggatgaacacgacgcacggaggcggtttcaccatgactgacagccagtggatacgcgccgtcaataacaaagggatcaccaccgatggtgaaatcaaagggggcaaagtcagcggtggaacgatccggtctgacggtcgtctttccacaggtgagtatttacagctggaaaaaacagccaccgcaggtacttcctgctcaccggacggacttgtaggccgcgacagtaaaggggcaatactttcgtgccaatccggtgtctggaagaataatatcagcgatgcactggtttttgattattcggcctgttatgacgcagaagaagactccagaaaaccggtttatgcgaactggggtagtggctcaaacggctttgccgtctgtgacggcaaagccggctatggtgcggcaggattcagagcgtacagaggtaaaccggggtattcgggaagcatggtctgggtcaaaatacgttgctgtaagttaaaagttaatacgccttaa

SEQ ID NO: 33728 - DNA, 369 bp, Escherichia coli
atgcaatataaagcagaaaaattatctgcaatcgtagacaaagaaagagctctttatttaaaaaaagctaaagacagaatgagagagttatacaaagatcctgaatatcagagaatgcatgaaatatctgaaaaagaagttataaaaaaaatagatattagcgacaacgcattcaagaaatacagaaagtatcaatgtgatgccgcctataattactgggatggtcattacaaaattttcaaatatcacgaatgctatataagaataacacaaaaccgtacccatgaaatatggaacgacttcctgacatatccagactccacccccccaatattacctgaaccacaattccgccccatgccagactaa

SEQ ID NO: 33729 - DNA, 1074 bp, Escherichia coli
atgtcagatacaatggtagtgaatggttcaggtggtgttccggcttttctcttttccggaagtacattaagcagttacagaccaaattttgaagctaattcgatcacaattgcattaccacattatgtggatctgcctggccggagtaattttaaactgatgtacattatggggtttccgattgatacggagatggaaaaagacagtgaatattcaaataagatccgccaggaaagtaaaatttcaaaaactgaagggaccgtgtcttacgaacagaaaataactgttgaaacaggtcaggaaaaagacggtgtgaaagtctaccgtgtcatggttcttgagggaacgattgccgaatctattgaacatctcgataagaaagagaacgaagacattctgaataataaccgaaatcgcatcgtcctggcagacaacactgtcattaactttgacaatattagtcaactgaaggaatttttacgtcgttcggtgaatattgttgaccacgatattttttccagtaatggttttgaagggtttaatccgacaagtcattttccatctaatcctagtagcgattattttaacagtaccggtgttacattcggttccggggttgaccttggtcagcgaagtaaacaggacttgttgaatgatggcgtgcctcagagtattgcagataaacttgacggatattatatgcttcgtggacagagtgcatatgataaagtaaaatcaaatccgctgacactttccgataatgaagctcatctcttatctaatatttatatcgataagttctcaaaacagattgaggggatatttaatgatgcaaacatcggaatgagatttagtgatcttcctgtgagaacacggactgcgttagtgtctctagggtatcagcatggttactatttgcccaaaaccacccctaatgtatggaataaggttacgtcaaaggactggagtggtcttgttaatgaattgaataattttggaggtggaagtccagatagaaggaaacgtgaaggggctcttattcaacaggatattgatgctgccctgttaatataa

SEQ ID NO: 33730 - DNA, 621 bp, Escherichia coli
atgcatactggcattgatatgaataataacagcatcaccaatatcaatgaagccagtggtaaaaacgccagattttcaggcgatgtcacatcaaatcgttggttacatccaaatggtggcggcttcaccatgacggacagccagtggatacgtgctgttaacaacaaagggatcacaaccgaaggagagatcaaaggtggaactgtccgtggccagacagtcactggaggaacggtccgctctgatggtcgtcttactgccggcgagtatttacagctaaacggaatcgccaacgcaggcactcattgctcaccagacgggcttgtaggccgcgacaacagcggggccatacttcagtgccaatccggtatctggacaacgacaaaaatgaacttcactaccagtacatacaatatcgggaaaaatactcgtaatctgagcattggcgtacatgcgtactgctcgtggacataccttaatggctcgccttttggtggttttcagcagatatacgccgaccaaaacaaggtttggtatgtgaataattatgcgtggggaaattatgagtccggtggcacaattacagtgacatgcctcaaccttcctggtgccggaatctaa

SEQ ID NO: 33731 - DNA, 543 bp, Escherichia coli
atgtttagaatgaaaaaagacttaatgtatatatatgttggtatatggaatcatatgatttgctatattccttcgtattatctgagatggttttttttacgttttttttacagggcaaagattgacaaaggtgtcaatattcatatgggggtaaagttttttagtccttggaaattaaaggttaaatcaggtacaaatatacaatgggggtcatttctagattgccgaggaggcctagatataggtcataatgttgacataacattaggggtgaaaatacttacacaatatcataatattcacgatgaaagatatgaaacgatctcaaagaaaataattatagaagacaattgtattataggttcatactcactattattaccaggaagtaatattgaaaaatttggtgttttaggcgctggttctgtcctaacaaaaaatgttaaagaaaatacgatgtttgcaggtaatccggcaaaatacattaaaagaagaaatcttcataatattataaatgtcagttataaaagagcgttccattaa

SEQ ID NO: 33732 - DNA, 720 bp, Escherichia coli
atgaataaaatagctataatagatcctgcatcgtacgcattaccatatgactatttttttattagaagtttatcaaaggattatgagattgattttttttgttcgaaaacaaaatataattttgattatgttaagaagatttcattaattcctaatgtcaaagttcatgtctacaatgtatcttatgggagtaaattgttgggggtgattagttatatattaatgttattaaaggttgtgtttacttcgaaaaaatatactgccattaatttacaatggtcattgttaccgtatgttgaagttatttttctctacattattaaatctaaatttgttatgactttccataatagtgttgagcatgggcggataaaaaaagcatatctaaaaaataacatcctcgcttctctcgctaataaaatcatattcgttagtgatttcacaaaaaatgaatttttatcaatatacaacaagttaaataatattagtgagaaatcatatgtgttaaaacatggtgtgatgccaattaacttcgatgaagctaatattaaaaataacttttttgaagcacctagaaaaatcattttttggggcaatgtgaaagactataaaggagttgattttctcgctgaaaacatacatttaataatagctaaaggttacagtctggagatatatggaaaatttgatagagcgggctggtgcgaaagtgaccgatga

SEQ ID NO: 33733 - DNA, 384 bp, Escherichia coli
atggaaaatttgatagagcgggctggtgcgaaagtgaccgatgaatatttatcattaaatgaaattgaaaaattattatcctccaatatagttcttgtactaccatacaaagccgcttcacaatcaggtgttatgtatacagctctaaattataatacagtgatgataacaactgattgtggagatccatatgaatttctgaaagattgtgacttgagaaatttatcatttacttataatgattcagctagctttgaaaaagccctagattatttatctaataatttcctttcaattaaagagaggattttgctgaataagaaaaaatatcaatgggaatattcatctactatacttaaagagatttttggtagcaaaatatga

SEQ ID NO: 33734 - DNA, 1410 bp, Escherichia coli
atgaatgtaaataattgtgctaaaatcgttcctgtaattattgctggtggtgtgggtagtcggctttggcctatgtcacgagaggagcatccaaagcagtttttacctcttttacatgactcattatcacttctccaacagacgttatctagagtgaataataagcattttgacgcaccgttagttatttgtaatgaagaacatcgttttttagttgcgcagcaattaaaagaattgaatttattgaataacaatataattcttgaaccctgtagcagaaacaccgcacctgcgataacacttgcagcactatccttgaaaaataaagattgtattatgcttgttttagctgctgatcattttattggagatggtgattattttttaaattttattaaaaaagcatcaactgctattgatgatcaaagcctcataacgtttgggatcacgccatcccatccggaaacagggtatggatatattaaaaaaggaaaatcaatatcagatgatgtattcattgttgataagtttgtagaaaaaccaaataaagaaaaagcagaggaatatatagctgaaaaactatatttatggaacagtggaatgttcatgtttaaaccaatggcatacttaagagaactaaaaaaataccatcctaatatatatgatgtatgttcgagttcgatagattcaattgttagtgatatggattttagaagaattgacaagactattttcgaaagctgtgctaatgaatctgttgattacgcagtcatggaaaatagttctcatgtcaaagttttgcaatttgattctcaatggagtgatgtaggagcttggggagcattatgggaaatctcggataaagatactcatggtaattgtatttcaggtgatgttttcttaaatgattcaaaaaattgctatattaaaagtgatggtgtttttacttctgctatcggattaaataatatagttgttgtcgcgtccaaagattcagtattagtctcacatcgggactctgttcaaaatgttaaaaatgtcgttaattatttaaaggagaataatcgatatgaatacaagcgacataacgttcgttacctgccttggggaacaactttatctttagtcgattcttctaaatataaaattaactttgttactattgagccagggaagtcaatctcattacaaaaacactatcatcgtaacgaacaatggacgatactatctgggactgcagtggtatatatagatggaataaaaaaaataatcacagaaaatcaaactgtccatatacctatcggttgtacgcactctattcataatcctggtataattccggttgaatttttagaaactcaaatcggagagtgtattgatccgagtgatgtatttagacttgaaaaatga

SEQ ID NO: 33735 - DNA, 555 bp, Escherichia coli
atgacacagactgaatcagcgattctggcgcatgcccggcggtgtgcgcctgcggagtcgtgcggcttcgtgataagcacgccggagggggagtggtatatcccttgtgtgaatatttccgcagagccggaggcgtattttcgtatcgcaccggaagactggctgcgggcagagaacacgctgttccgggatgcctaccatctggcgggaattgatatgccggattttcatcgcgaggatgactggtggcgcaacggccagaacctgtacctggacaatatggagggaacgggcttttaccgggtgcccctgtcctctgcacaggcgggcgatatcctgctgtgctgcttcggcgcatcggtggctaatcatgccgccatttactgcggcaacggtgagctgcttcaccatctgcctgaacaactgagtaaacgggagaggtattctgaaaaatggcaacgacgaacgcattctgtctggcgtcaccgccactggcacgcatctgccttcacgggaatttacaacgatttggccgccgcctcagcctgtatgtga

SEQ ID NO: 33736 - DNA, 285 bp, Escherichia coli
atgtcacggcaaaaaaacactaacgcagcgaaattatacgcgccacagtcagtttgtgaaaatgtgaagatattcagaatttttatgccattaccggttttaaccaacaggattatcggtgggcatgaaagaaaaccccggtatctgctgataccggggtttctgtttagcatggcagaaatgtgtttcatgcttttcgggcgaaggatatccgacttctgtacggaatggcaagtggcggttaatttattcaggggaaggctgtatgggaaaaggtggcggtaa

SEQ ID NO: 33737 - DNA, 300 bp, Escherichia coli
atggaacaaacaagttacagcaaactatcacagcgcgacgttgatcgcgcagaaacagatttacttatcaacctgtcaacgcttacccagcgcggtctggcaaagatgattggctgtcatgaatcgaagataagcagaacggactggagatttattgcttcggtcttgtgtgctttcggaatggcatcagacatcagtccgattagcagggcttttaagtatgcgcttgatgaactcaccaataaaaaacgcccggtgtgcaagaccgagcgttctgaacaaatccagatggaattctga

SEQ ID NO: 33738 - DNA, 501 bp, Escherichia coli
ttgtgtcgttcactgggattaccggtggaaaaaatccgctccgtataccgtgagagtgacatcgtaccgggagaacagactgccaccagcatactgaagcagcgcacaaaaaatattgcgctgccacttcacgtccaccagcaacaaaatccaccacagaaaaaaacggttgtcagtatcgccgttgatccggagtctcctgaatcgttcatgaggcggcctaaacgtcgccgttgggttaatgagaaatacacgcgctgggtaaagacacagccgtgcgtgtgttgtggtaagccagccgacgatccccatcacctgattggtcatggtcagggaggtatggggacaaaagcccacgatattttcacgctaccgctgtgtcgggagcatcacaacgagcttcatgcggatccgctggcgttcgaagaaaagcatggttctcaggttgatttaatttttcgttttcttgatcacgcctttgcaactggcgtgcttgggtaa

SEQ ID NO: 33739 - DNA, 363 bp, Escherichia coli
atgctcatagatttggttttaccttacccgccgacggtgaacacttactggcgacgccgtggcagcacatattttatctcggaggagggaaagcgttatcgccgggctgtggcgcttattgttcgccagcagcgactgaaattaagcctgtccggaaggctggcgataaaggtgattgcagagccaccggataagcgccgccgtgacctggacaatattctgaaagcgccgctggatgcgctgacgcatgcggggttgctaatggacgatgagcagtttgatgaaatcaatatcgttcgtgctcagccagtatctggtggacggctggagataagaattacagaggtgggtgtgcatgaataa

SEQ ID NO: 33740 - DNA, 1014 bp, Escherichia coli
atgatacctgtatggagcacagcctgcccggactgggcagagcgcctgaaaaaggggctgtcgattattccggatccgatttatccggacgaggccgcacatgccctggcgatttttaaacaactgcgaattgtggatgcaccgggtagcccgacattcggggagtcctgtgcaccgtgggtgtttgacctggtggcggccctgtttggctcctacgatgcgcagaccggtgttcgccatatcaaggaagtgtttatccttatccccaagaaaaactcgaagtccacgctggctgccgggatcatgatgacggcgctgttactgaactggcggcaggcggcgggttacacgattctggccccgactgtggaggtggcggccaacgccttcaaccctgcccgggatatggtacgacgggacgatgatctggatgacctctgtcaggtgcagacacatatccggaccatcacccacagggtgacggacaccacccttaaggtggtggctgccgatccgaatacggtatccggtatcaagtccgtggggacgctgattgatgaactgtggttatttggcaagcagtacaaagcggaggacatgttacgtgaagccataggcggccttgcctcccgcccggaagggtttgtggtgtatacgaccacccagtcgaatgagccgccagccggggtgttcagacagaaactgcagtacgcccgggatgtgcgcgacggcaaaattcatgatccgcactttctgccggtgatatttgaacaccctcctgaaatggtggaaagcggggctcacctgctgatggaaaacctcgccatggtcaatccgaatctcggttattcggtggatgaggcttttctgtaccgggagtaccgtaaagcccgggaagccggtgaagagacattccgggggttcatgtcaaaacacgccaatgtggaaattggtcttgccctgcgctctgaccgctgggcgggggcctggatgatctgctggggatgtatgtga

SEQ ID NO: 33741 - DNA, 450 bp, Escherichia coli
atggattatgcccaccgtcatgaatttacggacacgctggggctgattacgtcattcagttatgccaatgctgaaggtgagcaaaaaacgcactacaacgatacccgctggcatgaggattctgtgcgtaaccgctggttcagcgtgatggcggggccatctgtgcgcgtgaatgaatggttcagcgcttatgcgctggccggagtgtcgtatgcccgggtgtcgtcttttgccggtgattatgtgaccctcacgtcagatgagggtaaaaagcaggagcacctgacccgttcggacagcggacgccgcagccataccgcactgacatacagtgcaggcgtgcagattaacccgacagaaaatatcgtggtcgacctggcttatgaagcctcaggacgtggtgactggcgtacggatgcgtttattgtcggcaccggataccggttctga

SEQ ID NO: 33742 - DNA, 285 bp, Escherichia coli; identical to SEQ ID NO: 33736

SEQ ID NO: 33743 - DNA, 492 bp, Escherichia coli
atgagcgctgaccgaatcattggtgatatcgtcaagggatacacggttgatatggggcagggcgtaatgactcagaaccagctgacttttcagaaaatgattttgctgaaagacaacatgccgtttgatcgcaagcttatgcttatggcgtattcattttccagaggtgaattcatcatgaagataaatgacaaagttgtcgttcatgccaggtcaggcaaagtcaaaaccggggagcgggaggtccagatttccaaaaacgccagcagatatgagccggtatattctgatgttggcggaagtgcgtcaggctcatggggtattcctgccggacagggtgatgcgcgggttgaaattacattcaggtatgaagcaggtgtgcttttttacaggggtggttcaatacttcatgatacgagtcaaattcggatcccggacccggttctgttttacctgaaatcctatacagacgattttgataccgcatcgtga

SEQ ID NO: 33744 - DNA, 201 bp, Escherichia coli
atgtcatcgaaaaaccggacccgcagaaccacaacccgcaatatccgtttccccaatcacatgattgaacagatcaacatcgcccttgagcataaagggtccggtaacttttcagcgtgggttattgaagcctgcaggagaaggctggcaacagatgcaacgcatctgcgcccggccagcatgaaaaataacgagaaatga

SEQ ID NO: 33745 - DNA, 327 bp, Escherichia coli
atgaaaagaaatcttccgttaattattttgttgtcttctctggttatgggctgtacgcaacataaaacagatatgccccgacagttggtgaaggcattaccacaatatccggcctatgcagcggcaaattatataaagggacgggttgatgtgaagtttgatattggtgctgatggtactgtcacccgaattgagtttatccgttcagagccgcaccatttgtttgatgagcaggttgtaaaggcgatggcaaaatggcgatttgagaaggacaggccgtgtaaaggcgtgaagaaaacgtttatctttagtccttctgcaccctga

SEQ ID NO: 33746 - DNA, 366 bp, Escherichia coli
atggctgagcttcgtacactccagagcagaatcaaaacactgaatacccgacgggtgaatattctgaagggggaacagcgtcgtgtcagtggcagtgcacgtgtttccctcaagcgtcatatctggctgagggacgccgggcagtgctgtctctgtgggcgtgtggttgacctctgtgacagtgaactcgatcaccgaattgcacttcagttcggtggtggtaatgaggagacgaatctctggacgctctgtaccgaatgccatcgacaaaagtctgctcgtgaagcggcgggtggtatgccggacccgacgctgccggaggtgtccggaggtagtggcagagcggacgacatcatcggactgtaa

SEQ ID NO: 33747 - DNA, 675 bp, Escherichia coli
atgaccatgcaactcgctgtagaatccctcgtcgtcgttacttactctaacgtccctgtaataacaacagggttattggcacatctatacaaaactgaagaaaaacatatacggcagaacttcaaacgtaatgaatgtcgtttcattgcaggaaaacacttctttaaagtaagtggctgtgaacttgatagtttgcgaacctctcaaagaggtttacaaatttccccaaaaacccgctccctcatcctctggacagaacgcggcgcagcccgtcacgcaaaaatgctcgaaaccgatcaggcgtgggaagtgttcgaaaaactggaagactgctatttcagccagtgcgagaaaaatactggcaaacaagagaagaagcccaacgggctttccgcaaaagaaacagatagccttgtatggctgtgggattatgctaaccgctcacaggcattgttccgtgagttgtatcccgcattaaaactgattcagtctggctattccggcatatgccacgactacggctatgagttctcgtataccatcgggagggcgaggggcgttttaattaatcacacgcgggatatagatatttatgagcctgacgggccgacgaaccttctggcatgggaaaggcttaagaacaaagagttgccgccttcactgcatcgctactga

SEQ ID NO: 33748 - DNA, 291 bp, Escherichia coli
atgtcagaaataaaatcgctggtcactgctgaggcagtgaaggaagtcctgcgctctgaagaagtccggagcgcactgaaacagcaacttcggcagaaccttgaggcgcgtcttgatgcagaagtggattcaattctggatgaattgcctggtgcacagccggaaccatccccggaactgcttccggaaccacaggcggaagatgtcaccacggaaaatggtgatattcagccggagccaccggtgacggatatgacagacacacaacccgaaccgggcacaatgctgtaa

SEQ ID NO: 33749 - DNA, 366 bp, Escherichia coli; identical to SEQ ID NO: 33746

SEQ ID NO: 33750 - DNA, 201 bp, Escherichia coli
atgtcatcgaaaaaccggacccgcagaaccacaacccgcaatatccgtttccccaatcacatgattgaacagatcaacatcgcccttgagcataaaggatccggtaacttttcagcgtgggttattgaagcctgcaggagaaggctggcaacagatgcaacgcatctgcgcccggccagcatgacaaataacgagaaatga

SEQ ID NO: 33751 - DNA, 912 bp, Escherichia coli
atgaaagtacgatctgttggatcagacggggaaggccgggcaactcatctttatattgacggaaatccgtcaaaatttcttcaggggcattctgttattggctccgatgatttgcaggggctggtattaaccgcttacgcaagaatattggcattacttcatattcctcatgatctaccatcctatcgtcaggtaatggcagggcaatttaagatctcacgcattgatattaactacatgtattcattatcaacgctggaaaatgtccgcgcatggctatatgccgcagaattcaaggctaaaactcgccatggtcgcgcctgtggtaaaggtggaactgtttacttagggaaaaactcccggcggtggagcctgaaattttattcaaaatatgatgagcatatttctggtaaaaaaggacaccagatagcagaagagtttgttaaagctggcttacttgactggtctaaagataaattacgaattgaattgacgctaagaacaacagaattaattgacttaaaccttacgcttggcagtaactggaatatcgatactccaaacaaattattctctgaatatgtagggagaatagaaatgaatcaaaatgccattttgaccgatgaaaaaatagttaaactgccgaggaaaatacaatcaacatatttactgtggaagcagggcgcaaacatgaaagaaatgcttccaaagccaacattttacaggcaccgaaaagaattattgtctttcgggatagatattaatttttattgtgaatcccctgattcaaataatgttgttccattagtaagaacacttgaggctaaaccagcccaaatccctacatggatttatgagaaaggttttatttttgattacaaccgtatgtcacatgccagtaactggcattaa

SEQ ID NO: 33752 - DNA, 216 bp, Escherichia coli
atgacaatagaacataataacgcccttcgcagcattgcccgtcaggctaattctgaaatcaaaaaagccagacagcagtttccggataaaaacgtcgatgacatttgccgtagcgtactgaagaagcaccgcgaaacggtaacgctgatgggattcacaccgactcacttaagtctggcaatcggtatgttaaacggcgtctttaaggaacggtga

SEQ ID NO: 33753 - DNA, 1107 bp, Escherichia coli
gtggtccctgtggtccgggttcacctgtcgggccctgtggacctgtcgggccctgtcttcctgtttctccctgcaaacctcgtggccccgttttacccgcaggacctgccggaccaaccggccccggaacaccctgagcccccgctggtcccctttcacctcgtggccctgccgggcctgcatcacctttggctccggctgcaccagccggtccctgagggcctgcgggccccactgcaccaggtgcgccaggttccccccagtcccccttcggtccggggactgctgcccgggttgctgcctcttctgccttcgtttttgctgcctgcacttctgccattaccgctttcacagcctttggggttgccgcttttgtttcatcatcgctgttggtatcgctgctcagctgtacaacacctttctgtgatgtgctggcatccggaacactggcgacactgcctgcgggacccgcaggacctgcggggccggtttctccccgagggcctgcgggacctgccggacctgttgcgccgggttcacctttatcccctttcgggccggtttgccctgccggaccctgtggtccgggtggtccggcctctccacgtgggccggtgtcacctttcggccccggcggtccgcccgggtcacctttatcgcccttcggtccctgtggacctgtttctccccgttctccctttggccccggctcaccttttggtccgaccgcccccgttgccccggctggtccctgtgcccctgtggcaccctgtggacctgtgtcccccttctcgcccgccggtccccgggcattctctgcccgtttcttcgcttcctctgcactcgccgccgacgcttcagcacgcttcaggatttccgctgccaccgcttccagctctgcaagcgctttcgggtaatactgcgcctcatcctgttccatcagaaatttattcagcgttcccggctcagaatccgccttcaccagaatgtcacccacatacgacggggcgtacccttccgtgttcagcgtcacccggtaccaccccggctccacatcaaaactgtaactgccggtttcccccggctgcccctgcgccaccgtggtga

SEQ ID NO: 33754 - DNA, 132 bp, Escherichia coli
atgtcagacaaactcataacgctggcgaagatcctctgtgtaattgtcggcatttcattttcactcatgctggttgccattttcttttccaccgcctggcgagtcctgacgttatcgggactggtggggtga

SEQ ID NO: 33755 - DNA, 291 bp, Escherichia coli
atggtgaagaccatcgcaccatcagccagaaaaccgaattttgcagggtgggctaacgatatccgcctgatgcgtgaacgtgacggacgtaaccaccgcgacatgtgcgtgctgttccgctgggcatgccaggacaacttctggtccggtaacgtgctaagtccggccaaactccgcgacaagtggacccagctcgaaatcaaccgtaacaagcaacaggctggcgtgacagctggaaaaccaaaactcgacctgacaaacactgactggatttacggggtggatttatga

SEQ ID NO: 33756 - DNA, 681 bp, Escherichia coli
atgtgctggcatccggaacactggcgacactgcctgcgggacccgcaggacctgcggggccggtttctccccgagggcctgcgggacctgccggacctgttgcgccgggttcacctttatcccctttcgggccggtttgccctgccggaccctgtggtccgggtggtccggcctctccacgtgggccggtgtcacctttcggccccggcggtccgcccgggtcacctttatcgcccttcggtccctgtggacctgtttctccccgttctccctttggccccggctcaccttttggtccgaccgcccccgttgccccggctggtccctgtgcccctgtggcaccctgtggacctgtgtcccccttctcgcccgccggtccccgggcattctctgcccgtttcttcgcttcctctgcactcgccgccgacgcttcagcacgcttcaggatttccgctgccaccgcttccagctctgcaagcgctttcgggtaatactgcgcctcatcctgttccatcagaaatttattcagcgttcccggctcagaatccgccttcaccagaatgtcacccacatacgacggggcgtacccttccgtgttcagcgtcacccggtaccaccccggctccacatcaaaactgtaactgccggtttcccccggctgcccctgcgccaccgtggtga

SEQ ID NO: 33757 - DNA, 213 bp, Escherichia coli
atgctagacacatgtaggttagcctcttacgtgccggaaggcaaggagaagcaggctatgaagcagcaaaaggcgatgttaatcgccctgatcgtcatctgtttaaccgtcatagtgacgacactggtaacgaggaaagacctctgcgaggtacgaatccgaaccggccagacggaggtcgctgtcttcacagcttacgaacctgaggagtaa

SEQ ID NO: 33758 - DNA, 327 bp, Escherichia coli
gtgcgtaaccgctggttcagcgtgatggcggggccatctgtgcgcgtgaatgaatggttcagcgcttatgcgctggccggagtgtcgtatgcccgggtgtcgtcttttgccggtgattatgtgaccctcacgtcagatgagggtaaaaagcaggagcacctgacccgttcggacagcggacgccgcagccataccgcactgacatacagtgcaggcgtgcagattaacccgacagaaaatatcgtggtcgacctggcttatgaagcctcaggacgtggtgactggcgtacggatgcgtttattgtcggcaccggataccggttctga

SEQ ID NO: 33759 - DNA, 201 bp, Escherichia coli
atgtcatcgaaaaaccggacccgcagaaccacaacccgcaatatccgtttccccaatcacataattgaacagatcaacatcgcccttgagcataaagggtccggtaacttttcagcgtgggttattgaagcctgcaggagaaggctggcaacagatgcaacgcatctgcgcccggccagcatgaaaaataacgagaaatga

SEQ ID NO: 33760 - DNA, 546 bp, Escherichia coli
atggtgaaagaggccgtaagtcatatccctgctccgcgtgacggtcgtgactatgatccggatgttctgcggaaggcggttctggaggcggtgaatgccctgccggctccgcaggacgggcgtgatgccacggcactggaagtgctccccgctattgacgatcaaaaatcctttccccggggcacgtatgccacacaccagggcggactctggcgggcgtatgaaaaaacgcacgggatgcggggatgggaatgcctggttgacggggtggcggatattgacgtcagcatgacgggtgaacggttgttctctgtggtggtccggcagagcagtggccagcgtacggaaaaaacattttccctgccggtgatgctctaccgcggtgtgttcagagccggtgaaacctaccaccccggcgatacggtgacgtgggggggctcgctgtggcactgcaacagtatgaccgaagataaacccggagaagctcattcatcagcctggaccctggctgcaaaacgtgggcgggatgcaggaggtggaaagtga

SEQ ID NO: 33761 - DNA, 315 bp, Escherichia coli; identical to SEQ ID NO: 23125

SEQ ID NO: 33762 - DNA, 393 bp, Escherichia coli
gtggtccgccgccgggtgtatgcccgttttctggatgcggtgaatttcgttgcgggcaatccggaggcggacccggagcaggagctgagtgaccgctgggtggtggagcagatgtcgcagctgacagccatgacggcctcgtttgtgctggccacaccgaccgagacggacggggcgctgtttcccggtcgtatcatgctggcgaacacctgtatgtggacctaccgctctgatgagtgtggttacacgggcggggctgtggcggatgagttcgataaacccaccacggatatccgtaaggacagatgcagcaagtgcatgcgcgggtgtgaactgcgcaggaatgtcggcaattttggcggtttcctttccattaataaactttcgcagtaa

SEQ ID NO: 33763 - DNA, 321 bp, Escherichia coli
atggaagcggcgaactacacgtttgagcacaatgggcgtaaatgggactacgggaagtcaacgcagacgcgtcttgagccgtcggtggcggcagcgaaagcggggaaactgccggaggcgtttttctggacggatgcggacaataatgacgtaccgatggacgctgaaacactgattgctctgagtgctgctgcagagcaggcgatgtttaccaaaggtctggaaattcatgtcagacagcgcacgatgaaaaaagagattgaagcgctggatgatgcggaagctatactggcgtataaaatcggtatcacagacggctga

SEQ ID NO: 33764 - DNA, 321 bp, Escherichia coli
atggaagcggcgaactacacgtttgagcacaatgggcgtaaatgggactacgggaagtcaacgcagacgcgtcttgagccgtcggtggctgccgcgaaagcaggaatactgccggagggctttttctggacggatgcggagaataacgacgtcccgatgacggcagaggcgctgatggcactcagtgaggcggcggagaaggcgatgttcaccaaagggatggaaattcatgtcagacagcgcacgatgaaaaaagagattgaagcgctggatgatgcggaagctatactggcgtataaggtcggcatggctgacaggtga

SEQ ID NO: 33765 - DNA, 321 bp, Escherichia coli
atggaagcggcgaactacacgtttgagcacaatgggcgtaaatgggactacgggaagtcaacgcagacgcgtcttgagccgtcggtggcggcagcgaaagcggggaaactgccggaggcgtttttctggacggatgcggacaataatgacgtaccgatggacgctgaaacactgattgctctgagtgctgctgcagagcaggcgatgtttaccaaaggtctggaaattcatgtcagacagcgcacgatgaaaaaagagattgaagcgctgggtgatgcggaagctatactggcgtataaggtcggcatggctgacaggtga

SEQ ID NO: 33766 - DNA, 303 bp, Escherichia coli
atgaggctggatgtcatttcccgccgggctttaacggttctggccacctggaaaagggcgtcggcaatatttccgcgctcttccccgtttctgattaacgtggcttcctccggtggcacccaggttaacagggcaccggataacatgccgctggctttgatggaatcgatgcattcttttgccagaaaatacatgccggatgtgcctttcttttcaccaaaatcggtttcgatctcgcagagaaattcgagtgcacgcagggacggcgttccgtcacgtatcatgccgcccagggcttcgtag

SEQ ID NO: 33767 - DNA, 288 bp, Escherichia coli
atggtcaatccgaatctcggttattcggtggatgaggcttttctgtaccgggagtaccgtaaagcccgggaggctggtgaggaagcatttcgtggcttcatgtcaaaacatgccaatgtggaaattggtcttgccctgcgttctgaccgctgggcgggtgcggatttctgggagcagcagggcaggcgcgtcagcctggacgatatcctgcagcgcgctgatgtggtgacggtggggattgacggcgggggcctggaaattctctgtcggctgggaggggaaaaatga

SEQ ID NO: 33768 - DNA, 165 bp, Escherichia coli
atgacggctggggagctgatggcactcagtgaggcggcggagaaggcgatgttcaccaaagggatggaaattcatgtcagacagcgcacgatgaaaaaagagattgaagcgctgggtgatgcggaagctatactggcgtataaggtcggcatggctgacaggtga

SEQ ID NO: 33769 - DNA, 351 bp, Escherichia coli
atggcaatatctgcaggtcgtctgacacagatgataagtgttctgaacccggtgttaacccgtaatgctgccggagaaatgacggaagaatgggtgtcatgcgggaaaattcatgcggatatccggggcaggagcagccgggagcggatgcagtccggtgcggaaatggcgcaggcggaaatccgcatctgggtgcgcggtcagtctggtcgtgaaatcacggcggcgtcacgacttcatgtgctgagtggtccctggcgtgactgtatcctgaacgttgtcggggtgcccgtgccggatgcgaccggcgggcgcctggaaattctctgtcggctgggaggggaaaaatga

SEQ ID NO: 33770 - DNA, 279 bp, Escherichia coli
atggcgcacgataccaaattacacaattctgatgattctgccgtctttgccagcaggcacgggcggcgttcccgcactttcaaatctgactggttccagcatgacccatgcactgaagaacaggccgagtggctaattcagtgctaccgcagacacggatacgagattaagaaagccctcagcctcgattatcgtcactggataatctccgtcaggcttccttactctgaacgcccaccgcgtccgtcccgcacattccagcaacgcatctggaggtaa

SEQ ID NO: 33771 - DNA, 207 bp, Escherichia coli; identical to SEQ ID NO: 19640

SEQ ID NO: 33772 - DNA, 771 bp, Escherichia coli
  misc_feature (31)..(40): n is a, c, g, or t
atgatttattatctcacagaaatgatccttnnnnnnnnnngtatagaggataaaaaaaaacgaacagaaaattttcttacatccattgagttcgattctgagccaagtatcatcgtggatattggttggcggggtagcatccaagataatttaatgtcgcggaaaaataattatattcaacatggatgttatctcggattgtttgatttttacccaggccagtcaggtcagaataaatcatctgtaatttttgataacaacagatttagacaaaaatggaccatgaaaggtgtagcttttatggagacggttttcaatgctttggacggaagtgttgtcgattatgtaaacaataaaccgaaaagaaaagaaaattacgctgagatagaaaattcaaaacatttaatagttatgcaagatgctatcattgaggaatttatgaatctatctattatgttaaaagagggaaagttaaatatcaatgatattgaaagattagctattgaaagttacaaaaaaatagtaactaacccatctaaagaaatagctgatttttatgttggcagtatccaaaatgaaagcttcggtttgaatgattttatcgacaaagaatttaacattagcgcagtagatgttttccgaagttttttttctaaaagtaaaagaaatgaaataagaataaaattgcatagaaatggatggcgtgagtcgatacttaaatcctctaaagtatcgctgagcgcaaaattatgttcacttttaattagataa

SEQ ID NO: 33773 - DNA, 219 bp, Escherichia coli
atggcgatgaatacggtttttcttcatttatcagaagaggcaattaaacggctgaacaagcttaggggctggcgtaaggtttcacgatctgcaattttacgcgaagcggtagagcaatatctggaacgtcagcaattcccggtgcgtaaagcaaagggaggcaggcaaaggggtgagacagtagttgttgatgatcagtgtaaggagcataaggaatga

SEQ ID NO: 33774 - DNA, 615 bp, Escherichia coli
atgaacgcaataattattgatgaccatcctcttgctatcgcagcaattcgtaatttattgatcaaaaacgatattgaaatcttagcagagttgactgaaggcggaagtgccgttcagcgggtggaaacacttaagcctgatatcgtcatcattgatgtcgatatccccggagttaacggtatccaggtgttagaaacgctgagaaagcgccaatatagcggaattattattattgtctccgctaaaaatgaccatttttacgggaaacattgtgctgatgctggcgctaatggtttcgtgagtaaaaaagaaggcatgaacaatatcattgcggctattgaagctgcaaaaaatggctactgctatttccccttctctctcaaccggtttgttggaagtttaacgtccgaccagcaaaaactcgactccttatcgaaacaagaaattagtgtcatgcggtatattcttgatggcaaggataataatgacattgctgaaaaaatgttcatcagcaacaaaactgtcagcacgtataaaagtcgcttgatggaaaaattagaatgcaaatcactgatggatctttacacattcgcacaacgtaacaaaatcggctaa

SEQ ID NO: 33775 - DNA, 147 bp, Escherichia coli
atgaccactcatgaccgcgttcgtttccagttgcaggcgcttgaagcgttactgcgtgaacatcagcactggcgaaacgatgaaccccagccgcatcaatttaatagtacccaaccgttctttatggacaccatggaaccactgtaa

SEQ ID NO: 33776 - DNA, 366 bp, Escherichia coli
gtgcttggcattagtgccattgagagtatggatattatcgctgatataaattcgataaaagaactaatagatgatgtaaaatatgccagaaaattaacaagggtggcaaaatcttcgccagtaatattggctaatattgaaaatgaaaaaataatagagttttgtaagatctacccagtgctggtcaatagaatcagattcaatgaagatggaacaaagattacgcttgacacgaaggtctcaaaagatctctttattaaagtcctgatggatgattttttaacctcacagttaactcagttttattatgaaagtctagcaaaagatgctttaaaattagcggctgacaatactaaagagaactaa

SEQ ID NO: 33777 - DNA, 165 bp, Escherichia coli
atggcgctgagtactctacgattatcgacctgtgaagttacctggcgcattggtatcagttgtacagtattgtataaatggaaagctgaaattatcggcaacagtacttaccagactatgagtaagcataaggaactttccctggaggcaaattcgatgcgttga

SEQ ID NO: 33778 - DNA, 264 bp, Escherichia coli; identical to SEQ ID NO: 16624

SEQ ID NO: 33779 - DNA, 663 bp, Escherichia coli
atgtcaccgcagaaattagataaaaaaggtttagatgataatttaagttattatattaataataaaaatgacgtttctgttatagtttatgccattcttaaaaatagcccaatagcatatagaatggatatcgaggggagtgctcaaaatggcttaaaagagttatttttagacagcctaaaaagaaatattattgataatcatgagcttggtgttttatccctttcgtcggcggatgaaagaaataatgttatttatcattacgatattgaatggccagacgagttaacttccatgcaaaatatgcttggacagcaaggagagcctgtttttgatttcaacgtgcaaaatattgaagatattagagtgttgttaatttgcattggtaatgctcaacaacaaattatactttataaaacaatggccccagtcaatattttctctcgcactggtttttttctaaaaaaatccgcaacaagacttgaagaaataaaggatgacttttttcgagttagtgataactttcaaattatcaaagtcgaaaacaatttatatgtaatagaccttaaattaatagagaaaatgttttgttttcatgatgttatcaaaaaagaagccatgcttggcactgagagatcccctcataatttccccaaagcgtaa

SEQ ID NO: 33780 - DNA, 603 bp, Escherichia coli
atgagagatgatccaggtaaagtaaaggagtatgtaaggcgtaaagttgatttgtatattttatcattagctattttgttttgtttttttatttttatcacaataaagctccctgtttgtcttggtgcgcaatgtaagtctgttggctggcttttgttattgaaaaacaatattgtcccattaatctgtttagggttgcttttatattgctggattgcctacaaaagatttaaatatgacacaaacaaaagtgtagaactcccaatggaaataacaaaaattgaaaaaataaactatgaacatcttacttttttagctacgtatattatcccattgattacatttgattttgaaaaagaaagatatgtaatcgttttggcggttctcttgataataatgggggtgatttatattaaaacggatttgttttacgccaacccctccctggctttattgggatttaatatttataaattgaacgttagtataacaggtggagttaataaatcagggataatattgattacgagacggcagttaaaagaaaatgacatggttagctatatagtgcttgatgaaagagtttactattctggagattaa

SEQ ID NO: 33781 - DNA, 1125 bp, Escherichia coli
atgaaaaaagaaatatttattgccgctattatttttcatttactatctaaaggtgctcttgccgaagagttcaactacagctttattcgtggagggagtaaggatattcctgatgttttaaacagcaataaagaaaacgtaccgggtaaatatgttgttgatgttgttttcaatggttctaaaatcgcgtcatctactgagatgagcatcgcaaaagaggatgctgaggggatatgtctttctgatgaatggctaactgaaaacggcattataattaataaagatttttataaaaatgtttataattctgcacgccagtgctatttgctgggtaatgaggcgaacagtaaagtcgcgtttgatcaatcgttgcaagaagtatctattgatttgccacaggcaggcttccaggacgcagcaaaagatggtggtgtgtgggactatggtagtaacggttttaaaatagcttatgacgttaatactgcaaaaaatagcaaccaggaaagaaccacctacagtagtattgatggccaggtgaatctgggcgaatgggtgttattgggtagggggtatgcttaccagggcgaaaatttcgatactaataacctgttactgacgcgggcaatcaaatcactgaaatccgatttgcaactgggcaagacacagctttataactcattgaataatggttttaccttttacggtgctcagcttaaatcgaatcaggatatgtatccgtggaactctcgtgcctattcgccggtaattaatggtattgcgcgaacccatgccagggtaaccattgagcagagtggttataccttaaaatctattgtcgtgcctccgggaccatttgtgatcaacgatcttaacggcgtttactctggcgatttgatcatgaaaatctatgaagaggatggctccgttcgtgaacagcgtttccctgtcgcagtgttgcctaatttgttaagaccgggaacgtataactacgccctcgccatgggtagcaaagttaaccaagataatggcgaacgggataaagaaagtctgtttgcccaaatgagttatgactatggattcgagccttttacactcaatagctcggtttggagccatgtcttttag

SEQ ID NO: 33782 - DNA, 1101 bp, Escherichia coli
atgatgccgtccgcctccccaaaacaacgtgtactgattgtgggcgccaaatttggcgaaatgtacctgaatgcctttatgcagcccccggaggggctggaactggtcggcctgctggcgcagggaagcgcccgttcaagagagctggctcatgcgtttggcattccgctgtatacctcgccggaacagataaccaggatgccggatatcgcctgtattgtcgtgcgttcgaccgtcgccggaggaaccggtacgcagcttgccagacactttctgacgcgcggcgtacacgtcattcaggagcatcccctccacccggatgacatcagttccttacaaacgctggcgcaggaacagggctgctgctattgggtaaacacgttttatccgcatacgcgcgcgggacgcacatggcttcgcgatgcgcagcagctgcgtcgctgcctggctaagacgccgccggtagtccacgccaccaccagccgacagttgctctactccactctggatttgttgttgctggctctgggcgttgatgccgccgccgtggagtgcgacgtggttggcagctttagcgattttcactgtctgagactcttctggccggagggagaagcctgcctgctgcttcagcgctatctcgatcctgacgatccagatatgcatagccttatcatgcaccgcctgctgctgggctggccggaaggtcatctttcgctggaggcgagctacggccccgtcatttggtcatccagtctgtatgtcgcagaccatcagcagaacccccacagtctctggcgcagaccggagatcctgcgcgatctgccgggtctgacgcgcagcgcggcgcccctgagctggcgcgactgctgcgaaaccgtcgggccggagggcgtcagctggttgctacaccagttgcgcagcaatctggcgggcgaacatccaccagcggcctgccaaagcgtacatcagatcgcgttatcacgtttatggcagcagattttacgtaagaccggcaatgcggagatcagacgcctgacgccgccgcaccacgaccggttagccggtttctacaacgatgatgataaggaggcgctgtga

SEQ ID NO: 33783 - DNA, 1335 bp, Escherichia coli; identical to SEQ ID NO: 22384

SEQ ID NO: 33784 - DNA, 345 bp, Escherichia coli
atgaaaaattataaagggaaattagaaaggacgaacgaaaaaaccattgagaattatatctacgctgacgaaaaagaatggagatatgtaccgcatccgtttgttggcgatttatggcctagcctaaatttagagcgagtggtggaacctaaccagaaggccgtcttaagtaaaaaattctctgaatttggcattggtttttctttcgatgatattaaatatatacttatacctgatgatagccacgtttccaatttgataaattgccttatgagtataagaaattatgatccttatataataagtaaagttttaacgatggataaagtaaaacaggatttctaa

SEQ ID NO: 33785 - DNA, 345 bp, Escherichia coli
atggtccaaaactatgaaatgattgtgaaagggatccgcaattttgagaataaagttacggtaactttagcattacaggacaaagaacgctttgacggtgaaatttttgacctggacatctcgctggaccgtgttgaaggtgccgcgctggagttttatgaggcagcagccagaaggagcatcagacaggtcttcctggatgttgctgccgggttatgtggaggggatgagcagtcgccggaaaagcgccccataattttagaggcgcagagtgtgtggataacctacaaaggaaaactgccgggaagaattactggttcactgaagactccgccgaaatggtaa

SEQ ID NO: 33786 - DNA, 741 bp, Escherichia coli
atgaaaaacattacgtcaggtggtgttctggcaagagtcagcagatttgtgccgcaggatgcaatccctccgtaccgtacggtggcggagtggcgggaatggcagcttgctgaagggcgtaagcgcagcgaggaggttaatcgtctgaatcatcagacgcgggttgaaaaaattattaaccgctccggtatccagctgcttcaccggaagtgtacgttcggtaactaccgggtgcagaacgatggtcagcgccatgccctgagtcaggcgaaatccattgcggcagagctggaaggcggctgtacgaattttgttttcagtggcaggcctggcacaggaaaaaaccacctggcggcggctattggcaaccaccttctggcgaaaggtcgcagtgtgattgtgataacagtggcggatgtgatgctggcgttacatggcagctacgacaacaaaaactcgggcgaaaaatttttgcagggattgtgtggcgttgacctgctggtactggatgaaattggcatgcaacgggatacgcgtaatgagcaggtcacgctgaatcagattgttgaccgcagaacggcatcgttactcagtgtggggatgctgacaaatcttaaccatgcagcgatgaatacacttctcggcgagcgggtgatggaccgcatgtccatgaacggtggtcgctgggtgacgtttaactgggagagctggcgtccgaacgtcagccagcacaggaactga

SEQ ID NO: 33787 - DNA, 771 bp, Escherichia coli
atggaaaccgtattgcatgcactgaaagcgatgggtaaagccaattctgttgaactggcggcgcggcttgatatcagccgtgaagaagttctcaacgaactgtgggaactcaaagaaaatggcgttgttgataaaacgggtcacacctggtttctggctggtgaaggtgaatccggggtaaccgaagaacagccagcacagtctgaagtaccggatgtgctgaccggggaggtcgaacaaaaagttaccgcggacatgatgattgagtttatctgtcaggatggggctaaaacgtgtgaggaactggcggataagttcggtgttagcattcgcaaggttgcttccacgttggcggtcgtaacagcaacggggcgcctggcacgcgtaaatcagaacggtaaatttcgttactgcataccgggcgctgatttaccggcagagccggaagctgcatccgtagcggaaacggatggtaaagccattcctcagccagcaggtattgcgttacctgtccgggaagcggaaacacaggaagaaataaaaactgaaagtgtggcggtcacagtgcagtcacagccgtcgttcaccagaaaacatctggatggtctgattttaccatcgctgcatgtggctaaccgcgagctgcgccgggcaaaaggtcaggttcagaagtgggagcgagtctgcgccgcgctgcgggagctgaacaagcaccgggatattgttcgacagattgtcgattcatccggtcgtattgtgtcggaaaagtga

SEQ ID NO: 33788 - DNA, 333 bp, Escherichia coli; identical to SEQ ID NO: 12755

SEQ ID NO: 33789 - DNA, 423 bp, Escherichia coli
atgttcctgaaaaccgaatcatttgaacataacggtgtgaccgtcacgctttctgaactgtcagccctgcagcgtattgagcatctcgccctgatgaaacggcaggcagaacaggcggagtcagacagcaaccggaagtttactgtggaagacgccatcagaaccggcgcgtttctggtggcgatgtccctgtggcataaccatccgcagaagacgcagatgccgtccatgaatgaagccgttaaacagattgagcaggaagtgcttaccacctggcccacggaggcaatttctcatgctgaaaacgtggtgtaccggctgtctggtatgtatgagtttgttgtgaataatacccctgaacagacagaggacgccgggcctgcagagcctgtttctgcgggaaagtgttcgacggtgagctga

SEQ ID NO: 33790 - DNA, 291 bp, Escherichia coli
atggcagaagatcgcagcacggtaacagcggcaaccggtatgaccgtgacgccagccagcgcttccgtagtgaaagggaagagcaccacgctgaccgtggcattccagccggaaggcgcaaccgacaagagcttccgtgcggtgtcagcggataaaacaaaagccaccgtgtcggtcagtggtatgaccatcaccgtgaatggcgttgctgcaggtaaggtcaacattccggtcgtatccggtaatggtgagtttgctgcggttgcagaaatcaccgtcaccgccagttaa

SEQ ID NO: 33791 - DNA, 399 bp, Escherichia coli; identical to SEQ ID NO: 22703

SEQ ID NO: 33792 - DNA, 351 bp, Escherichia coli; identical to SEQ ID NO: 3610

SEQ ID NO: 33793 - DNA, 189 bp, Escherichia coli; identical to SEQ ID NO: 24042

SEQ ID NO: 33794 - DNA, 192 bp, Escherichia coli
atgaatacaacatttgcactcgttctgacagtttatcttgtttccggcgaatctcttgagctggtgactggcttatacggttcaatgaaagaatgcatggctgcagcagcagaacaaaaaattcccggtaactgttatccggtagataaagctactcacactaataataacgaaataccggcaggactttaa

SEQ ID NO: 33795 - DNA, 900 bp, Escherichia coli
atgagtccttctagcgtaaaggaatttacgattgctaattcattaacaaaacgcttcaacatctggcgacaaacgctgctgaacaccactttgcagggcacagaagaaatgattgatacgagggaaggttatcacccctatcaacttgcccaggttcttgaaagcgcaattagtgaccagatcggctggatcaccgcctggcgtatcggtcgctatgcgaataacagtcttcttgtacaacctttttatattaaggcgccacaactggataaagatggacttgataaagaggcccaagcgcgcgaagaacaaatggaaaatatcgaaaaagagcgggtgaacaagcagaaaggcaatggcacacttgatgaaagtaatcagggcatacctatccttgacccgacgaacgctcagtaccagttgcgagaggcagcccgagaatttcagagcgattataaaggatggacgcgcgatattaacggcagcgtcacggagagagccattcagattcttgtggatgtcattcctaaatatccggtgtatctgattaatggcgatgatgaagcaaaagaatatcagcaaattaaggctatgggagacggactctatccacaattttttattgattcactgggaacgggaacgcgaactcagccctgcgctgaattactggctctctatgatgaccaggttcacgactcccgcgcctggtttatgcaaagttcgctgggtggacgcgaaccctggggcggttattttcgctaccgcatgatttacttcggtgatgaggctaataaagagctgaagctaatctctgcagatggcgaagttgttggcgatcagcccacatccaaccgggtcatttattggatggaatcgaaaacggtgagccgaggttaa

SEQ ID NO: 33796 - DNA, 585 bp, Escherichia coli
atgctgctttatccgggggtgatgatcagccgtacccgttcgcgcggcggtctgatgccgacctggggtgattcccagcgttattccatcgattactccagcaccgcttggggctcggatgtggagtttatcgtgatgcaggcgcaaaacgcctggatccgcacgttatatgaccgccaccgttttgtggcccgtggcaacctggggtggatcgaaacagacgattttaaccgcgtaccgccagatttgcgcttcttcgccgggggggatcgcagcatccgcggctataaatacaaatctatcgcgccgaaggatgatgacggtaagctgatcggcgcctcgaaaatggccaccggatcgctggaatatcaatacaacgtgacgggtaaatggtggggcgcggtctttgtcgatagcggtgaggccgtgagcgatatccgccgcagtgatttcaaaaccggtaccggcgtcggggtgcgctggcaatcaccggttggcccgatcaaattcgatctggccgttccggtcggcgataaagacgagcacggattacagttttacatcggtttggggcctgaattatga

SEQ ID NO: 33797 - DNA, 4725 bp, Escherichia coli
atgagtttatggaagaagataagcctcggcgtactggtgtttatcctgttagtgctggggacggttatttttctcgtcgggacgacgagcgggttacacctgctgtttaaggccgccaaccgttgggttccgggactggaaatcggccaggtgatcggcggctggcgtgatttatcgctgaaaaacattcgttacgatcagccgggtatcgcggtgaatgccggagagttccatctggcggtaaaactgggctgcctgcgtgacagtagcctgtgcgtgaacgatatctcgctaaaagatatcaatgtggtcatcgataccaaaaagatgccacctgccgcgccggtgaaagaagaggataacgggccgttaaaccttttcacgccgtaccccattacgttaagccgcgtagccctcaataacgtcaatattaatattgatgacacgaccgtctccgtcatgaacttctcctctgccctgaactgggaagagaagaacctgaccctgaaacccacctcgctgagcggcctgctaattgccctgccgaaagtagcgaaggtggcgcaggaacaggtggtggagccgaaggttgagaatccgaaaccggatgaactgccgctgggcgaatcccttaagcaactcttcgccaaaccgctgctgccgcagatgacggatgtgcatctgccgctcaatctcaatattgaagaatttcacggtgagcagcttcgcttaaccggtgacaccgatatcacggtcagcaatatgctgctcaaagtgagcagcattgacggcaatatgaagcttgatgcgttcgatatcgattcaaatcagggcacgcttaatgccacgggcacggcgacattgcgggataactggccggtggatatcaccctcaacagcaccctgaatgtcgatccgatgaaaggcgagaaagtgaagctcaaagtcggcggcgaggtgcgcaaacaactggagtttggcgtcaacctgtccggcccggtggatattgttctacgtgggcaaacacagcttgccgaggcggggctgccgctcaatctggacatcaccagcgagcagctctactggccgtttaccggtgaaaaacagtatcaggccgacgaccttaagctcaagctgaccggtaaaatgactgactacacactgtcgttccgcacggcggtaaagggccaggacgtaccaccagccaccatcactctggacggtaaaggtaacgagcagcaaatcagcatcgacaagctgagcgtcgccgcgctggaagggaaaaccgaactcaaagccttgctcgactggcagcaggcgattagctggcgcggagagttaacgctggacggtatcaacaccgcaaaaaccttcccggactggcctgcaaaactgaacgggctggcgaaaatgcgcggcagtctctacggcggaacctggcagcttgatatcccggagctgaaactcgccgggaacgtgaaacaaaataaagtcagcgttgacgggcagcttaaaggcaacagctatatgcagtggaccattccggggctacatctggaactgggacgcaacaaagccgatgtcaaaggcgagctgggagtaaaagatcttaacctggatgccaacatcgacgcgccaggtctggataacgcactgccagggctgggcggtacggctaaagggctggtgaatattcgcggtacggtggatgcgccacaggtaatggcggatatcaccgccagcaatctgcgctggcaagcgctgcgtgtggcccgtgtcctggtgaaaggggatgtgaaatcgaccgatcagcttgccggtacgatgaatgtgcgggttgaacgcctctctcagcctggggtgaatatcagcctggcaacgcttgctgccaaaggcagtgaaaagcagcacgaacttgagttgcgggtgcagggtgagccggtcgccgggcagttaaaactggccgggagttttgatcgcaacgaacagcgctggaagggcacccttagcgatacacgcttcaccacgcccgtcgggctagttgccctgaaccgtgaaatcgcgctggattaccgcaatcaggaacagaagatcagtattgggccacactgctggaccaacccgaatgcggagctttgcgtgccgcagacgatcgatgccggggcgcaggggcgtgcggtggtcaatctgaaccgcttcgacctggcgatgctgaaaccctttatgccggataccacccaggccagcggcacattcagcggtaaggctgatgtctcgtgggatgccaccaaagaaggcttgccgcagggtgaagtgacgctatccgggcgtaacgtcaaagtgacccaggtagtgaacgatgcaccgctgccggtcgctttcgaaacactgaaccttaacgcgaagttgcagaataatcgtgcggatttaggctggctgatccgtctgaccaataacggacagtttgacgggcaggtgcaggtcaccgatccccaggggcgacgtaaccttggcggtaacgtcaatatccgcaatttctcgctggcgatggctaacgccatctttacgcgcggcgagaaagcggcgggtacgctgaacgctaacttacggctcggcgggaatctgcaaagcccgcagttgttcgggcagatgcagctcaacggtgtggatgtggaaggtaacttcatgccgttcgatatgcagcccagccaactggcaatgaacttcaatggcaaggccaagagctttctcacgcaggccaagaagatcgcctggcagcagagcaacattgcgtcgcgatcctcggcatcatcgtcgcagcgcgcccggtcgcagtcatcggcgaagagcggcaaggcatcacggacgagcggttggccgggcctgaaacgcggacgcggtgcggcattcgtgcgcgcccgcacgctctcaggcggatggaagcatagcagtcccggtcggcgccgcgtcgtcgtcaaaacccgctacgtccagggcgcgggaaagaacggcaaatccgccgcccatcttcgctacatccagcgcgacggcacctcgcgcgacggcgagcgcggccagctctattcggcgaccgaagaccgcgccgacggcgctgccttcatcgagcgcggcgcggacgatcgccaccagttccgcttcatcgtttcgcccgaggacggcgcggacctttcggacctcaccgcctatacccgcgacctcatggcccaggtcgaaaccgatctcggcacccagctcgattgggtcgcggtcaatcaccacaacaccggccatccccatgtccatgtcatcatgcgcggcacggacgagctgggtgaaaaccttgtcatcaacggcgactatctcgccaacggcatccgcgagcgggcgagcgatcttacgacgctcgaactcggccccgtcaccgagatcgagcagagccgcaagctctcggccgagatcggtcaggaccgcttcacccgcatcgaccgcgccatgaccgaggaagcggaggaccgcttcctcgacctgcgtcatgagccggccgatcatcgccgccagttcgaccgcacgctgcgcctgcgccgtctcggcaagctggagaagatgggcctcgccaccgagcgtgcaaccggcgtctgggaattgagcgagcggatggaacaggtgctgcgcgagttgggtgaacgcggcgacatcatccgcaatatggacaaggcgctcaaggccgacgggctggagcgagatccgatgaccttccagattcatgacgttgcgccggaagtcccgatcaccggccgcgtcctcgacaaatatctgaccgacgagcttggcgagaacctgaccatcgtggtcgatggtatcgacgggcgcacgcaccatgtcgcaggcatcgacgccgcccgcatcgaggacgcccggatcggcagcgtcatcgagatcggcccggccgagacagcgagccgtccatccgaccgcaccatcgccagcatctccgagggcggcatttatcggccgagccgccatcgcgaacaggcgaggttcgaaggccgtgttccggggggcgactatgagggctacgtcgatgctcatgtgcgccggctcgaagctttgcgccgccccggaatcgtcgagcggatcgacgtcgaccagtggcgcatccccgaagatctcgagagccgcgccgcagccttcgatgccggccgcaaccggcaggccagcatccgcgtcctatccatcttcaatctggaaaaccagatcggcgcggaaggatcgacctggctcgatcggcggctgcttgcgagtgacgcatcggatctcgcaccggccggattcggtcatgaggtgcgcgaggcgatggaccgccgccgtgagcatcatatcgagcagggcgacgccacacgccagcaggacggccgagtctcctatcggagcaaccttctcgccaccctgcgcgagcgcgaagttgcccatgcaggcgctgagatggcagcgaacaagacgctgccgtttcgggtggcaacggacggcgagaccgttagcggcaggttcaccgggaccgtgcaactatcgagcggcaagttcgccgtcgtggaaaagagccacgagttcacgcttgtcccctggcggccggtcatcgaccgccagctcggccgcgaggttatgggcatcgtgcagggcggatcggtgtcgtggatgttagggcgtcagaggggtctcgctatttag

SEQ ID NO: 33798 - DNA, 939 bp, Escherichia coli
atgaagccgcgatttacccgagaagctgtaatttctgccattacgcgcgatttcgatagaccctcggaatgcagacccattaccgaaggtgaagagtcgcagaccttcgccatttgtgttggaagcgaggacttcgtgctgcgcgtgaaccgcactgcagctggatttcacaaagacgccttctgccatagccgtttcgcctcccgcgatctcccgatccctgaggtcgtcgcaataggcgagattgaagaccatacgtggtgcgtatcgcggcgagcactaggcgtcacgttacaggacttagccatcgagactctgcccacagtggtcggcccagtctcgcaggtcatgtcggccatggctgaggcgatacttgatggaaccgagggcttcggcccgttcgatccgagcggcatcggacggcacgcaagctggcaggacttcatagctgccatcactgacgaagcgcattacgattggaagcggatcgaggccgttgtggatcgtcggcagatcgatggacattttcgcttgcttagcgaattcatgccacggtgcgccgatgttcgccggctcgtacatggcgattttggttccaataacgtattgacagaccaggggcgtatcaccgctgtaatcgattggagcgaagccctattcggcgatccgctctatgacgtggccaacattttcttctggcgcccctggcttgcctgcatggaggcgcaagcgcgccacatcgagacgcgacaccctgagttcctgcaaaacgctgaggccctgcgctgttaccagctccacattgggcttgttcagatcttcgagagtgcaaaagcaggggatgccgcagatctcgcgtgggcgatggcgcgctgtgaggagattgccacgcaggatgagaaagtgagaagcgcttcgacgggctgccaagaaacttga

SEQ ID NO: 33799 - DNA, 714 bp, Escherichia coli
atgaattcaaaagctgtcattatcgtgacctctcatgccgaccttggagatacaggccgtataagcgggttttggtttaatgaaatgagcgctccatactgggcgctgacagatgctggctttgacgtggatatcgcgtcaccaaaaggcggggcagctccattcgatccacacggcatatccgacgaagagaaatcggccgacacggacagatttcttcgatccgatgtcgagcaacgcaaaatcaatgccacactcgctgttcatcagctcaaagctcatgattacgctgtcaccgtgtttccaggcggctttggcacaatgtgggatctggcacaatcagaacaggtcgccgcatttgtaagcgccgcctacgagaatggcgcgattctctgtgccatctgtcacggtcaggctggcctgatcggcgctaaaaaaccagatggaacgccgctgaccaaaggtatgcggttatgctgcccgcccaactccgaagaagaggctaacggcgtcgcctcgatcgttccctatctgctcgaaaccgaatttcggaagcttggagctctgttcgagtgtgggccggactattcctctaaagtcgtgagagatggccgactgatcaccgggcagaatggccaatcagtagatgctgcggttcgcgagttgctgcgtgccatcacagaactgcagcccgcaccggcaatgaaatcctga

SEQ ID NO: 33800 - DNA, 1233 bp, Escherichia coli
atgacttgcgaagcgtcacctcggtcgagcccaactcgcgccactcagtcgccggagtccgcgtcgcgctttgccatttttgttttgctctcagctctgtcggtggtgccagtcaacttgatagcgcctgcactgcctacaatggcggtggaactgctttccgatcctgcggtgataagcctcgctgttgcgggttacgccgttgtcaccgctctggttgaactcatctcgggcgcgatttcagatcggtacgggagacggcccgttgcgctggtctccatggcaatcttcattctcgcctctattggctgtgcagcgtctgccaatatcatgaccttcctgttcttccgagcactgcaggccgccattgctgcctgcttttctgttgcgcttgtcggaatcaaggaaacatcaagcgatcgcgacggcgcgagccgaatgggatacgccgcaatggcatgggcgctggctccgatgctcggccctaccgttggcggggcactcgatcagttcctgggatggcgcgcgatcttcatcacccttgctctctgcggaacggcaatgcttctactgtcgctgagagcgctcggggaaaccgcgccctcgctcacttggcgcgagcgcagctatctcaaatcttatgcgctgcttttggggtcagtgcggttttgggcctatgcagcctgcatggccttttcaacggccacgctctacattttcctggtgggagcccccctggtcatcggcggctcgagtgccgttctggggctgtatatggggctcgtcccgacggggttcatcttcggcagctatttgacagggcgctttgcttccagattcccacgaggaaccgctttgatcgccgcgcgggctttgacctgtgccggattgctggtggggctgatgctgaccacgatgggaaacacggatgccccggccttcttcctgccgtgcatgttcattggcattgggaacggcttgaccttaccgctggcgaatatgggcgcaatgtcattgcatagcgatctttccggcacggcagccggcttggcggcagccatgcaaatgggcggcggcgcggtcattgtttctattgctggaattctcctgcccgaggcagacacccatgccctattggccatgatgctgagcgtcgcgctgctcgccctgttcgctgcaaccgtcgtggcactcctggagcgaccgctgacaacagcacatagacctggatga

SEQ ID NO: 33801 - DNA, 537 bp, Escherichia coli
atgaatcatacaggcgaaatactcatcctgacgggcactcctggttccggtaaaaccacgacggcgcagactctcgccggagagcccggatcgtcgaaggtccaccttcattccgacgacttctggcatttcatcaagaatggagcgatccaaccctatctgccggaagcgcatgaccagaacaccgttgttctcgacgtgctcgcgcaggccgccgaaggctatgccaggggcggctattttgtcatcgtggatgggattgtcggaccgtggttcctcgctccattcaagaaaatcccggtgcctgttcactacgtcgttctccgcccagctctcgacgtggccattcggcgctgccaggagcgaggcggcaacacgttgacggatcctgggccaattacggaactccacaagcaactctcatcgctcggtcagcttgaaaggcatgccctgccgatagatgcgtatactcgggaggaaacccttgccgcggtcatccaggctgtacgaagcggaacgtatctcctgacggaatga

SEQ ID NO: 33802 - DNA, 363 bp, Escherichia coli
atgagtcgcatcttcggtcaagatctggacgatcccgagcacgacacaaggcaccgtgccatagaaggactgttctgggagatagccgagcgcatactcgtacagggcgtcgatattgtattgcactttggttcctggtctcggactgagcgcgacgagtttcgcaggcgtgctgtgcaatcgaaagccaacactgtcattcattatgtgccgacgcccgtcgaagagatcttaacccggttggcggcccggaatgcggcgcttccggccacagctttccgcatctctgaggagatgattttagaatgggtgcaggtgtttgagccacctacggatgatgaactcgctgcatcggtaacttag

SEQ ID NO: 33803 - DNA, 1362 bp, Escherichia coli
gtgcaaagtgacagagccaaatttacatctggttcgacgatgcaacatgttgtcgtcatgtcgataacaagtgctgcaggggctctcgcggtcttccttgtcgatgctctaagcctcttctacatttcgatgctagagatagaggaattcacagccgcagtgggatttgcatcggcggtccagtttttcgccacctccctctcaattggtctctcggttgcgacgacggcaatggtctcccaagccttgggtcgcggaagccaagaagaagctgcagaggcagggggcgtgtcaatgacactgagcgtcttgcctgcaatcctcataacgattctgtccttgctcaaactggattatatcctcgcgctccttggcgcttctggaaacaccagcaggttcgctggggactttctgacaatcacgctcgcttcaacaccgatcacagtgctcggcatgtgcgcgacgggaattatacgtgctgcaggcgacgtccgtcgtgccacgaaggcgaagatctggtcatgcttgattgcggcggttgtcgacccactcatgattttcggcatgaattgcgggcttgagggagctgccatcgccaccgtcatctctcgcgctgcgctgcttctgctcgcggctcatggagccatacgggttcacaagctggttgcaccgccctccttcgaaatgtcggttcgccttctgcgccagtttcttggagtttcggtgcctgcgagtgtcgcgcaactcgccaccccgatcagcagcgcatacatgacccatacaatggcgcggttcggggatggagcagttgctggctgggcgattatcgggcggttgataccgatcgcctttggagctcttttcgcaatcgggggagcggtgtctccgatcgtcggtcagaactacggcgcccaacggagagacaggatacgctctacggtacggagcgcgctgtccctgagtgccttgtacgtcgcactcgtatggttgattatagcgctttgcgccgaacaactggcggcctttttcagtgcggaaggcaccgctcggaaattagttattttctactgccgtttcgcagcagtgttcttcttcttcaacggcgcactgttcatcacaaccgcggcgttttccagtatgaaacgcgcgggaatggccatgctcctcagctggcttgcatcgacggttggtgtagtcgttccagtgacgctaggtgctcatcattatgacgcagaaggcgctatccttggatgggcagtcggtagcgcattgtcgggaatcgctgcgatctatgccttgcagcgcctgataaaggtcgagtatccgtccgctggtgcgcaggactcatggggtgatcaatga

SEQ ID NO: 33804 - DNA, 636 bp, Escherichia coli
atgaagagcgtatgcgtcttgtttgatttggacgggacactggttgacagcgaggcaatatgtaatcaagcgcttctggacctgctacccgatttgaacaagcccattggagatttgataaaatactatcgaggaaaaaagctgtccgtgatcttcaatgaaattgaagcgtctataggtcgaaggcttccggtagattttgaacaagcttatagatcacgcgtttcagagcttttcgccattgaccttgaaccgattcctggtgtcgtagctatgctcgacagtttgccgctccctaagtgtgtagtatcgaacggcccggctcacaagattcaccaggccttgaaaaggaccgggatagacggacacttcatcggtcgtgtattcagcgcctatgatgtcgggctttggaagcctgatcctggtcttctcttacacgcagcgagaatgataggagctgcgccgaacaggtgtgcggttgtcgaagacagcgaggttggtatcgaggccgcactgcaagctggaatgaaggctttccactatgtcccagacaaagacgcggcatgccacaaaggctctgtacctttcttcgagatgtctcaattaaacgaacttctcaagcaatcacttcaatga

SEQ ID NO: 33805 - DNA, 687 bp, Escherichia coli
atgctgcggtgcgaaggctggacggtgaatgccaagcgcgtcgagcgcatctggcggcgggaggggcttaaggttccccagaagcaaccgaaaagaggacgtctctggctgaataacggatcgtgcatccggcttcgaccggagcaccccaaccatgtctggtcctatgacttcgtcgagggccgcacccacaatggcaggaaattccgcatgctcaacatcatcgacgagttcacccgggaatgcctggcaatccgcatcgatcgcaagctcaactccaccgacgtcattgatgtcttgtcggacctgttcatcctgcgcggcgtgccgggtcatgttcgttccgacaacggcccggagttcatcgccaaggccgtgcgggagtggattgctgctgtcggtgcgaagaccgcattcatcgaaccaggaagcccatgggagaacggctactgcgagagcttcaactcgaagcttcgcgacgaactgctcaacggtgaaatcttctatagcctcgccgaggcaaaggtcatcatcgaagcttggcgacgctactacaacaccgagcggccgcactcatcgctcggatataaaccgccggcaccgcaggccaccatctggcctgcgccgccgcccggatcgacaccgccatctgcccaggccatggccgaaaagccgatcatacattaa

SEQ ID NO: 33806 - DNA, 279 bp, Escherichia coli
atgccccagaagaagcacaagcccgaagagattgtcgcaaagctgcgccaggtcgatgttctgttgtctcagggccgatctgttggcgaagcggttcgtttgatcggcgtgacgcagttcacctattaccgctggcgcaaggagttcggtggcctgaagggtgaccaggtaaagcggctgaaggaccttgagaaagagaacgagcggcttcgcaaggcggtgtcggacctgacgctcgagaaactgattttgaaggaggctgcctcgggaaacttctga

SEQ ID NO: 33807 - DNA, 675 bp, Escherichia coli
atggcaggtgtatcgaacagcagctgcaagcatcatccatgcgtggacaaagcgatcagtcatgttcgcagccgatcagaaggctctccagttcccacgggattgccggtcaccctgaacttccatcccgatatcctgcatcggggccggttgatgattgaggctctcgcacaggagggaatctatcgctcgcagttcgaaaccggcacgagcaatggcggcatgacagctcaccctagcggcgaccgttggcggtgggaaagcgagatgttcggcactgcctatgataacgtggccccaaacctgcgcccaaaatacggagctctgaactatctcagaagtgtgacaggcggttcgccgcgttttggctcttcacacctgcggctgcgcccccacgttctggctcgcaccacgttctgctatcctgatagctacctagatccggttgatttcggtgtagccgaccgcatgagcctcattgccctggcagaaaaggggcgagctgcgatggacgtgctggacagctacatcgaagcccacgtgcatggcccgctgatcctggcggaggacgtggaggccatggtcctggattcgtgctaccgcaacacacccatagaagcggtggcagcgacactgccctttgctctcgaatggcatcctggtctgcccccctga

SEQ ID NO: 33808 - DNA, 681 bp, Escherichia coli
atgccgcaacggcttaaagacgatgttcgccagaacatcctaaggtccgccgcccacgtttttgccgagaagggttatggggcggccacgctcgccgaggtggcgcaaggtgcgcatgtcacgaccagcaatatctacaagtattttcctaacaaggagggattgctaaacgcccttgtgacaccgactattgcttctcgcctactgcgccttgtgcgtgctcgcatccgcgaactggcaatccgcgaaaattggagttcggggcaggcggatcaatcgcggcccgcccaagaattgctctccttctggatcgagcatcggctggccgttctcattcttttgcgtggtgccgatggtacacgttttgaccacatccgcgatgtcctgatccgtgagatggagcgcctttcattgcgcttccttgagcgtcagagccatggcgagacggcttctcctgaggttcgcttcgtgctcgttcgactcttcaccaacacaattgatatgattgccgatatcctcgaaaacttcgagaaccgcgacgggatccgagcggctttcgctgccttctggacttaccagctcgccggactccaagccatgctccatcctgagaaacccggacgaacgccttcgagtgctgtggaccgccgcggctggacaaccgacgaccgcacggaatga

SEQ ID NO: 33809 - DNA, 1437 bp, Escherichia coli
atgtcagtttcagccacgtcacttgccagtctggatgcttgtgcccaggtcgagttggtgcgcacaggagaagtctcggccttggaactgaccgatgccgctatcgaacgtatcgaacgcctaaacccgcttctcaacgcggtggtatcgtttgactttgaccaagcccgtcgccgtgcccgcgtggtctccaaggacgcattgtttggtggcgtgcccacactgatcaaggatgtcctaccctatccagggcttccgctcggaatgggtgggagattcctgccgcagtttcccatgccgagcggctccccctatacggacgcactggatgcggcaggtcttgtcgtgctgggaaaaagtgcgacctctgaattcgctctcctgggcacaaccgagcccgtcggcggcaaacccgtgcgcaatccatggaatttgagcctctcgtcaggcgggtcgtctggtggcgccgttgccgcggtcgcatctggcatggtgccgatcgcgcatgcatccgacggtggcggctcgatccgtggcccgtcctcattttgcgggctcttcggcttcaaaccaagtcgaggacgtacccaatccaatggcctgcccgagagtagtccgagcgtgcagttcctcagcgaacattgcgtcagtcgctcagtacgcgacagcctcgcttggcttcaggcgacggagcgacaagacaaccatcagcacatgccgtcgcttgatgagcttcgggccaaccgaaggccgtttaggatcggcgtctatcgcaacgatggtttcggcaatgcccctgatcctgatgctgcggccggcctcgagctggccatgcggacatgcgaggcgctgggacattcggtcgtcgaaataagttcgcccccaatagacacgaaggcggcaagtgaagctttcttcaccctttcggcaagcatggttgcgggcgggctggaattcttccgcagcatgctgggcagcgcctataacgaggataacctcgagccctacacacgcgaattggcaaagcgagctcgagccatgccgcaggaagcttgcatcagggccctcgaaacgctttcgtccgcggcggcggtcgctaaaggaaccatggcgggttttgatgtcctgctctgcccgacggtcggctttccggcattcgaacttggcagatatacaccggacaaagacgtggaagagctcaacgcttttatcgtgagagtggcgagttacacatttccggcatcgctcgccggatggccggcgatgtcgatgccgctatattggacgcacgccggtttgccgctgggcagccacttcagcgcggcaactgggaacgatgccctgctgttctccctggccctgcaactggaagaagcgctgccttggcagccccggttcggttcccttatggatcgcttgtatgccgcaacggcttaa

SEQ ID NO: 33810 - DNA, 741 bp, Escherichia coli
atggcacagaatatctacgacaatcccaacttctttgctggctacagccagttgccgcgacaggttcacgggcttgacggtgcgcccgaatggccggcaatccgggcgatgctgcctgcgctcacgggcaagcgcgtggccgatttagggtgcggcttcggttgggcatcgcgctggatgcgcgcgcaaggtgcggtctcggtgcttggcctcgatctgtcgcagaacatgattgcccgcgctaaagccgatacctcggaccccgccatcgaatatcagatcgcagatctcgagacgctggaactgcctgaggccgctttcgacgtcgtctacagcgctctgacgttccactatgtcaaagacttccggcgcctcacgcgtatgattcataagacgctcgttcccggcggagatctggtctttacggccgagcatccgattttcatggctgcggcgcatccgcattggatcatcgatgaagacggccgcaagacctggccggttaatggctactcacttgagggcgagcgccgcacggattggttcgccaagggcgtgctgaagtatcaccggagcctcggcaccaccctcaatacgctgattgatgctggtttcggattgcggaggatcgaggagttcgccccgacgcgcgaacagattgagcgctcgcctgaactggccgaagagctggagcggccaatgatgctcctggtctcggctcggaagatagaaacacgctag

SEQ ID NO: 33811 - DNA, 597 bp, Escherichia coli
atgcagaattacgtcccgatctcgatgaatacggttgacgccctgatcgtagtcgatgtgcagaatgccttcgtatcaggtccggaggctgttccaggacataaaatgctcatttctgcgattgagctattacttactcaggctaggctcgccaacgcgcctgtgatcttcctccaaaacgatggtcctgtcggtgccaccgatgagccgttccaaccggggtgggcactcttctttcctccgcgaccacacgagaagatcgtacggaaaaagaatgataacgggttcgacggaactgatctgcacactatccttacaggcctcggcatacgaacagtcgcgatgtgcggaatgctctcggatatgtgccttgctgctacagcgcgggcagccatggagcatggttacggcgttttgctgccgcacgacgcgcatgcaacctacgacgttccggccggcccagggtcagaagccgttcccgcagcgatggcggcgcgagcggcagaatggtcgcttggagacgagataaagatttgtgcggcgtcgcatgaagtccgatttgtagcagcgcgctccgacgcgccggccatcttttga

SEQ ID NO: 33812 - DNA, 810 bp, Escherichia coli
atgcaggaagcaacaacagaaatcccgaaacaagcgcgggcggtattggacactgttcgaggcgtcttcgaggacgccttgctggcagtatatctgcatggatcagcggtctccggtggtctgcggccgcagagtgatattgacctccttgtcgtcatcgatcgcccgatgacagaagcgctgcgcaaaagcctgctggccgccttgctgcgggtttccggtcgacatcctgccagtcccggcggcccgcgctgtatcgaggtgatgttattccagaaatctgaactcgccgtgccgggatttccggcgcgggctgacttcatctacggtgagtggttgcgggacgcccttgaagctggcgaacttccgatgcctgtgacagaccctgaaatcaccctggtgttggcgcaggcccggaaagagtctcgccccctgttcggtcccgacgctgccgacttgctgccggaaattcctgcggagcacatccgacatgcgatgcgcgattcactgcctgcgctactcaacggcctgcatggtgatgaacgaaatgttctgctgacgcttgcccggatgtggcacacggcaaccaccgggaagttcattagcaaagacgccgcagcgacatgggcgatgcctcatttgccagagccgctggcggaagtagtggcctgtgcccgtgaggcatatcttggccgagtcaaggatgactggggaaccagccaggctgatgcgcggcagacagctaatcacctataccaacaggtgattactcttctgaagcgcgaggagtcccagttgaactcaacgtag

SEQ ID NO: 33813 - DNA, 1221 bp, Escherichia coli
atgacgtggagaacgaccagaacacttttacagcctcaaaatctggacttcaatgagtttgagattcttacttccgtaattgagggcgcccgaattgtcggcattggcgagggcgctcattttgtcgcggagttttcactggctagagcaagtcttatccgctatttggtcgaaaggcatgattttaatgcgattggtttggaatgtggggcgattcaggcatcccggttatctgaatggctcaactcaacagccggtgctcatgaacttgagcgattttcggataccctgaccttttctgtgtatggctcagtgctgatctggctgaaatcatatctccgcgaatcaggaagaaaactgcagttagtcggaatcgacttacccaacaccctgaacccaagggacgacctagcgcaattggccgaaattatccagctcatcgatcacctcatgaaaccgcacgttgatatgctgactcacttgttggcgtccattgatggccagtcggcggttatttcatcggcaaaatggggggagctagaaacggctcggcaggagaaagctatctcaggggtaaccagattgaagctccgcttggcgtcgcttgcccctgtactgaaaaaacacgtcaacagcgatttgttccgaaaagcctctgatcgaatagagtcgatagagtatacgttggaaaccttgcgtataatgaaaactttcttcgatggtacctctcttgagggagatacttccgtacgtgactcgtatatggcgggcgtagtagatggaatggttcgagcgaatccggatgtgaagataattctgctggcgcacaacaatcatttacaaaaaaccccagtctccttttcaggcgagcttacggctgttcccatggggcagcacctcgcagagagggtgaattaccgtgcgattgcattcacccatcttggacccaccgtgccggaaatgcatttcccatcgcccgacagtcctcttggattctctgttgtgaccacgcctgccgatgcaatccgtgaggatagtatggaacagtatgtcatcgacgcctgtggtacggagaattcatgtctgacattgacagatgcccccatggaagcaaagcgaatgcggtctcaaagcgcctctgtaaaaacgaaattgagcgaggcatttgatgccatcgtctgtgttccaagcgccggcaaggacagcctagttgccctatag

SEQ ID NO: 33814 - DNA, 366 bp, Escherichia coli
atgattgatgtcttaggaccggagaaacgcagacggcgtactacacaggaaaagatcgctattgttcagcagagctttgaaccgggaatgacggtctcccttgttgcccggcaacacggtgtggcagccagccagttatttctctggcgcaagcaataccaggagggaagtcttactgctgtggccgcaggagaacaggtcgttcctgcttctgaacttgctgctgccataaagcagattaaagaactccagcgcctgctcggcaaaaaaacgatggaaaatgaaatccttaaagaagccgttgaatatgggcgtgcaaaaaagtggatagcgcacgcgcccttattgcccggggatggggagtaa

SEQ ID NO: 33815 - DNA, 138 bp, Escherichia coli
atgaattacaatggtaccccccatagaattaactttaaggaagcacaattcaatcagcctgacattcacaaaagtcagtatcaggtagccacaggcaacatcgctattaatactactgtgccattaagtaaaaactga

SEQ ID NO: 33816 - DNA, 1218 bp, Escherichia coli
atggcagtattgacggatactaaagcaaggcatatcaaacctgatgacaaaccattgccccatgggggaattacaggactgactcttcatccttcttcagtaaaagggcggggtaaatgggtttttcgttatgtaagtccggtgacacaaaaaaggcgtaatgctggattgggaacttatcctgaggtcagtattgctgaagctgcacgtgctgcccggataatgcgagagcaacttgctgcaggtgatgacccactggagattaaaaaggctgaagctgaaaaagttgttatcccaacatttgccgatgcagccaggcgtgtacatgctgaattgtcaccgggatgggaaaatccaaagcatgtcaggcagtggttatcgacgcttgaaaattacgcgtttcctcaactgggagcaaaaacgctggattcgattacggctgcggacgtggcagaaacactgcgtccagtctggttaaccttgtcagaaacggcaagccgggttaaacagcgcattcatgttgttatgcagtggggatgggcgcacggtttttgtgtggcaaaccctgttgatgtggttgaccatttgcttcctcagcagacaagaggacgtgatgaacaccaacccgcaatgccctggaggcagttaccgctttttgtggcgaccagtgtgtatacagatgaaccttataatgttacccgggcactgttattaatggtgatacttacagcaacccgctcgggcgaagccaggggaatgcgctgggctgaaattgattttcataagcggatatggactatacccgcagaaagaatgaaagccaggatacagcatcgtgttcctttatcccggcaggccattcacattctggaaaatatacgtggtttgcatgatgaactagtgtttccttctcccagaaagcagcagatcctttcagatatggtgttgacgagttttctgcgtaaaaagaaagccatcagtgatatatcggggcgagttgccacggcacatggttttcgctcaacattcagggactggtgtagtgaacaggggtattcgcgggatctggcggaaagggcgctcgctcatacgctgaaaaataaggttgaggcggcatatcatcgtactgatctactggagcagcgtgtaccgatgatgcaggcatgggcggattatgtgatgtctcaacttgctaaaaacactaaggaattcgcttag

SEQ ID NO: 33817 - DNA, 672 bp, Escherichia coli
atgaagaagaattcttatcttttaagctgcctggccattgccgtctccagtgcctgtcatgctgaagtattaacctacccggatccgctgggttcgtcgcaatcagactttggcggcacaggattgttgcagatgccaaatgcgcgcatcgcaccggaaggtgaattcagcgtcaactaccgggataacgatcaataccggttctactccacctccgtggcgctgttcccatggctggaaggcaccattcgttatacggatgtgcgcacacgcaaatatagccagtgggaagatttcagcggcgatcagtcatacaaagacaaatcattcgattttaaacttcgcctgtgggaagaaggttactggctaccgcaagtggcgtttggtaaacgtgatattgctggtacgggtctgtttgacggtgagtatctggtggccagcaagcaagcggggccatttgatttcaccctcgggatggcatggggctacgccggtaatgcgggcaatattaccaacccgttttgccgggtgagcgataaatattgtcatcgcgcagagtctcacgatgcgggcgatatcagctttagcgatatctttcgtggcccggcttccatctttggcggcattgagtatcaaacgccgtggaatcccctgcgtctgaaactcgaatag

SEQ ID NO: 33818 - DNA, 1257 bp, Escherichia coli
atgtataaaattcaaagcgtcacaattaatggcttttggcagcgattaaactgttcctgctcatttaatgatgatgtaaatattattataggccgaaatggcacgggtaaaacaacctttatgaaccttctgcactcaatattatcccttgatttggacagtattaacaatgctgatttcaatagtgccgaaataaaacttaaagataaaaaaaagacaaaaacaatcaaagtcaaaaaacttgaaagcgatacatctccattttccaaaatagaatatcagctttcatctaaaaaacacacaattcgtttatttaacactgatgatagaagaatatctcttagttatagacgtagagtgcatgatgaaacagaagaactaagaacagaactagcaaaactagtctcgctttcttctttatctgtttacagattaagaaatagtgatgattttgaagttaaagataaatatggctctcgttttatcaaccctgttgactataagttatcagaattaatacaggaacttacaaaatatcaacttgaactatcccagaaagccagagatatcgcattagaactgcaaaaagaggttctggcatcaatactttatagcaaggaagatatggagaatcctgcttacaacattaactttaacaaagaggaagaaaaacaaaacctccttaatgcatacacacagttaaatgctattgatcaaaacattcgtaaaaaaatcagctttcatgttgaaacaattaataataccatttcggaattaaagaataaaagtgaaagtggctttgatattcgttcgatcgaagcattgagaaaaacacaaaaaataatcaaaatgtcattaacttcaaaagagaaaacatcaaaaatattttctccaatagaacaattcttaagcatactaagaaattttatcaccgataaagaatttcattttcaatcgggattgttagtcataaataacacctatgggccaatagttttagaaagtttatcttctggtgaaaaacaactgctaattttattcattgagaccctcttacaaagagggcaacaatatattttcctaactgatgagcctgagctttccttacatattcaatggcaaagaaatattatccctgccataaaaaaattaaatcctaatgcacaaattattgctgcaacccattctcctgaagttgcatctaaatataaaaacgccattttcaatatggagagattagtcaatgctaatcaatga

SEQ ID NO: 33819 - DNA, 858 bp, Escherichia coli
atgctaatcaatgattctaatgcagaaaacttttcttggtctaatgaagcggaaaatgtgatcagtttattttatgatgctgatattatggtctatgttgaaggtgaagatgacattgctttttgggaaataatttttaaaaaaaatggtcgttttaatgtagaagttcaagatgttggtggatgtgaagctttacaaccatatatcgaaaaaataacctcaggagaaataaacgctatagttgccagagattcggatctaaaccatttttctgacaacatagtaaagcatacaaatattatttacacaaagggatattcaatagaaaacacaatcattgatgaaaaaatcatatcacacatactcaaaaacacaggccgtttttgcacgaaaaaaatgcaggaaatagatgtggaaaattggctttctaatttctatagcaacattgagaacttaataatactagatattcacaatcatttaaataaattaggatgctccgtaattggtgattcctgtgatcgttttatgcaatcaagaaattcatacaatatatgcaaggaaaaaatagatgaatatatcaatagactacctgaatcgtttactactaatggtttagcagaaaaaaacaacattcaattcccagaaaatacatctataaatcattgggtgaaagggcactttcttttctcagcatcattaagatttataacaaactttttggcatccatcaataaaaaaacctctatatccaaggatagtttttacgcaaacatcttgtctgcatttgagattttttatacagaagaacatgctgattatagttattacaatcaaaagataggggccatcacataa

SEQ ID NO: 33820 - DNA, 270 bp, Escherichia coli
atggctatttattgtataacctatgacttgaaggctccgggaagaaactacgatgaagtttttgactatctaaagcaatttacatactgtaaatatcttgaatcattttggttagtagatacaacgctgaccgcaactcaactgcgtgacggactccaagccagggtcgatagtaacgatattctgtttgtagctcgtttacaaggtgaatgggcgtcaagatattatccatgcggtgattggctaaactccgaaaaaagaaattggtaa

SEQ ID NO: 33821 - DNA, 744 bp, Escherichia coli
atgagtctggatatcaaccagattgctctgcaccagcttatcaagcgtgatgagcagaaccttgagctggtgttgcgcgattcattgctggaaccgacagaaaccgtcgttgagatggtggcagaactgcatcgggtctatagcgccaaaaataaagcttacggcttgtttagcgaagagagtgaactggcgcagacgctgcgcttacagcgtcagggcgaagaggacttcctggcatttagccgcgcggcaaccggccgcctgcgtgacgaattagcgaaatatccttttgctgacggtggattcgtgctgttttgccactatcgctatctggcggtggagtatttgctggtggcagttctgagcaacctgagcagtatgcgcgttaacgaaaatctcgacatcaacccaacccattatcttgatatcaatcatgcggatattgttgcgcgtatcgatttaaccgaatgggaaaccaatccagagtccacccgctatctcactttcctgaaagggcgagtagggcgcaaagtggcggatttctttatggatttcctcggggccagcgaagggttaaacgcgaaagcgcaaaaccgtgggctgttgcaagcggttgatgatttcactgccgaagcacaactggataaagcagagcgacagaacgtgcgccagcaggtttatagctactgtaatgagcaactgcaggcaggcgaagagatcgaactgaaatcgctgtcgaaatag

SEQ ID NO: 33822 - DNA, 246 bp, Escherichia coli
gtgagcttcacggagtttgcggctgaaaaaggctacgaactggaagagagcttcccggcagaccgtagcacactgcgtcagttgacgaagtttgccggtagcggcggtggcttgactattaactttgatgcgatgctgttaggtgaacgcatcttctgggatccagcaaccgataccttgaccattaaaggcacgccgccgaatttgcgcgaccaattgcagcgccggacgtctggcggcaattaa

SEQ ID NO: 33823 - DNA, 447 bp, Escherichia coli
atgagcgatgtacctttctggcaaagtaaaaccctggacgaaatgagcgatgcggaatgggagtcgttgtgtgatggttgcggtcagtgttgcctgcataaactgatggataaagacaccgacgaaatctacttcactaacgtcgcctgtcgccagctcaatattaaaacctgtcaatgtcggaactacgaacgtcgtttcgagtttgaacccgactgcattaaattaacccgtgaaaatctgccaacattcgaatggctgccaatgacctgcgcttatcgtttgctggcggaaggtaaagatttacctgcgtggcatccgctacttactggttcgaaagcggcaatgcatggtgaacgtatctctgtgcgtcatatcgcagtgaaagaatcagaagtgattgactggcaggatcatatcttaaataaacctgactgggcgcagtga

SEQ ID NO: 33824 - DNA, 333 bp, Escherichia coli
atgttttctataaaaccaggacccagaaatttacctatcgacaaccccacattgttatcatggaacattactgacggggatctaaattccaaattaaatacattagaatatctaaactgtataacaaatattattaattcttgtggagtttaccctcaaggatttaaagacagagaaattatatcaacttttcacgcagaaaaagttattaatgatctgttaaaaaacgattataaaatttccctttctccagatacaacttaccgagagttgaataaagcagcacagcgtagcattacagcgccagacaggataggagaaagaaaaacatag

SEQ ID NO: 33825 - DNA, 273 bp, Escherichia coli
atggctacatcgacagtaattcctgatgacatcaaaacgctaaaatccgacgttagcaaattaaaaaacgatcaaggaagctacgcaacaaaattatatgtagacagcaaagatgaaatcgttggtgactggtctgcttcatggtatcagcaggtattgccaactagcggagctatatttgggagaaaactccgctcaactcacaggacggcaggtgttgaggatgcgtattgcgaactatacctcaaaaaaatggatagacagtccaggtaa

SEQ ID NO: 33826 - DNA, 693 bp, Escherichia coli
atgagtatgagttggaagcatgtcggtgtgacttttctgtgctttttaacgtttttcatagggttgatggttggtggaattgattggtcatggatgaaagcaggccataattcagaggttgcattctggacgatgctgggcgggtgggtttctggtatagcaaccgttgcagcggtcgtggtttctatgttccttgcttatcaggcttctcaggctggtgtcgaaaaactagacatttcatttgatcatatttttgcaactcattcgggtaagcgttcgaataagttgagtcaggatgatttagttaatatcaaagtgaaaaatatgcgtagtgtaacggtcgcaattttggatgtttatatggaaattgagggagttaacgagcgcattaaaatctcaaatctaaaacaacaagggttgaatattccttatacattgcatcatatcggtgaaaaatgggaattcgcgttttctatttctacttcaaaccgtttagataccacgctccttaatctaaaaagtgagggtgaaccaacttttagaaaaggagttttcattattgagacggctatgaatcaatacaagttaaaaatgcaagaagatttgcttgctgccttgaaagagagataccaagaaattattagcgcacaagataattctaagcttcaaagtggctggtcacagaagacctga

SEQ ID NO: 33827 - DNA, 195 bp, Escherichia coli
atgtcaactatcattcaacgtgataaacaaccgaaaggtgcaggtaaagcaccagcattccaagtccgtattaacccagaattaaaagaacaaatggttaatgtcgctgccaaagaagggatgagcttaggtaactggctaaaagaactggctcgtgccgaactaataaaacaaggaataacacctaaaggctga

SEQ ID NO: 33828 - DNA, 1350 bp, Escherichia coli
atgacaacaagtcacaaaatgctagaaatcagtaaagaacaatttgatgtatttttctatggtcgtacaccatacgtaaaaaccttttcggaggaaatctgttggttcaaatttataaaggatgatgtcacaatcttagcaacaattgttttttgtaaaatagataatgattacaacgctatatttctaggtagggatttagataaaaaatttagagcgattaaagtaattgtatcccgtgaatctaaagatgatttaattactgatatggaaaaagccataccagagctattatcactacacaagaacggttgttttatacagggtgacgaatcagagtcggcattttcaatattcctagccaaagttccagaacataaaaaaaacgtttatctaagaatgctacttgaggaacccaaacactatcctgcatttattgttatgcaagagttagcttattggtgtaaagatcctgatggaatattcatcagagatttccagagtgcttcatttaactctcgcttattcgaactttatctaaacgcagttttctacgaaatggatttcgtaatatgcagagattatgctcaacctgattatattatctcaaaaaatggcattgatattgctgtagaagctgccacagttgcagaacaagaggaacctaccgagaaattgatacttgatcatgaggcagtagaagatcttcagagatatgtaaaagaacaaatgccattcaaatttgcccgcactctattaaagaaagttaggcataaacctgaacccttaaaattatgctattgggaactagatcatacaaaaggaaagcctttcattattgctttacacgattactcacacagactttcgatgagtatatcaatgccagcactacaaagctatctgtatggtgtagatatggattctggaagtaaaattgaacaacatttatttgaaaatcgaagtataccatctaattttttcggctctaataaaaatgagaatgtctcagccatattacttgcgacacatgccaccatcccaaaatttgatagaatgggagtagtggcagggattgaacaaaaaaatgtcaaatccatcgttagaggtattaaaactgatgaaggctgtaccccaatgccttttactgctcttgtcaatgcaccttcatatcaagaaccatggtgtacagcaatatacatgtttcataatccgaaggcattaaatcctatacgccctgaattattcccaagagttattcatatttttgaagaagatggagaaatagttcaatacttaccacctaattatataatctcatcaactacgcacgtatttgaatttaagtga

SEQ ID NO: 33829 - DNA, 951 bp, Escherichia coli
atggcaattcgaagaatcgcttacgcatattatgatccggactggattaaaggcgagcatacgctccttgctctcaaaagaaataccgttgagcctttggcttactcgctatatatgaaagggtatcttttctgtccatcttgctatgaacatatcacccgagtacctgctgatcccgataaggggattactacgaacggcgttcctgcttattataaacatcttaaagatgataatgcacctttttgtagcttaagatgcggacccattcagtacaaaaaatattcatctcaggaagatgcaaaaaaagcagttgaagacgaggagcttatcgtcataagcggttttcttgaatcccgtccagataataatcccagaatagattctgaaaatgaatcaatacctattgattcacattttgagagaaaaaatgggaaagaggtttcattgcctatttcacgccataatggcgaatctttcaaggttcccagtcaggtaacaagtgtacaatccctatgcgttaattttgatcataattattatcgagagatctaccttgttgatgaggatagtagagctaaacgttataggttgtgtgactcattaaaagaaatcaatgatatagaaaagggtagtacagagccatcattctattttggtgagttttggaagattcagcggttttcaggtcacagcaatgtttggttgaagatcaagcaaggagcgccatttaaagattttagaataaggattactaatgatactgctgatgggagaggcttttttaatgaaaaaaaccttggtcggctggttattttttatagcaaagtcaatgcggttgggatgggatatatgactcctcagcttggatggggggaagttgctctgttacccgctaagtatgatgagtttctaattaaagattatatgctatcgcataaaattgaataa

SEQ ID NO: 33830 - DNA, 177 bp, Escherichia coli
gtgctggcacgtcgattcggtttgctggggtacgaagcggcaacactggaagatgtaggtcgtgaaattggcctcacccgtgaacgtgttcgccagattcaggttgaaggcctgcgccgtttgcgtgaaatcctgcaaacgcaggggctgaatatcgaagcgctgttccgcgagtaa

SEQ ID NO: 33831 - DNA, 846 bp, Escherichia coli
atgcgggagttgcagcagatccgcgacagcttccgccagaaggatgcggaccttcagtctcagtatcagaccggggatatcagtgaggatttttacagacaggcacgggcacagaacgcgcagtatctgagcgaacgccttaaggaccaggcagccttttatgcagaatcggatgcgcagcgtgcggactggcagaaaggcttgcaggaggggctcagtaactgggtggacaatgcatccgattacgcctctcaggcagcacagctggcaacggaggggatttcaggactggtgaataacatcacggagatgctgaacggaaacaaagtggaatggcgcaaccgggcctcatccgtactgcaggaaatctcaaaagttcttatgaatgccgcgattgtcaacggaattaagacggcggcaaacggtatgtccggtgcgggaggatttattggcagcattggtgactggctgggcggtgcggtggccaatgcaaaaggcggcgtgtatacctcggcaaacctgagcgcgtacagcaacagtattgtggatacgcccacgtactttgcctttgcaaaaggggccgggctgatgggggaagccggacctgaagccattatgcccctgacccgggcggcggatggctcgctgggcgtacgcgcggtgggcagtatgaacggcagtgccggtctggtgtattccccggtctaccacatcgccattcagaatgacggggctaacggacagatagggccggaggcggcaggcagtcttgtgcagctgattgaccagcgggtgcaggcggtgatgctgtccatgcgacgtgacggaggaatgctgagtggctga

SEQ ID NO: 33832 - DNA, 183 bp, Escherichia coli
atgaataaagataaatgtgctatggaatgtaaagtctgttggtgggtttacgatcctgatgccggagattccttatcacaaattcctgctggcaccgcatttaccgatctacctgaatactggtgttgcccggtttgccagacaacaaaagagggggttcttaaactggactcaaaggagtga

SEQ ID NO: 33833 - DNA, 750 bp, Escherichia coli
atgtgtccagaagcacatgttactgcgtctaatattatatttaacaatcattcttaccctgatttttacccgcttaaacagacaatatgtaaggacattataagaaatactctgctttcatggttcccaatattcagcaacaaaaaatgctcatctgatatggtgcttatgtttagagatggagaatatgcaaccctttcttcattactatttttcaatgaacaagcagaagaatggctgaataaaggtcctgaatactgggagtactctttactggtaaagaatgaaataaccagtttatggtgcaaggaactccataaactacctgaacttgaagtaagaaccatctccagtccgggattatttttactgaaaaatatggatattgatgtttcgtcgtatgctatatactctaactatctggagaaaatgaaaacaaggcatgaagctgttttacgtttcttttcaagaattatattactggcccgacccctggagagaaacagtcaactacactggaacagattcaattatatagactggaaagttggtgtagttgaaacagcaagaggatggcttgtacatatggctaaaatatctgatgagggaatcgtgattgactataaaatcatatcgcctacaacgtatttcacttcggaagatggtcttttatctaatacattaaaaaaatgccaaggagacctcctgaataaatatatagtattacttgcccctggtgctgaagtttaa

SEQ ID NO: 33834 - DNA, 315 bp, Escherichia coli
atgatagagcaattagaaaataactcactaatttatggatataataaagtcagttttgttttgattgaggttggaaatattgcatgtatagaaactgaatcattaatgttctgtcttgatattgtttcaagaggaacccttgcagaaaatgcaacatttgctgttcagaaaaaaagagcgaatgcctggtgttttatttgtgaaaaaaatgttgaaattaacgatgaccataatacatgtcctacatgtgatacaacaaaaattcatatcgacaattcagcaactattttgataaagaagattgaagtcgaataa

SEQ ID NO: 33835 - DNA, 495 bp, Escherichia coli
atggacagcatcaaatttcttgatgaaataatagcatatcaacaacataaagatgataaatatcctgtaaaagagcatacccttactcaactctctattcgagtaaataaaaatatgcaggataatataaatagtctgatggctgaacatggaatcaatgatgccatgtttatgctaatgtctctactttccacttcggataatttctgtatgtctccatcagacatcagtaatgtgctgcaattcagcaaaacaaatgttaccagaattagcgattctttagttaccaaaggatttataagacgagttgatagcaggaatgatcgtcgtagtaaatatattcatttaactccggaaggtgatttgtttttacaacgggtaaccagaataaaaagtctatatctggagaaaatctggtcagttttatccgatgatgaaattaagacattcgaaatagttagcagaaaattactgtctcatatagataatatataa

SEQ ID NO: 33836 - DNA, 960 bp, Escherichia coli
gtgcactctgaagaattgaaaaatacacttggtttagctattcagattggtaagttagcatctgatcaaagtgtattgaaattctttgagcttattgattttgaaaaagttcgtgatttgcgagatttaacacaagtggttaatcagtatggattgttgaaaggaaatatatctgaaactgattttttgattgctagcgcagagcttgagagtcattattctcaaggggtggaaccagttccatatggttcagaatattatcccttaagtttagtctttacaccaaatcctcctgcaattttgtatgtgaagggggggaagcatatattatctgagttgcccggtgtagcaattgtcggctctcgtgatacatcacctgccggtgaagaaataacaaggcgaataactaaccaaattgtggctgctggatttattattgtgagtggattagctataggtactgatgcgaatgctcataaggcggcattacaggcaaaagggaaaactatcgctgttctggctcatgggcttgaaaaagcaaagccaaagcaaaatagccgccttgctcaagaaatactggagaaagggggagcatgggtttctgaatatcctattggacgcccggctcaaaagcagtcttttgttcaaaggaatagaatacaggtaggattatcagtgggatcaattctgattgaagctgcattgaatagcggcactatgactcaggcagaatttgcaaataaagcaaatcgccctgtttttgctgttataccacatttacctgataatcctttgaatttaaattgcgagggaacattagacttagtaagaaataacatggctcgtccgttaaaaactaagcgagattatgagaacgtgatttctataatgaatgagtctcgtaagaaattgttaggactaaaatacccgcaaaaacaaaatactttagatttaatttag

SEQ ID NO: 33837 - DNA, 579 bp, Escherichia coli
atgcttctacccgtaagcgtgacttcatgcggtgtatatcatccttacaagtacttaggggaacgaaatcctcgttgtgacgacatctctaggctcatgatggattttaagaatgaaggacaccgtaattatcaaagagctattaatcgtttttctcaattagctatcgaaacagttagaggattgagaattccaggacgaccacacgagtattttgtcgagcatcccttttctattgctgttgtaccttcccatactgctgggcgagtgtcaccagcattgattgaggtggctgagcgtatagtacgagtttatcgatgtggagatgtgaattgttgtctggaacggtttcgcagtgtcccgagtgcccatcgagaaggtggagatcgctcaattactggacatatgtctactattagagtcataggtggtaacctgcatgggcgaaatgtgttattactggatgatgttaagacgacaggaggaagcctgtctgcttgcttctatctactggaatctgcgggtgcaggagttataattccactgtcgttattaaaaacggcaaactatgaggagtaa

SEQ ID NO: 33838 - DNA, 141 bp, Escherichia coli
atgttgacgcgaattattccctgtttgattaaaaatctattagcttataacggaatactatttttgcaggtgggcacaatggatttggtctttaaagttctggcttcgttggggggcggtcttttattgcatctggcatag

SEQ ID NO: 33839 - DNA, 525 bp, Escherichia coli
atgcttttattctgtctattttcttttctgatcgactttaagttgacacgcccgatcgtgtttatgtgtgggggcgtctttattggtgttggtgttctaggtcacattacttttatagaaattctagaacattgcaaagaattggctacatctggtaatgtatcgcgtgatgtactatcgcgccttgagcgttaccacttaatatttacctatattcttcctttcatatcaggtgcaattggtaccaatgttatttcagatgctttattaaaacatcagacttatgagcgttctttctcttttattcagtttgtcagagattgtgcggagatttttttagttcttatcgggctggttttgggcgttttttgtatatttttctttggcgtgtctatattagttgcattcacgcggaaccttgtttttttgtattttccaagaattcaacgctggatttatttgaaagttttaaaaatcagtatgcttatgaagaatgtgtttaggtcaaaacctaagcgcaaatga

SEQ ID NO: 33840 - DNA, 357 bp, Escherichia coli
atgaaaactcaactgaaactggagttaaacatgaaaaaaacattactggctcgtgtggtcaaaggtattgcagtctgtggtctggcaatgagtagtatcagctatgcagctaccagtgttaatgcagtccacaacgttgtagaggagtcagtctggtcgattgactatgttgatagcggtaatactaaagctggtcagcaagatgtttcccaaccttggggaaagctggttgtaacacttgagagcggatcacctgcaatccccagtattcacctgccagaaggtgtcagaaagggttttgatagccagtttgagtggacccacaccgagtcaggcgttaaatacttaggagaatag

SEQ ID NO: 33841 - DNA, 384 bp, Escherichia coli
atggtcagcggtggtcacgctcaggcagaagagctgaatattgttccgcataagggaatgacaggtgagctgagggatggaatgaagatagcgaccggccggattatctgccgtgaggcgcataccggttttcatatccggataaatgcccgtcagcaggagagccgtccggggcactatatcatacaggggagaagggacagccgccatgaactgcgcgtcaggattgccggagagggctggtcaccgtcagtgacaggtggtcaggagggaatggtcagttatggtcagagggaacagggcgtgtttgatgtggtggctgatggcagccagcgtgtggaggcggatgaatatatttactccgtcacgggagaatgcctgtga

SEQ ID NO: 33842 - DNA, 816 bp, Escherichia coli
atgagctatgcacaacattatgcaatcttcatatggttgttcaaaaaaaacaatataagatgttcattaattgaagaggggacagggacgtataaaacagagaaaaaaaaaccactagtaaatattaatttttattcgtggatcattaattcaattatcttgttccattatccagatttgaaatttgaaaatgtatacggcacctttccaaatttgttaaaagaaaaatttgatgcaaaaaaattttttgagtttaaaactattccattagttaaatcgtcaacaagaatggataatctcatacataaatatcgtatcactagagatgatattatatatgtaagtcaaagatattggattgacaacgaattgtatgcgcatttattaatatctaccttgatgagaatagataaatctgataacgcaagagtttttataaaacctcaccctaaagaaactaaaaaatatattaatgcaattcaaggtgcaataaataaagcaaagcgtcgtgatataattattattgtagaaaaagactttttaatagagtcaataataaaaaaatgcaaaataaaacacttgattggattagcatcatcttctttggtatacgcacctttagtttataaagagtgtaagacatattcaatagcacctattattataaaattgtgtaataatgaaaaatcccaaaaagggattaatacgctgcgtctccatttcgatattttaaagaattttgataatgttaaaatattatcggatgatataacatctccctctttgcacgataaaaggattttcttgggggagtaa

SEQ ID NO: 33843 - DNA, 684 bp, Escherichia coli
atgtcgactgtagatacctctacagcagaggaattcaatcaaggaggctcagattttattctgacttccctcgaggctatgcgtaagaagttattggaccttacgtctcgaaatcgacttttgaatttccctatcactcaaaaagggtcttcactacgtattgttgatgaattaccagaacagctttatgaaaccctttgctcggaaatcccgatggaatttgctcctgtgcccgatccaactagagcgcagctgttagagcatggctatctcaaagttgggccagatggtaaagatatacagttaagagctcatcctagcgctaaggattgggcgcacgtcttaggaatccgtacagattttgatttaccagatagccataaaacggttgtttctgattcagatagagagttgctggaaaaagcccatcagtttatcttgcaatatgcccaaggccagaatggaaaattaacagggattcgttctgaatacgttaatcaaggtatagctttgtcagcgttgaaggaggcgtgctgcttagcaggctatgaagggcttgaggattttgaacgacaggcaaaggctgggaatgagattagtatatcttcttccaattcctctcatgacgataatcggatacaggctgaaccgccccggttttcctggagagtgttttatctgtga

SEQ ID NO: 33844 - DNA, 342 bp, Escherichia coli
atgttatataatataccttgtcgaatttatatcctttccactctgtcattatgcatttctgggatagtttctactgcaaccgcaacttcttcagaaacaaaaatcagcaacgaagagacgctcgtcgtgaccacgaatcgttcggcaagcaacctttgggaaagcccggcgactatacaggttattgaccaacaaacattgcagaactccaccaatgcctccatagccgataatttgcaggacatccccggagtagagataacagacaactccttggcaggccgtaaacaaatccgcattcgtggctggcgaagcatcctcccgtgttttaattctcattga

SEQ ID NO: 33845 - DNA, 237 bp, Escherichia coli
gtggctggcgaagcatcctcccgtgttttaattctcattgatggtcaggaggtaacttatcagcgcgccggagataattatggtgtgggactgttgatagatgagtctgcgctggagcgtgttgaggtagtgaaaggtccatattccgtactgtacggttcacaggcaattggcggtattgttaacttcatcaccaaaaagggtgaatctccggactccctatatcacttaaattga

SEQ ID NO: 33846 - DNA, 1275 bp, Escherichia coli
atgatacctatgaaaaactatcttttccagactcccgaagatatttgtgtacagttaaaaaaaatgacacatcctgtcacaataagaacaacagatattgctaatttctggcactatcttgagtcagcaacacttccagtgatcacaaaaagcaccactacagaaaatcgggaggttacatttctgtggcgctcagagaaagcactgcaaggcgtatatcttcgcctgaatcgtgttacagataaaaaagacgtcaaaaaaggactaatgactcatatcccttcgacagatatctggatgctgacactggtgttaccagcttcatatcggggctcatactcatttatagaaattcccacagatatgacacaaaaagacatatttcaactaggaagtcgcttctctccattacccggtaaatctgatccatttaacaaaacagcagaaataaatatacgaggattcggagaatcagtcctttctcttgatatggctcctgaacaaaaggaatgggatgatacttcccataaatgtacaggtattctttcaacattacattcctttgttgcaggatatcaacgccggattcgtttatattttcccctgaatccaacatcagtacctcttggattacttgtgttacctgatgctgaaacatggtttgaccggatagatattacccgggcattagatatggccatcaccactggtcgtatcacgccaatggcaattatggggatagacaatattaatgaatctgatcgtatgaatatactgggaggcaataaagaactcatctttgatatagcggaaaatctgataccccagttatacagagactatccggatatcgtatgggctggtcgctctaatactgtactggccgggcagagcctcggtggagtgacagcactgatggcagctatatatgcgtcgacaacatttggtacaatcattagtcactcaccttcaatgtggtggaaccctgaccagggcagcccgattttgtttactgagaataatacctcctgggtaagtgagcagatactttcagcgcctccgaaagatgtaaatatccgacttggagtcggttctttagaaggtacaaccgtctcacatgttcagcgattgcatcattcgttaatcgcagctggtttggaaagtaacctcactgtctataccggtggtcacgattatgcttggtggcgcggagcaattattgatgaattagcaaattataattgcaggatggtatcaaataataactctgtgtaa

SEQ ID NO: 33847 - DNA, 177 bp, Escherichia coli
atggcgtccggcccatcgctttttctccattatttttctcattattctattagtttgcattcattcactgataacaactataaaataaaagttatggctattctgatacaggaaaataaacgttcattctatggttacctcttcctgttatataaaagaattttaaacgacaagtaa

SEQ ID NO: 33848 - DNA, 2865 bp, Escherichia coli
atggcgtctggaaagctgacttcagtgatactgccggacggcaggacggtgcggtatggctataacagccagttgcaactgacttcagtgacatatccggatggtttacgcagcagccggaaatatgaccgtcagggccgactggcagaagagacctcgcgcaacggtaacattacgcgctggttttatgatttttcccgcagtggcctgccctgtgcggtggaagacggaaccggggtgaggcggagaataacgcgaaaccgttacggtcaactgctggcctttacggactgctcggggtacacgacgcggtatgagtacgaccagtacggtcaacaaatcgccgttcaccgggaagaaggcatcagcacttacagcagttataacccgcgtggccaactgatcagtcggaaggatgcgcaggggcgtgaaacccgttatgagtacagcgctgcaggcgacctgacagcaacgatatcaccggacggtaaacgcagcgccaccgaatatgataaacgtgggcgtccggtgagtgtgacggaaggtggactgacgcgcagcatggggtatgacgccgccgggcgcatcaccgtgctgactaacgagaacggcagccagtccacgttccggtatgacccggtggacaggctgacggagcagcgcggctttgacggccggacgcaacgttaccagtatgacctgaccggaaaactcacgcagagtgaagatgaggggcttatcaccctctggcattacgatgcgtcggaccgcatcacgcaccgtacggtgaacggcgacccggcggagcagtggcagtatgatgagcacgggtggttaaccaccatcagccataccagtgaaggccaccgtgtggcggtccactacggctatgacgataaaggccgcctgacgggcgaacggcagacggtggagaacccggagacgggggagatgctgtgggagcatgagacggggcacgcgtacagcgaacaggggctggcgacccgtcaggagccggacggtctgccgccggtggagtggctgacatatggcagcggttatcttgcggggatgaagctgggcggaacgccgctggtcgagtacacgcgggacaggctgcaccgtgagacggcccgcagcttcggcggggcgggcagtacagcggggtacgaacaggccacggcgtacaccctcacagggcagctccggagcaggcacctgaaccttccgcagcttgaccgtgactacgactggaacgacaacggacagctaatccgcatcagcggcccgcaggagagccgggagtaccgttacagcgacacgggaaggctgacgggcgtccacaccacggcggcgaacctggatatcgatatcccgtatgcgacggacccggcaggaaaccggctgccggacccggaactgcacccggacagcacgctcacggcatggccggataaccgcatcgcggaagatgcgcactatgtctaccgccacgatgaatacggcaggctggcggagaagacggaccgcatcccggaaggggtgatacggatgcacgacgagcggacccaccactaccactacgacagccagcaccgcctggtgttctacacgcggatacagcacggcgaaccacaggtggagagccggtacctctatgacccgctgggccgccggacgggaaaacgggtatggcggcgggagcgtgacctgacggggtggatgtcgctgtcgcgtaaaccggaggtgacatggtacgggtgggacggtgacaggctgacgacgatacagaccggcaccacgcgtatccagacggtataccagccggggagcttcacgccgctcctgagaatcgaaacagagaatggcgaacaggcgaaggcgcggcaccggagcctggcggaggtgttgcaggaggacacgggtgtgacgctaccggcggagctggcggtgatgctgggaaggctggagcgggagctgcgtgcgggagcggtgagtgcggagagtgaggcatggcttgcgcagtgcgggctgacggcggaacagatggccgcgcagatggaggatgcatacatcccggagcggaggctgcatctttaccactgtgaccaccgtggactgccgcaggcgctcatcaccccggaaggcgaaacggcgtggtgcggggagtatgacgagtgggggaaccagcttaatgaggagaacccgcatcacctgtaccagccgtaccgtttgccggggcagcagtatgatgaggagtcgggactgtattacaaccgtcaccggtactacgatccgttgcaggggcggtatatcacccaggatccgatagggttgaaggggggaataaatctatacacgtatccactggtaccaatacgttacactgatccactggggttagaacgagttataagtgtatatgggcctcccgctccagaccgggcaggtgctgaaactcctcttgttcttactgatatgactggaggagtgactatttattatgatcctgaaacaggtgattcaatgacttttgatagtagcaatagaattgatcgtcgttctcaacgtggtgctggtgatccatatacaggtgaagtcgttggttgtgagacaaatgaatcaggaatatcggcagcatatggcacaacgaagatctatactacagatactagagcaagatggctacatggtgggggatcatcgttgcgcgatccttatgctcctcgacaaggctggaaaccaactatgggatgtacccgtgcacagaatgaagatgtagatgagttgtgtaagaaagtgacaagttggatgtattcgcatcctggagagagaattagatatgaacgttttaagacacgttaa

SEQ ID NO: 33849 - DNA, 177 bp, Escherichia coli
atgtgtttttcggcagtgattacggtagtgaacggcgctctactgtacgggctgagcgggacctgctgtctgaatggtatcaatccgcaagcatatctgcgccatatactcaatatactgtcggctaaccgtgttgatgaactcttgccatggaacgtagcacttaccaataaataa

SEQ ID NO: 33850 - DNA, 432 bp, Escherichia coli
gtgatatcccgcttcatcaatgccctgaaagcccgaatcgacgcttaccagaagcgtaagcgtcgtgaaggtaaacgcgtgcatcccaccaccctgcattacgcctgggcccgggagttcggggtactcaggggcaaaaaacactatcacctcctgctgctggtcaaccgggatacctggtgtcgtgccggcgattaccgcgatccggggtcactggccgggatgattaaacaggcctggtgcagtgccctgggggtggatgccgggccttatgccacgttggcgcattttcctgacacgccggcggtgtggctggaacgcggtgatgacactggctttcagcaggtgctggaacgtgctgactatctggcgaaggaacataccaaagctcacgccactggtgagcgcaattttggctgtagccggagttga

SEQ ID NO: 33851 - DNA, 135 bp, Escherichia coli
atgaaccgtaaaagtcttgctgctattgcaatggtgctggcaacatcatgtggatatgccgccacaataaaagtccccatgaaccttgttaatgccgatggtaaagaggtgagcgccggaacaataactatctag

SEQ ID NO: 33852 - DNA, 618 bp, Escherichia coli
atggttatcactgacctgcccggggtgggcgagagccgggacagggatgcagagtatgaggccctgtaccgtgacattctgcctgaacttgacctggtactgtggctgattaaagccgatgaccgtgccctgtctgtggatgagtatttctggcgacacatcctgcagtgcggacatcagcaggtgctgtttgtggtgacgcaggccgacaaaacggagccctgccatgaatgggatatggccggtattcagccttctcctgcacaggcacagaatattcgcgaaaaaacggaggcggtattccgtctgttccggcccgtacatccggttgtggccgtatcggcccgcaccggctgggaactggatacgctggtcagtgcgctcatgacagcgcttcccgaccatgccgccagtcccctgatgacccgactgcaggacgagctgcgcacggaatctgtccggtctcaggcccgtgaacagtttaccggtgcggtggaccggatatttgacacggcggagagcgtctgtattgcctctgttgcacgcacggttctgcgtgccgtccgtgacacggtggtctctgttgcccgtgcggtatggaactggattttcttctga

SEQ ID NO: 33853 - DNA, 492 bp, Escherichia coli; identical to SEQ ID NO: 21665

SEQ ID NO: 33854 - DNA, 261 bp, Escherichia coli
atgtgtccaaccattgagccaggagatctcatcttcgttgatatcagtatcaatcagtttgatggggatggtatatatgtatttggttttgatgataaaatttacgtcaaacgactgcaaatgatacctgataaactgctggtaatttctgataatcagatttaccgcgaatggggaattaccagcgaaaacgaacatcggtttatggtctttggaaaggtcttaatcagtcagtcacaaacccttaagcgacacaattaa

SEQ ID NO: 33855 - DNA, 471 bp, Escherichia coli
atggccttgctggaacgccgcgaacttgatgccgggatctggcgaatggcgacagaaccaccgactggttttaccagcttacggttgcatgaatcggcgtttctggtggcgatgcctgaagagcatcatctctcatcattttccaccgtcccgctggaagcgctacgtgacgagtatttcgttacaatgccgcccgtgtacactgactgggattttttgcagcgagtttgccagcaggtgggattttcaccggttgttattcgcgaagttaatgaaccgcaaacggtactcgccatagtcagtatgggtattggtatcacattgatagcggacagctacgcgcagatgaactggcccggtgtcatattccgtccgctcaaagaacgcatcccggcagacttatatattgtttatgaaacgcagcaggtgacgcccgcgctggttaaactgctggcggcgttggcgcagtag

SEQ ID NO: 33856 - DNA, 501 bp, Escherichia coli; identical to SEQ ID NO: 10225

SEQ ID NO: 33857 - DNA, 375 bp, Escherichia coli
atgaaaacattacccgacacacacatacgggaggcatcgcgctgcccgtctcccgtcaccatctggcagactctgctctcccgactgctggaccaacattacggccttacgctgaatgacacacagttcgcggatgaacgcgtgattgagctgcatattgaggccggcatttcactgtgtgatgcggtgaactttctcgtggaaaaatacgcgctggtgcgtaccggccagccgggattcagcgcctgtacccgctctcagttaataaacagcatcgatatcctccgggctcgcagggcgaccggcctgatgacccgcgacaattacagaacggtaaataacattaccctgggtaagcatccggaggcgaaatga

SEQ ID NO: 33858 - DNA, 315 bp, Escherichia coli
atgaaaaaaatagatatggaattctatttaaggaattttatccttgccttatccttttacattttatcttttatcatcgcaagtttgaatctaagcccaacaagtatagaattatttatatttatacttatatctctttttggatcgtccacataccctttttgtctattactaataaataagcaagcacccttactaacaaaaacaacttttaacttcgttaactggggttttataatatgcattatattatcactacctccatttggattgatttttacagtctattactttataaccaacaaaaagcgatag

SEQ ID NO: 33859 - DNA, 1110 bp, Escherichia coli
atgcagaatgcagaaaatatcagtgaatacctgtcgttacgccatcaggggctgatgcaaagtattcagtcactgcaggcgcatatcaccagcctgcttgaggatatccgggaaatagcagactgtcaggagcaggtgaccgctgatgtcagaatggccatggaggagatcgatgccagaacccgggaattactgacgggggtctgcacctcactggaagaggagctgaatgactatttcagaagcggtaaacgcaaagaacagcaaatgctggaggaagaaaattcagcgcagccccgggagagaaacgcattcgctttctttcacgatattttcggaaccggaaatcagcatgacaggatgcgggactttgatcccgacagccccgaaataaaattcagtgatcgcagggaagcccttgaactgatgacgcaaatcgaatcgaccgtgaccagcctgcaccgtgaggctgaagcacagttccggcctgagctggagaaaatcgtcagcgggattgaaacaggttttcgtggcacggccctgtacgccacagaaaacattgccggtcgcatcaatacccgcctggaggatgagggctttaccgtaaaaatcagttttccggcagtcagtcagttacaaacccggctcgcggtaaaaacaaatctgagtgcgcttatggaggaaagaacggagaccgtcacccgtcgccgtcggcagagtggtttatggggaaagatttgtggagcgtttggcaccagtgactggggctgggaaacctataaagaggatgtgagccgcagtgttatcaatatcaacaccgtcaggaaggaagttatgtcactgacccgggcatatttcggggagctgcaggcatccattgagcaggatattaaccagcccgtccgccaggaaatcgatgcctttttctgcgcattcagggagaaagttgaacaactgcgtaacacgctgattcagagctctgaagatcataaacgcgatcagcaggcacaggaacggcttaccaggcgacttcaggcattaaatgaaagggttcctgagctcattactgacagtaaggcgctgagggaagagctggagacaatgctgtga

SEQ ID NO: 33860 - DNA, 198 bp, Escherichia coli
atgacccgcctgcaggacgggctgcgcacggagtctgtccgctctcaggcccgtgaacagtttaccggtgcggtggaccggatatttgacacagcggagagcgtctgtgttgcctctgttgcacgcacggttctgcgcgccgtccgtgacaccgtggtctctgttgcccgcgcggtatggaactggattttcttctga

SEQ ID NO: 33861 - DNA, 312 bp, Escherichia coli
atgggagttgagcagaataatttcagggacatgctgaccggttatctgtccggcccgccgcagacgcagcatgtgttttgtgtattcccggcggctctggtcgcgcacgcgggtctggcaggcaaagaacggctgaaagccttccttctgcagactttccagcacggtgatggtggggatgtacgtatagttctggcttcgggacgtgtgtttctcttcaccgaaaatacccggtacatggtgcatcagttcttcgtgtgtcagcggacggtcacggcgtatctggttcgcataaccaaaacgactggctag

SEQ ID NO: 33862 - DNA, 435 bp, Escherichia coli
atggaggaaagaacggagaccgtcacccgtcgccgtcggcagagtggtttatggggaaagatttgtggagcgtttggcaccagtgactggggctgggaaacctataaagaggatgtgagccgcagtgttatcaatatcaacaccgtcaggaaggaagttatgtcactgacccgggcatatttcggggagctgcaggcatccattgagcaggatattaaccagcccgtccgccaggaaatcgatgcctttttctgcgcattcagggagaaagttgaacaactgcgtaacacgctgattcagagctctgaagatcataaacgcgatcagcaggcacaggaacggcttaccgggagacttcaggcattaaatgaaagggttcctgagctcattactgacagtaaggcgctgagggaagagctggagacaatgctgtga

SEQ ID NO: 33863 - DNA, 375 bp, Escherichia coli
gtggcgcttgaagagcttcgctggggcgcgtttggtgatgtgatacgtcagggtgaaacaggccaggttaatcagttactggatattctcagatataaatcattaacgcagatggcacaggagagtggtggtagcgcaacagtacggctgaactcactggactggcttggtggtcagagccgggagcaggcagataacgaatggtatgaagcgattaactggctgggggactggtgcagtgaagagcggcatcctgtgatctggtcaaccacacaggctgcagaacacttaccggctcgcatgccccgtctctgctcagcagagcgtctctctgaaagtatggtcgatgaaatatttctgaagggggctacatga

SEQ ID NO: 33864 - DNA, 1281 bp, Escherichia coli
gtgaaacatctgacagaaatggtgagacagcacaaagcgggcaaaacaaatgggatttatgccgtttgttccgcacatccgctggtgctggaagctgcaatccgctacgccagtgcaaaccaaacgccgttactgattgaagcaacctccaatcaggtggaccagttcggcggttataccggaatgacgcccgccgattttcgcggctttgtttgtcagctcgccgactcgttgaatttcccgcaggatgcgctgattctgggtggtgaccatctggggccaaaccgctggcaaaacctgcctgccgctcaggcaatggccaatgccgatgatttgattaaaagctacgtggcggcaggattcaaaaaaattcaccttgattgcagcatgtcctgtcaggacgatccgattcccttaactgatgacatcgtggctgaacgcgccgcccgtctggcgaaagtggcggaagaaacctgtcgtgaacactttggcgaagccgatctggagtatgtcattggtaccgaagtgccggtacctggcggcgcgcatgaaaccttaagcgagctggcggtcaccacgccggatgccgcccgcgccacgctggaagcccatcgtcacgcctttgaaaagcagggtctgaatgccatctggccacgcatcattgccctggtggttcaacccggcgtcgaattcgatcacaccaacgttattgattatcagccagccaaagccgctgccttaagccagatggtcgaaaactacgaaacgctgattttcgaagcgcactctaccgattatcaaacgccgcaatcgctgcgccagctggtgattgaccactttgccattctgaaagttggcccggcgctgaccttcgccctgcgtgaagctctgttctctctggcggcgattgaagaagaactggtgccagcaaaagcctgttctggtctgcgtcaggtgctggaaaacgtgatgctcgaccgcccggaatactggcaaagccactaccacggtgacggcaacgcgcgtcgtctggcgcgtggttatagctactcggatcgcgtgcgctattactggccggacagccagattgatgacgctttcgctcatctggttcgtaatctggcggattcaccaattccgctgccgctgatcagtcagtatctgccgctgcagtacgtgaaagttcgctccggcgagctgcagccaacgccacgggaactcattatcaaccatattcaggacatcctggcgcagtaccacacagcctgtgaaggccaataa

SEQ ID NO: 33865 - DNA, 462 bp, Escherichia coli
atgagcagagtaaccgcaattatctccgcactggttatctgcatcatcgtctgcctgtcgtgggctgttaatcattaccgtgataacgccatcgcctacaaggagcagcgcgacaaaaacgccagagagctgaagctggcgaacgccactatcaaagacttgcagatccgccagcgtgatgcagcggcgctggatgccaaatacacgaaggacttagctgatgccaaaaagcagcttgatgatttgcagcgttgtgttcgcactggcaagtgtgggctgcacctcaacgccagatgttccgcgaacggagcgaccagcaccggcggcctgggcgatgttaccggcccccgacttactgactccgctgaacgggattatttcaccctcagagagcgaatcgtcacagtgacgaaacaggttggatatttgcaggagtacatcaggacgcaatgcctgaattaa

SEQ ID NO: 33866 - DNA, 273 bp, Escherichia coli; identical to SEQ ID NO: 27568

SEQ ID NO: 33867 - DNA, 228 bp, Escherichia coli; identical to SEQ ID NO: 27566

SEQ ID NO: 33868 - DNA, 222 bp, Escherichia coli; identical to SEQ ID NO: 27565

SEQ ID NO: 33869 - DNA, 627 bp, Escherichia coli
gtgagtgaaatcaattatcaggtactgcgtgaagcagctgagagcgccagtaaaattaactggacaggccttgaagatgatttgaacgctgatggatatatgcgcacactgacgcggtatatccaatgccattcaccgattattacgctatctctgttggatgagcgagatgcattaaacgaacgcatagccgaactggaggctaatttagcggcgatgactgaagaccaccagagagcgattgagtcaattaagcaggctgattcggctgttaagttggcacacgagaagttttcggcgctggcggcggagaatgcgagactgaaggtgatgtgtgaggaccgccgcaggttcatcatgaatggggtgcagatgggttatatcaaggtgccaacagcggaaacggatccagaccttgagacaattcgcatagctatatcaccacaaaagcccattccagccaccgatgctttcctggctgaagtccgggcgcagggattggagatgtttgcacagagatgtaactcaaaatccgaacaggcgcttgcatctgatatacgcgataactggaaactactcggtgagcatgcgactgactttgccgcagagcttcgcaaaggagagtga

SEQ ID NO: 33870 - DNA, 273 bp, Escherichia coli
gtgggaatgatgcaagagtgcctcgttttgattgaagggtatgatccgtatgttgttaacgtcagcagaatggatactggctatagcgactacaaaactggtcgtgaactgccgttcaccatcatcaggatgaatagctttggcgatgatgatgctgtttattgctgtatagccagcgataaaaacatggaagaccggacagatgaagcccgtatgctattgaggaaatataaggtaaagccgttatcagagaataacgctgagaggggttaa

SEQ ID NO: 33871 - DNA, 225 bp, Escherichia coli
atgaactgtaacaaaaatgaagaaactcgcctggtttggacggtagtaatcggagataaagagggcggtgaagagcctcattttgattattctgtggctttgcaggctctcatccttgaagcgcagagataccaacaagagatgcagaagaaccctcaactggaacctcgaccaattggcctattctgcgagcgagtatcagcggcggaactccctgatatctga

SEQ ID NO: 33872 - DNA, 396 bp, Escherichia coli
atggcagttcaatcatacaaatacgaatcccctttggataagggatacattcgtatcaagttaagtcgttctcagcataaggctatttttaaggtaaggaaaattcgcatattggatgcgtatgcgtattactacaacggtgaaaatgttgttgttgaacactttcttgcacgatggtttgtagctctgatttttgtccctctcctgttaattggtacttttgtggatggttttcctagtacatggcgggagataaagaaaggcctattcccgcgtaagtacggcagattttcgcaagatagctggcgagttatacctggtaaacattctgtggatgagcagccgattgttgattactggttgaagcgtatggctgatgctaaaaaagttgattga

SEQ ID NO: 33873 - DNA, 273 bp, Escherichia coli; identical to SEQ ID NO: 33870

SEQ ID NO: 33874 - DNA, 711 bp, Escherichia coli
gtggagcttgagtatatacgcagctgcgtctctacggcattggctgatgttcattatcgccagcgtggcattctggaggtccagcttgagcagatgcgtctcggtagatcaggacggtttaacaataaaccagtccggtcaatcagtgtgggggatgataactcatacgaagtgtccgttcctgctgagccggttagattccatcaggggaaaacatttaaacaatcatcaatgttgctcactgatattgattttcagagcgccagctggcgcagggctattggtcagttgaataacgaggaatcagcctggctttattattgctacggatgcaagcctgattacaacaatgatgtgattgtttgtcagtggttatggcttgattttctggttgctcattcggggggcggctttaaaaaaatgaaggcctccacgaaaaaagccatgcggaaattgatttattacgcggcacaacaggttaaatcagaacttacgtgtgctgaggcagttgatgagagagaacaggacaggcatctgagttttctactgaatatatctattgatagctggagacaagattataaagaacgctggcttttaattaagtcgcgatgtctgagcttaaatcgaaccgcattattaaatgcggcggagaagcgcagtgaaatcatcaaacgccatcgggcaggaagtgccattctgcctttgtaa

SEQ ID NO: 33875 - DNA, 627 bp, Escherichia coli; identical to SEQ ID NO: 33869

SEQ ID NO: 33876 - DNA, 450 bp, Escherichia coli
atgaccactattaccagagaaagctcgaagattaaatcattcatcaatggcttcctgagcgacccggcgcacggtaatcaatctttagacagtctgcttgctgatgtgtttcgtatcgcgctggcatcgttggaagcagagccggtagcgtggcgatatcgctacatgaaaaaaggcgtaacggactctcagggggagccgtgggttggtgactggaaatatgtaccgacaaaagaggattgcaacgacaggccgaactatgaaattcaggcgttattcacggctcagcctgtgccactgacatcagaaggattgattaaagcagtgcgtttctatgaacaggtaaagcgtgaaaatccgccagtcgaaaccggagcatggaaagacgctgttgactgggtgctcaaagaggcttgccaggctgtaaatatcggtaccaaaggagattga

SEQ ID NO: 33877 - DNA, 219 bp, Escherichia coli
atggtattagattcaatgactgaagcatctgtatcaactcttgaagaactcgaatcaaacctaaaagacatcgacgccgttttggatctggttaacgttgctctggcttctcccgaagctagcttgcatcttggcgagatttcacggcttgttagtatgtcgcgggagattgctcagaattgccaacaagcgattgctgttgagtgtttacatcattga

SEQ ID NO: 33878 - DNA, 462 bp, Escherichia coli; identical to SEQ ID NO: 33865

SEQ ID NO: 33879 - DNA, 288 bp, Escherichia coli
atggatataacacctttccttcatgcactttgtgctgtggctgcgcagctactgattggtctttttaccgggaactgggcttacggtgcgatagccggttgtacgttcttcatcgctcgtgaacatacccaggcagaatatcgctggattgaaatgttcgggcatggcaagcgtatgaatatgccgtggtggggcggttttgatcctcgcgcgtgggatgtagcaagcctgatggattttgctgtgccggtggtggcgtgtttacttgtatttatattttttgaataa

SEQ ID NO: 33880 - DNA, 1170 bp, Escherichia coli
atgtctttgaaaaagttattacaagattgtgttacgcgcggtcaagaaatgacccaagcaattgctatagctcaattcggtgatgatagtcctgaagctcggcgtatcacgcgtagatgggggataactgaagtagcagatttaattggtgtaactcctcaagcaataagagatgctgagaagaacgggcgtttacctgcacctgactttgaaatgagaggaagagttgaacgtcgtgccggttataccatagatcaaatcaatagtatgcgagctgtttttggcaacccaaaccaacggccacaagataaaaacccagttgtgcttgctgttatgtcacacaaaggcggagtttataaaacatcgtctgcagtacatcaggcacaatggctagcattacaaggtcatcgtgttcttttagttgaaggtaacgatcctcagggaacagcctccatgtatcacggttatgtacctgatttacatatacatgccgaggatactttactgccattttacttgggcgaacgcgataacgctgaatatgctataaaaccaacatgctggcctggactggacattattcctagctgcctagctttacaccgtatagaaacagatctcatgcaatatcatgctcagggtaaattgcctcaccctcctcacctgatgctacgcgcagctatagaatcagtttgggataactacgatgttatcgttatagatagtgctccaaacctcggtacaggaaccattaacgttgtttgcgcagctgacgttatcgttgttgctacccctgcagaattatttgattacgcctctgttctacagtttttcacaatgcttctcgatctcctagaaagcgttgacctaggcggatttgagccgaccgttcgcttgcttctgactaaatatagtctcactacaggaaatcaatcacgatggatggaagagcaaataagaaatacatggggatcaatggtattacgtcaggttgtacgcgttaccgatgaagtaggtaaaggtcagataaaaatgcgaacagtatttgaacaagcggcaaaccagcgttcaacacttaatgcatggagaaatgccgtctctatatgggaccctgtttgtcgagaaatttttgatgatctaataaaacctcgctgggagaacgaagaatga

SEQ ID NO: 33881 - DNA, 360 bp, Escherichia coli
atgaatactgttttaagtgttcagggtgcttctgcgcccgtcaaaaagaagtcgtttttttctaaattcactcgtctgaatatgcttcgcctggttcgtgcagtgatcccggttgctgttctgatgatgttgttccctgagttagctatggctgctggtaaaggcgacctgatggctaaaggtaacgatacggttaaggcgaccttcggtaaggactccagtatcgttaaatgggttgttctggctgaggtgctggtcggtgcggtcatgtacatgatgaccaaaaacgtcaagttcctggtcggctttgccatactctctgtatttattgcagtaggtatgtctgttgccggattctga

SEQ ID NO: 33882 - DNA, 528 bp, Escherichia coli
atgagtgcacgtggtatcaacaaggtcatcctcgtcgggcgtctgggcaatgatccggaagtccgttacatccccaacgggggcgcagtggcaaacctgcaggtggccacatcagaaagctggcgtgacaaacagacgggggagatgcgggagcagacggaatggcaccgcgtggtgctgttcggcaagctcgcggaagtggcaggtgaatatctgcgcaagggtgcgcaggtctacatcgaaggtcagcttcgcacccgtagctgggaagataacggtatcacccgttacgtcactgaaattcttgttaagaccacgggcaccgtgcagatgctgggacgtgcaccacagcagaacgctcaggcgcaaccgaagcctcagcagaatgggcagccacagagtgctgacgcgacgaaaaaaggtggcgcgaaaacgaaaggccgtggacgtaaggccgcgcagccagagcctcagccgcaaccgccggagggggaggattacgggttttcagacgacatcccgttctga

SEQ ID NO: 33883 - DNA, 642 bp, Escherichia coli
atggcagcgacgcacacactccctctggcgtcaccgggaatggcacgcatctgcctttacggggatttgcaacgatttggccgccgcatcgaccttcgtgtgaaaacgggggctgaagccatccgggcactggccacacagctcccggcgtttcgtcagaaactgagcgacggctggtatcaggtacggattgccgggcaggatgcaggagaaaccgaattatcatcccgtcttaatgagccgctggcaaatggtgccgtgatccacatcgtgccgcgtcttgcgggagcaaaaagtggcggtgtgtttcaggcggtgctgggtgcggcgttgattgctacggcaatctggatgccggggatcagtatcgctttcagtgacattctcttttcaatgggtgcggcgatgacgcttggtggtgtggcgcagatgctggcaccgaaagccagaactccccgtacacagacaacggataacggcaaacagaacacctatttctcctcactggataacatggttgcccagggcaatgttctgccggttctgtacggtgaaatgcgcgtggggtcacgtgtggcatctcaggagatcagcacggcagatgaaggggatggtggtcaggttgtggtaattgggcggtaa

SEQ ID NO: 33884 - DNA, 528 bp, Escherichia coli
atggcagttcgtggcattaacaaggtcattcttgtcggtcgtctgggaaaagatccggaagtccgttacatccccaacgggggcgcagtggcaaacctgcaggtggccacgtcggaaacctggcgtgacaaacagacgggggagatgcgggagcagacagaatggcatcgcgtggtgctgttcggcaagctcgcggaagtggctggcgaatatctgcgcaagggcgtgcaggtctacatcgaggggcaactccgtacccgtagctgggaagataacggtattacccgttacgtcactgaaatccttgtgaaaaccacgggcaccatgcagatgctggggagtgcaccacagcagaacgctcaggtgcaaccgcagcctcagcagaacggccagccacagagtgctgacgcaacgaaaaaagggagcgcgaaaacgaaaggccgtggacgtaaggctgcgcagccggagcctcagccgcaaccgccggagggtgaggattactggttttcagacgatatcccgttctga

SEQ ID NO: 33885 - DNA, 363 bp, Escherichia coli
atgtatcgtgcctggctgaaacaggctgtggcatccggtgttatcaggctaccccgcgatcttgatcgttcttcactgtataccgcggtgtattccggaccggtgatgccgtggattgaccctgttaaggaggctgaggcctggaaaattcagattcgtggtggagcggcgacagaatcagactgggtacgtgcaggtggtcgtaatccggatgatgtcaaacgtcggcgcaaggccgaaattgatgaaaaccgcaagctggatctggtatttgataccgatccggccagtgataaaggaggcagcagtgccgcaacgaaacgacaggagccgcagcacaccgacgaccagtccgaagaataa

SEQ ID NO: 33886 - DNA, 423 bp, Escherichia coli
atgacattaacgagactgagcaaagagcatatcattgatgttcacctcagagagtatggcagaacagaaaaacaaaaatgcacctttgtttttcaacctgaagtgtcagcgagagtaaaaaattatggtgaccattttaccgttgactcaataaggcagatgtgggacgcagcgataaaacgtgccggactccgccatcgaaaatcatatcagtcgagacatacttatgcctgctggtcgctgacagctggtgctaacccggcatttatagcaaaccagatgggccatgcagatgcgcaaatggtatttcaggtatacggaaaatggatgtctgaaaacaataatgcacaggtagctttgttaaatacacagttaagcgagtttgccccaaccatgccccataacgaagcaatgaaaaattaa

SEQ ID NO: 33887 - DNA, 387 bp, Escherichia coli
gtgttccgcggctgggtcagcagtatcggtaaggcggtgacggcgaaggaagtgatcacccgtacggtgaaggtcaccaatgtgggccgtccgtcaatggcagaagatcgcagtacggtgacggcggcaaccggtatgaccgtgacgcctgccagctcctcggtggtgaaagggcagagcaccacgctgaccgtggccttccagccggagggcgcaactgacaagagcttccgtgcggtgtcagcggataaaacaaaagccaccgtgtcggtcagtggtatgaccatcaccgtgaacggcgttgctgcaggcaaggtcaacattccggttgtatccggtaatggtgaacttgctgcggttgcagaaatcactgtcaccgacagttaa

SEQ ID NO: 33888 - DNA, 177 bp, Escherichia coli; identical to SEQ ID NO: 4925

SEQ ID NO: 33889 - DNA, 177 bp, Escherichia coli; identical to SEQ ID NO: 20495

SEQ ID NO: 33890 - DNA, 588 bp, Escherichia coli
gtgagcaagattgactatcaggcactgcgtaaagcaaaggtaatcacaaaggaatttgttgaggaacaccttcactacgatgggaaggattttttctggaagaagcgcgaaccaagttcgttttatgacagccgcacatgcaaggtttggaatactcgaattgcagggaagcgggccggaggaatcagcgctcaaggttatgtagaaattcaaatcaaagggagtcggtataaggctcatagattagcgtggtgtcttgttcatggcgatataccaacagacatgcaggttgatcacattaaccacgaccgaactgataaccgaatagagaatctgcgccttgttgataatcaggaaaaccaaaagaactcttcgatacgaaaggacaacattggaggctgcacaggtgttacctggaattctagccataaaagatggattgcctacatacgcgaaaatggtaagcacaagcacattggtagcttcattaaattctctgatgctgtaagagcaagagaggaagctcaggcaaggcttggattccacatgaatcacggcgtcgctggcattcgcatcaaaggagagtga

SEQ ID NO: 33891 - DNA, 1272 bp, Escherichia coli
ttggctacatggcaacaggctggtaattcaggcgcgcttcttgccgggttaggcggcatgaactccaacgctccaagagcaagtgatgcagacgccacgcttgcatacattcgacagaataacgagatggagcgttcaggacgtaataacgttggcttgcaggctttgcagggcatttcatctgtcatggatatgtataagcagatggatcagcagaagcgacagcaagagtttcagcaggcttatgctgatgcatatacatctggtgaccgcgatgcaatgcgaaaactggcatcacagtatcctgagcagtttgacgctgtaagaaacggcatgaaatttgtcgatgaagaccagcgttccactgtcggcacactggcagcaagtgccagactggcagcttcatctccagaagccatgatgtcatggttgcagaacaactcatctgagcttactcgtgccggagtagaccctctggatgtggcgaaaatgtatcagcaaaatccacaaggtttcacagagtttgttgatcaccttggaatggctgctcttggtccgattgattacttcaatgttcaggacaagatggttggtcgccagcaggatcagcaaagaattaacgaaacaatccgtaataatgacatgacaaatgccagagggtgggcaagcaacaatattgcgcaacaaaatgtcaatcttcgtcggatggaattagaggacaagaaatacgacagactcatcgcaaatgaaactaatgccttaaaacttgctgaattgcaggacaagagattgcagaatcagcaagctatggagcaggcaaagcgagataaggccgatgcgtacaactctggaatggataatctctccagaacgatagagacggctacaaaagttcttaatagcccaggattcacgggatatttcggaacaaacctaaacccactatcgagtagattcattccaggaacagaggctgctgatacagaaactctggttgacacactgaaatctcagggattcttatctggcattcagcagatgaaagggatgggggctttaagtaatgccgaggggcaaaaggtaatggatgctattggtagtttgtccccaaatcagtctgaaaaatcagccagagcagctatcaaaacaatcataaaaaccactgagatggctcagaaacgtatgcaacagaaatacgggaaggacatacaaccgtctcaacagcagctttctgatgatgacctgattaataaatatctcggagggcagtga

SEQ ID NO: 33892 - DNA, 678 bp, Escherichia coli
atgattaatgataaatcatttaatatcgaaaacattatttctgatatttttaaagagacccgattaaaaataagtaaggacgatcctgttttaagcataatactaatgcatgaaaaaattctcgaacatgcactaacacaacttaaaaacaataatcaaatagctactgaaagattatctcatgacatatcttcaataagagatgcaatcaacgcattacctgacgctattgatgaaaaaacgtcagaactacaacatgcagcagtagcacttcatgacgaatttcaggaaagcaaaggagaaattaaaggttctctggaagaagctcgaattaatgcaacagagaaattagcagaaagtgcaaaagagcttcaattaaacattacaaaagttgctgaaaaaacaacagaaacaatagagtcagcaaataaaataatatctgccatagatacaaacctggctgaaattaataaaaaagccttagctaattatgttaatgatatcagaagccttgaaaagaaaggtgaaagtatatctaagaatattgatacagcaattaataatgcttttaaatccagcgtgaaatcatttaaattttattgtggtgctgcattatttattagcactgtcttacaattcacaatgtggggattttttctctataaactcctgacttaa

SEQ ID NO: 33893 - DNA, 756 bp, Escherichia coli
atgaaaaattcaataaattttatccttcaaggaaaaggcggtgtaggaaaatcatttacaacggcaatactagcacaatactttattgatgaaaaaaacatggataacgtcgttgtaggcgacacagatcctgtaaatacaactacagctaaagtaaaaagattaaatgctgatttaatacaaatcactgaaaacagcaaagtagtccaatctaaattcgatccaatgttcgaatcaatgctaactaatactcaaaatacatttgtcattgataatggtgcatctacttttttaccattaattcagtatttcaatgacaactgtgtaatggatatgtttaacgaagttgaacaagaagtttatatccatactattattgttggcggtcaggcgcaagcagatacaatagaaggttttgaagatcttgttaaactagtaaaaggaacaaaagtaaaaataatagtatggattaatgaatttcagggtgtaccagcacttgaaaacattcctttaattaaaactaaattcattgaaaaaaataaggatgtcatcgctggagttgtggttattcaggacagaaaaagcgatgcctttgcttctgacatcaaaaatttaaccgaaaaatcactaacattaaaagaagcccttgaatcagaattttttggattaatggctaaatctcgtctcaagcgagtttttaacgatatatatgtgcaacttgattcaatctataacatgcagcacacagaagcataa

SEQ ID NO: 33894 - DNA, 402 bp, Escherichia coli
atgaaaaagatcgatagtttattatctccaatatgcgaggcgataaaagaaacaaattcaaaatcaaaacaggctgtcttcaatatgtatttatcgaacatacttgaagcaaaaagctattatacatgggagcaaataacagattacataaataacaaaaccaagacagaactagcccaaaagacttatataaacatgaccgagagggccaaaaaaaggcaaaaatgcactgggcaaaaagacctaaaaaaaagcaccaatatgattgaaaaaaaaatagatgaagacaacaaacaaagagggggcataaaaggatttttttcaacaatcagcgagaacaaaaacgaaatagatcacgatccaagcgcaacaaatgaaaaatttataaacaaatatctttaa

SEQ ID NO: 33895 - DNA, 387 bp, Escherichia coli
atgacaaaacaagataaagggaaaaaggctggagcttccacatcaaatgtggagagaaaacatgtgatttcactgcgattgactgatgaggaatatcagtcatttcatcaatatttaacatctctggatgttagtcgtagtgagttttttcgtatgctcatcctgaatcgtcttgatgatatcccggctttgaaacccaagcgcccgacagattacagggaattgctaagactctttaataagtcaagcaataatattaatcagatagctaaaaagattaatacagaatatcgtaatggttttatttcagaaagtacatatttacgctatcttaatgtccttgttaatattcgcgatgcgtttgtaacaggggtagataaatgttag

SEQ ID NO: 33896 - DNA, 3288 bp, Escherichia coli
atgttagtcagaatcaacggtggcaataagggtgtatgcgaataccttgaaaaaggttataagcaaggaagggaatacacccgtgatgaaattgaccatcggttagttctggatggtgatcttgcattgactgaatcagttattgacaccatacctgataatggtcaggaacgttatatccacattacgttatccttttttgaagataatgtttctgaatctaagttgcatgatgtcgtccaggaatacaagtccctcatgatgaatgcttatcatgaagatgaatataatttttatgcggaagcgcatcttccaaaaataaaacaaatgcctgattataaaacaggagaaatggttgagcgtaagcctcatattcacattgttattcctgaagttaatctggtgacagggagtaagctgaatccaagaggaatgacagaacattatatacaatatcttgatgcaatacaggagcatatcaataataaatacaatcttgtttctcctaaagatggcgtcagggttagcgatcataaccatgctaatgtattatccagggctaaaggcgatttttaccgtgagcggcatagtgactttaaaaccacggtttttgatgcactggatacagagaatatccgaacagaaaaacaatttgctgattatctttcccgttttggtgaggttaaggagtataataagggggagtctaatcgctactttggtgtgaaacttgaaggagactctaagtttactcgactcaaaagtcctttattttcacgacagtatatatctgatcgttctatcccacttttaaaacccacaaagacgcagattgagagccgtctgaaagagtggaagagttcggtcagtcatgagataaaacatattcatccggcagggcaaaaaattcgtaaagaatatgcagcacttgctggtgaagataagcaaatgtatctgaaaaaggtaattaatcgttatgacgaaaaacacaaccttcaaagacaggaccgacgacagaatagtgaccagtccggtattaaatacaataccggaaagtttgtatccggtaagacaatcggattgccacgtctgccagcacgcgaactggtttacggacttcacggaagatcaggtgggaaaagcattaataaatctcagttgttattgcagcaaaatgaatacggttatttatcaacggctggacgacaaaaagtcgatccagatcgatatgtgcgacggttgcaggatagagcaggaagaagagtagttcagtcagcgcttgaatcaaatattaaagcggcgattcagcgcagtgatgatttaccttttttgaaacaaattcgcacagaaattaatgctgaacgttatttgtccaatctgcaaacacgctttaacatagatccatcaaagcatactgtcacctatggacaggatggatctccgcgtttcagagttggcaatcgaaatatgaatgccagtgattttttaactaaacatctgaatcttgaatgggatgaggcaaaagaggtattacttgatatctggcaggatcagaaagataacaaaccttttgatgctgttattacccgtgtaaatcttacgcgtcaacaggcaaaagaaagatttatttgtttaaatgaacataaaggttgggtaaataatgagattaaatataagcataatgataatatagctaattacagggcagaactcagagggcttctggcgataagaaacaagcaggaacgggaggttgctagagggtacattatatttaaaaagctggaaagagagcgtgaaataaactcaattcgaaaggcatgttttcgcgaaataaactcatactatcaccgttggaatccagacaggagatatgatatggctttaggtgattctttaaaaaagataatccgtaatccggttgatggaaacagcatttcttccggtaatgaaaaggaagttttcagcgtagttaagcgagtacagcaatcccagcaagttcaggattatgtaaaacgtgaactaaccgatcttgttcctcataaggtcagcccaaaagaaacgcgttaccttgatccgaagacaacacagactgttttcactgataaaggaaatcatgttcgtgtaaatggtgaaattacccaggataaagctgaagcagcccttctttatgcaaaagagaaatttggcgggatgctgaaactcaatggctcggaagaatttaaggtagcctgtgcaatggcggcagccgagaaggggatgaatgttattctgcgacctgaaaaatatcatgaaatgatgcaggtccgcctccaggaactgaaagctgaacatggacatgaaaacagcgtcgaggcagagcgtcagcaacaagtcgccggacagaaaccagaacaggagcaggaaaagagagcagagcaggttaattcagtcgagaaagacacccaggctaaggaaagaacgcccgaagtagcggaatctgtacgtaatgatgataaatcgcgtgatgcagtgccggaacagcctgttaagtcagaaactgtttctcaaaaatccacgtctgaaacatccgtggtacaggaagcggaaaaacaggagtctgtgcagcagaacgtttcggctcattctgaagaacgcgagcagcagccacaagaagcgcagcaacagaagccggtaacagagaaagacgtgactactggtcaggataaacagaccggagatgagcaaagcaaatccgcgttagccactgaaaatcctcatcagcaaaataacgcatcgctacagcagctacaggaagaggcaaaagttattgccagccagcaccaggaagcccagcgtttactgaatgaagctgtagaaaatggtgcgccgaaagaagaggttgatctgctttcgaaaggggttaacagtatttcggctcgtgctcagacgattaatgaacagattaaagcctttgaggaacaacaagggcagaaaaaagctaaatcagtcgaggaaaaaaacgagaatactacagaaaagaaaaagcggactgtcaatagtgaaaaagcgatggaaagagaaattgagcgaatttctaagcaactggcgaaggaaatgaatattgacaaacaaacagtcaaagatacgctcaaattcatacgttttgaggatgtaaacgatctcaaggcagcaatgaaaaaccctgaaacggtagaggccgtgaagcgtgaaatagtgagttatgacaacgctttgaaaaatgagcgtgaacgggaaagaaacagggataacacgcggtcccgttaa

SEQ ID NO: 33897 - DNA, 270 bp, Escherichia coli
atgggtggtggtatggaaattactaaaaacagagaaacccgatttgtaactcttgcatcagactttaacaatattaaagaaatttattctgatgacgagttaaaccgtttgctggaagctgttaagaattgcccgaccataattgtgttgggttgcgcgaacaaggggaaagaaacgccacttatggcttcttgtttaaggactacaccagagcgtatttcagttgaagaattcaatgaaattaaagctatttcttctaaacagaaatga

SEQ ID NO: 33898 - DNA, 339 bp, Escherichia coli
atgagctttataaaaataaacaggcaacgtgaatttatggagcgaagtaattcaccacgtcttgtactacgaaaagaaaagagaagaaacggtattgtaaattgttatctttccaagacggtaagaggcgacgatacattcattaccatagagttaaaccctgaacacaataaaataagattaaaaacaaccaattcaccagaaggccataaaatgagtcgtggttgtttttctcttactaaagttttcgaatatatttttcatgaaaaccttcacgaagacagaattattattgaactggagaaaaaagaaaatgggtggtggtatggaaattactaa

SEQ ID NO: 33899 - DNA, 330 bp, Escherichia coli
atgaaatctcgattgctcatatcaatcacgctactttctgctctcactttcactctatctgccagcgccaaaataaaaggactatccgcagccggagatccctgtgaggtacttgtctgtatggccgaaaaagtacagggagcaccacaaccaggttgcatttcggtgaatcagagattctttaacatccgcgtctacacacctttttataatcctggtgcaacctacggcgcaagacagaattttctttatacctgttcaggttcgactgttaaccaggcaaccttaaatatgattatgcaacgttatggcagacttttttctggttaa

SEQ ID NO: 33900 - DNA, 2034 bp, Escherichia coli
atgaagaaaaagaaacttgtcctgcctgtacttatagtctggctgatggccctgacagcctccggctggctgggaagttttatactggtgaaaatcgcctcactaccgactgacaacctgcaatggagtacgtacttatccacgctggcctattatggctggcaaccatccctcaaaaaatacctgtttgcaggacttgcggggactctgcttccgttcctgattgcactcatcctgactgtcgtgatgtttgtcgccgttcgggagaaaaaaacggtgcacggtaacgccaggctggcaaatgatcgtgacctggcagacagcggtttttttcccgacgaaaaagaactgaaaaatcagaaatacccgtcactgctcataggaaaaatgcctgaaaacaaagggcgttttaaatcacgctatctgcaatacagcggacagcagtttctgatgctgtacgccccgacacgcagcggtaaaggagtctcgatcgttatgcctaacggcatctggtatacagaatcgatggtgttccttgatatcaaactggaaaactttcttgagacggcgggataccggaaaaatgtgttaaagcaggaagtttatctcttcagccctgacggctacgcgcgagaaatcggcggggaaacagtgctgacaacacaccgctacaatcccctttactatattcgccgcgatccgatataccgctttggcgatctggaaaaaatcgcggtgatcttgtttccgatgacggggggagaaaacgacacctgggtggagtccagtaaaaatgtctttatcagtctggtgctgtggttactcgataccgaacttgagggcaaatttaaagttaatatgaactcggtgatgaaactgagtattcctgctgatggttctggtctggcaaaatggatgctgaacgagatcagaagtcggggtaatgaagtactcactgaacgctggaaaacgtaccatgctttaccggaagaggaaaaacagggcaaagccccctccacctatccgttaagcgatgacactatccgcctgttccgccagttcgcagccaaagaacccaagcaacaggaaagcatcatgctcgactttaaccggactatgtcgatgtttgccaaccctgtagttgctgcggctacggaagataacgattttgatatgcgtgatgtgcgccgtaaaaaaatgacgatctactacggcatttctccaggcgcattaaagcaatatcaacgtctgactaacctgtttttttcacaactgcttaatgagaacgtgcgtactctgccagagcatgacgcaacactgaaatatcagtgcacactcatgctggacgagttcacttcaatgggccgcctcgacgtggttcaggtttccctggcattcacggcaggttataacctgcgttttgtgtttattctgcaaaacagggaacagttatttgatgaaaaacatggttacggaaagatgggagggaacaccattctgaaaaactgtgcggttgaaattttctatccacctaaaaaagtggatgaaagtgtaaaagatgtgtcggaaacaatcgggtattatgattttgtccgcactcaaataagccggacaacaggcaaaaatcccagcactacccgcaataaagttattgaaaaacgtgctgttatgctaccgcaagaaattactgatttacgggatcagaaatttaaagtaaaaggaaagaaaacaagtttttccttaccacaaatcgtaatgagtgagttttgtcgcccatttattgcacataaaattgtcagtttcgatcaaaaaaatgagtccttttttgttaacgcaagaaaatattcccgaaaaaatatcatagacacacctgtacttgatattccacagaatgaagtggttcgtcagttaatgctccagcgggaaagggaggaagcatggaaggcgacgcaacctgcttttgataaagatgattttgatgatgataaggaatattttcctggtgatgatgatggtggtggcggtggtgattaa

SEQ ID NO: 33901 - DNA, 1014 bp, Escherichia coli
atggaaacaatcaacatgtttcttgaaagtacaggcgtacgcccctttcttcaggctgaggggcttacggaaattatcgtaaaccgcccgtttgaaattattaccgaaggcgttaacggctgggaataccatgaagcgccaggggcttcatacagtgatctgcttgatctctctattgcaatcaacaaatacaacaacagcgcagaaccccttgatgccctgcaccctatcaagtcgctggttatgcctggtggtgagcgtatgcagattatcatgcctccggcctgtgaagagagatgtatctcattcaccatacgtaaaccttccctgaggcgcttcactctggaggattacgttagcagcaaccggttcagcaatgttcgcattgtgaatcaggcaaacctgagcactctgagtgcctcacaacaaaaactgcttgaccttctcgataacaccaggtgtgcccccagaacctggatcagttttttagaagctgctgtggccgccagaatgaatattctggttgtgggtggtacgggatcaggaaaaaccaccattgcaaaaaccattgcagacctgtttccccgtgatcgccgcattatcaccattgaagatgtgcacgagatgacgctgccaaaccatcgtaatcacgtccatctgttctataagcaaggcggcgtacagccccgatacctgattgaagcggcaatgcgtatgaaaccggatcatatctttctggcagaattacgtggtgatgaggcatggagttacctggaagcactgaatacaggacacgaaggcagcgtgacaaccattcacgccaacagtgccttagacgccatttcccgtcttgcgtcgattgtcaaacagtccacagtggggcttaccctggaccacagcttcatactgaaaaccatcaaaacctccatcgatattgtggtgttcttcagacatacccatatgacggagatctactacaacccgatggagaaaaatcaactactggcagcatga

SEQ ID NO: 33902 - DNA, 1224 bp, Escherichia coli
atgaaaaataacaacgatattgtgattgaaaaactcgataaaattgacacgcaggaggcggataccgacgcacaaaaccggaatttcatccactccggtaaaaaacagggaaacaaaaaggcaaaagcggtccttatacttgcaggttttgcttttgttaccgtagtcattctgacagccgttttatcaaaggtgttttcatcctcgggagaggaagaaactaccgaaactgcgaccacaaaagcacaggcagaggtctatgcacaaaatacccaggcaaaaaatcttgatgacctgaaagaaagcgtcgccagaagcatagaggaagtcaaaaacaacgttaattcagaagaggaacaagccagggaagaagcaccaccggaaaacaaggaaaataaaggtgtcactctgccagcagaaaacgaagctgataccggatatacacaaagtaatggcgatgccccacccacaccagaacagcgtcgtctgatgggaagcgtaatggttgatgacagccggatcacacagtcacagcctggaagttccggtcaaaaaacggcaggcgctacgccagcgtcagacaacacaaatgtttctggtgatggtgattttttacagggtgctgactttgctgatggctctgtatcccgcataaaaaatcgtcgctttctgctttcggctggaacaacttttccgtgcgtcctgaaaacaatgcttgtcaccacatatcctggtgtaacgctctgccagttaaccaaagatgtgatctcggatgacgggaaaacggtattaatccgtgctggcgcacaactccagggagaacagacaaaagccattacacagggaatggcacgcgtgtttgtcaactggacaatggttaaggaccgcaatgtcagagtgcggattaatgctctcggtgctgacagcctcggcgcgtcggggcttccggcgtgggtggatacacatttctgggagcgctttggtggcgcattaatgctttctctcattgaagacactctggctgccggaacctcacgtctttcccgcgaaaacaacagcgacttcactatgaacaataccaccggaacgtccagtgaactggcgaaaaccacgcttgataattcaatcaacattccgccaacaggttacgtgaatcagggcgaaatgctgactgtcattgtgccacgcaacattgatttttcttctgtatataaggtccgctga

SEQ ID NO: 33903 - DNA, 798 bp, Escherichia coli
atgatgatgcgaaaactccttttatccctggtcatatccggtatcaccatgacctgtcatgctgcaaaaacgccagcgtccgcaggttttgacagacgcgtacaacaaatcgtctataaccccaatgacgtaaccattgtcaaaacaaaagcgggagaagtaacccttatcgagcttgaagagggagaaatcatcaagagcgaagatactggtcttgctattggtgatcctgaagcctgggatccggctgtcaggggtaacactatttttctgcgtcccaaagcagcagaacctgataccaatatcgccattgtgacaaacaaacggatctactccatccagttagtcagtaccgaccagaacccgacctatttattgcgatacatctatccgaaaccgccggaacccgtgaaacccaatgtcatgacgggccggagtcgtgttgtcgcgccctgtactgaagggaatattgtaaacggtcgttatgaggtgcgtggtagcaggaaaattaaacctgaagccatctgggataacggtcgtctgacctgtttccgctggactggcgcagctgaccttccggttgtgttcaggatcttaccggacggtaaggagcaactggttaattaccatatggataaaaacatcatggttgtgcacgaaatttcgccagcttttgtactgcgtctcggaggtgaggtgatggaagtcagaacaaaccgtcatataccgcgagcctggaacgccagcggaacactgactggcgaaaccagagtggagattaataacgatgaaaaataa

SEQ ID NO: 33904 - DNA, 747 bp, Escherichia coli
atgggtttgaaagaatattttaaaagatccaaagcggaagcacgtaaaacacccgctcaaaaagaaaccgataaaaaaattgaaaaaaacgtactggacgcagcaaaagaatttgcgcgtgatcgtgataacgaactgaagcgctcactgcggatcacgcgttttgcgcttttcttttcgtccgcttctgcggctgcaatggcggttgccctcgcagtcatggccccgctgaaaacaacagaaccgtttctgttacgggtagataaaacaacgggctacacggatgtgatcaccccgttcagtcaggattccggtacatatgacgaggcggtaagccgctatttcctcacgcgctatctggagaaccgcgaaggttacgaatggtacacaattcagaacatgctgaataccgttgaactgatgtcttcctcccaggtattcgccgaatacaacaacatgattcacggcccgttatctccgctgtataagctgaagaaaagctacaaaattcttgttcgcgtgcagtccatcacctttctggatgaaaacacggtacagggacgttttgttaaagcaatcaccgatcccgatggcaaacccgcacctggatacacgccaacacaatggattgccaccatcaaatttgtatggctaaaagacaagatcgcgactgaagctgagcgccagataaacccgttcgggctggatgtgctctcataccgtgttgatccagaggtggtgaaatga

SEQ ID NO: 33905 - DNA, 144 bp, Escherichia coli
atgtataaatatatcattccggcagttgtctgcttatttctttctgcatgtaccgcaacgaatccccctgaagcacctgaagctacaggaaaatgggagccattatataccagcgtcgataacattatgaagggatataaataa

SEQ ID NO: 33906 - DNA, 1047 bp, Escherichia coli
atggcttcaaatgactccgcttttgcaaaagcgaatttcgaaatcgtccagccgatgttcaatgaattatcttcgattattcagaacagcgtaaccacaaattttcagaccattatgcaacttgtgactccattgttcggagccgccgtcattctctacggtgttttctttgcgtgggaaatcatgtacacacgcaaggatgatgtgatgatggaatccgtaaagcgtatgggcgttctgacgcttgtttttgccatgagtaccgccggaggtatgtaccttagctatatcgttcctttcgtacagggaagcggtcaggaagtggcctccaggcttattggccaggacggagccagtaccggagccgttatcgatggccttcttaacagactgatagatttaggccatgaacaatttaaggtttttcaaaaagctgatggctggtttgattcaatgggggcatggattgtttttattcttaaagccattcttcttgctcttgctggcggcggatttgttatttactgcgcagcttatttattaatggccgaaatgatggtcggcatactgctttccattggcggtgtgtttatcttattttctgcgtggcctaccacgcgcaatatgtttacagcgtgggtgggatcatgttttaactatatatttctcaatattgcctatgcctgtctgttcaaggttctgattcagtatattaataactatatcaatacaaacagcgatgatattactaaaaatatctggagcgtcctttgtgttgcagttgtattcctgattggtaaattcctccttgctcaaatatcaacgctgataagtacattaacaggcggtgtgggtattaacggtctgacaagcgctaccggagatgttataaaatctctgcgtggggctggcaacagcacacgaaatcagcttgggcttggctttaataaaacagcacaggatgcacgggcgcgtaacagtgaatatgctgccgcagcaaaagattatttatcttcccgctttggtggaaacatcaaggccggataa

SEQ ID NO: 33907 - DNA, 348 bp, Escherichia coli
atgttcaaaaaactacttggcggttttatccttgcctttgcttttttattatccggttgcgatggtgataatggtgaattagccgggacatatatagaaaaaaatcctgactctggtgatgcacctcaaaaatggattatcaaatacgacaaaaaggataattactacactcaaatatggatagaaaaagataagaaaggtaatgagcataacggaacaaccaactcattccttattagagatggagactggcttgcaggaaaagaaaaacattttattcgagtgattgataaaaacacgcttcagttaagagatgatgagaacgctttgtatatccgtacaaactga

SEQ ID NO: 33908 - DNA, 669 bp, Escherichia coli
atgaaaaagactctgacagccctgtttctgggtgccaccctgaccggatacagttctgtggcaagttctgtaggcggtgtcatcgttaaagaccctggcagcatagctaaaaccgtcgaagtaattaagaaggctgccgatcagattgctgaactgaaaaaacaggttgatctggcaaccagccagcttgaagcctataagcaggaagtgctggataccaaaagacgactggaaggtataaccgattattccgccatttttggcagtgctgaatcctacatgaaagacttctgggaagatatgaagaaggaacttaccgatgctgatattcgcagtatggcaactaaatacggctttgatacaaaagagtacgaccggatcaaacgccagtacgaatcaaagtttgaggaaatcacgaaatacgaagcgatgagtaaggacctggagaaaagcgcagaaaagataaaggcaactcaaaaggctttcagtaaagccgatacgccacaaaaacgcgaagagcttcagaataacattcttctcgaaactgccgccatgcagttaaaaattgcacagaatgaggcagaaatcaatcgtatggcccgtgaacgtaaattacgtgaggaagcggcactgataaaatatacagaagataacttttcctttaactga

SEQ ID NO: 33909 - DNA, 2430 bp, Escherichia coli
atgtcgataaagaaaataaccaataatttcatccctccttatcactcacatattcatgaaaatatcatctggcttgaagataaaaaactactgctcacttttcttattgaaggcattccctatgaaagcctgacagatgatatgattctgaacaactttaacggacaaaaagaaacacttcttggactctgtaaaagtgaaagagtttttctgtggaaacatcttgtaaaacgcgaatcacctatggatgccagatataaatttcctggcaatccttttcttcagcgcttaggtgatttctactgtgatacttttaacggagaaagatcattcagaacagattattttctcacaataggcattccttatgatgatatcgatgctggcgaaaaaaaagctaaagatatcatccggcagattgaaacaggttttaaagactacaatatttatacgcttgggatcagtgacggcggtatttccgatatttgttcaaactatctgaattatttactcaatcatgattttgagaaaataccgttatctgcaacgaagatttcagagagtattaagaacagcaaattctatttcagctttgatactcttgaaataaaaaatcgcacaggacacgataataaattttgttccaattatatcgtaaaagatgtaccccgaggctcgcagattggtcagtggaattttctgttatccctgccatttgagtttatcctgacgcaatcctttattcccgattcgctatcaaaatccagcaagaaaattgagcaacagcttaacaaactcacttccgtaaaggacgctggtaagacgcaacacaccgaactccatatggcccaggaagctatcatcaaccaggaaaccgtttttggctcctggcacagcgtcctttccgtcttcggaaacacacctgatgaagccagtgataacggttctgaagtcgcggcggaatttgtcaccagtgggcggggatttcgttttgttcgtgcagcgtctgaagcaccttatgcatggttcagtcatctgccagcctcaaaactgcgcccccttgccacacaacgcacgctcactaatgtctgctgcctgatgccgcttcataatcacagctatggcaaaaaatcaggaaatccaattggtgatggctctgccataatgccgctgaaaaccgtcactgatggtctttactggttcaacactcactacagcgcaccagggcgtaatgtaacaggacagatgatcgcggggcacggaatgctgctgggtgcgactggtgcggggaaaaccacgtttgaaatgatggccgccgcgtttatccagcgttttaacccagatatgttcgtgattgacttcaaccgctctaccgaactggcaatcagaatgttcggtggtcagtatttctctctgtctgagggtgtgtattccggcctgaaccccttccagatcggagacaatgacgatcctgaactgatggcattcctgaaagagtgggtcaaacgttgtgctgttaataacgatggcagcgactgtagcgacagtgaggctgaagagattgaccgcgccgttgaaatggtgatgaaacttgaacgtcgccagcgacgtttcgctcgtctgcaatcccgtatacaaagccccgaactgaacgtccgtctgtctaaatggtgggataatggcgctcttgcctgggctactgacagcgaagaaaataaattcgatcccaatcaatacagcaaaatcggttttgacacgactgtaatcctggaaacagttaatcaacgagatcatcctgcgtgtgaagtcattctttctgttctgtttttctacaaaaaacgaatgcagaaaggcggtaagctcatgctctccatcgttgaagagttctggaaaccctgtaactacccaatgacacaggctttaatcaaggcttcgctcaaggctggtcgtatgaagggggaaatgatgtggctcaccagtcagtcaccggaagacgcgattaactgtcaaattttcgcggctctcgttcagcagacaccgacaaaaatcctgctccctaaccctgatgccaaatacagcggctataaagagattgggctgacagaaaaagaatttcgccagcttaaaaagctgaaactcgaaagccgaacaatgctgattaagcaaagtggctcaagtgtctttgccaaaatggacctggtgggatttgacgattttctgcctgttatttcctgctcaatgaaagggattaaattgtgcgaaaaaatcagggaggaaataggctctgacgatcctgaactctggtatcccccgtttatcgaggggatttatcagatagatgacgttatacgggaagctaacagcgatatccctgaagtctggctgcccttcatgatgaaacggctcaaagacaaattgccggaaaaataa

SEQ ID NO: 33910 - DNA, 324 bp, Escherichia coli
ttggataaagaagaaattaaagcagccgaagagcttaaggcaatctttcttacctacaatggcctgaatcgtcctgcaatgatcaaaggtatgcccatcattccttttattctgtgtctgctggctctcatggtttctttttttgttggcatactgactattgatttttacgggcttattattccctccattattatcggcgtaatgatcgccatcaaacaaatgtgtgccgatgacccgaacgccatgtctgccagggcactaaaatttaaaggtctgtgccttaagggatttcgttcgaataacgttctgaaggttgaataa

SEQ ID NO: 33911 - DNA, 306 bp, Escherichia coli
gtgcataagtctattaatttatacagaatgttctttttatttgtttgtgctttttttattgcctcaaatcctgctctggcagctggtgtcggcggccttaataaaggcacaaacttcatcggtgaactgcgcctctgggcgtatggttttgttggtggtgtggcccttttacacattctctggaaagtattccaggcatacacggaaatggactcctgggctggcgttctcaaatcactgatgtatgccgcaattgccggtggttgtgtggtagctgctgaagcctgctaccagattttcaaataa

SEQ ID NO: 33912 - DNA, 582 bp, Escherichia coli
atgacactgatcagtcagtgcgcacctggtgtttctcctgaaaccatgcgtgccattattatgactgaatccggtgggaatccctacgctatagcaaatgtcaccgacggtggcagtaaatattttaccactgaagaggaggctgttaatcacgcaaaaaaactgactacagataaaaaaaatttcagtgctggcctggggcagataaacagccgtaacttccagactttaaatttaactcatgaatccgttttttctccctgtgcgaatattcgtgctgctgcggcagtactgaaaacgtgctgggatagatacgaaacaaaaggaggggaccaacaaaagatactacgtgacgctatgagttgttattactccggtaataacaaacggggttatgtaaaggaaagcaatggcaaaagttatatcgatataattgaggaaaaagccggaatacatacacattatgatattccggcaataaagtcatattcagaaacatccagccatttaatggtttccagtgatagccatgataaatgggatgtttttggtgatttcagaacacaggattttaaggagtga

SEQ ID NO: 33913 - DNA, 489 bp, Escherichia coli
atgaagcataaaaattttattcagaaatggtatgattcaacttttgagtcaattctccatgatgttaacacgattcacagtatcattgatgaacaccacaaattatggaagatccagagattaatacgtcttgtgattctattaatcattacagcattcggtttatttagcgctttccttaatagagaaaatatcttttatatatttacagtcggtttttctttgggtttaattctctatataatcgctgctattgattctatctgtcattttctccccaatcctttaagtgatcacgtaataatagaccgcgaaacaatacaatttctgattgttcttaccagccattatccagatgtgcaacaggaactatttaacagactgttatccggtaaaaaactgacgattcatgatgagcgagaaataattgatatctgctcacgaaggagcgcaacatatcatttaaccagaagtaatatccctaagtaa

SEQ ID NO: 33914 - DNA, 285 bp, Escherichia coli
atgtcacaagcaaaagcaaacctgaagaaattacgtcatcactgttatattccaccaaaacaaaaaatatccagactgtattatgttgaaaaagccttaagttctccctggatatatcgtgaacggcctgcatgcagagcagagttgctacttacacatgacacactgcttgttatttatggcctggcaaaatccggcctgattgaccgttctgaggaatcactcaacagagaaatcaaaggggtccgaaaagcgctcgcagccggacgtttccgttggtcgtga

SEQ ID NO: 33915 - DNA, 561 bp, Escherichia coli
ttgcccgttacctacattccgttttgccgcttctcccaaaccaaggtatgtgagaagaccagttacatcctttccactcaaattagtcagcgtattgtccagcggttgtttacctgccagtgcattaagcattgtcgtggcaaagttcgggtcattccccagcgccgccgccagttcgttcagtgtatccagtgccccaggtgcagaacccaccattgccgcaatcgccgatttcacaaatgccgtggtggcaatttgtgtattgttgaccgactgtgccgcagtaggtgcggttggcgttccggtgagtgccggactcgacagcggcgctttcagtgccagcgcattgttaatggtggtactgaatttcggatcattgttaatggctgcggctatttctttcagcgtgtccagcgtggctggcgcaccattaataagagccgtcagagccgcctgaacaaactcggtggtcgcaatctgcgtagtgttattccctgctgctggcgttggcgctttgggtgtcccggtaaacgtcggactttctttgggtgcatactgtga

SEQ ID NO: 33916 - DNA, 411 bp, Escherichia coli; identical to SEQ ID NO: 24223

SEQ ID NO: 33917 - DNA, 477 bp, Escherichia coli
atgcgcggtgacgaaggctatttgttggcgctggcctactccacccaacgcggttacgggcgcaatcacccgttcgcaggcgaaattcgcagtggctatatcgatatatttattgtgccggaagagctgggatttgcggtgaacgtcggcgaattgttgatgaccgagtgtgaaatggtcaacggttttatcgacccgccggatgaaccaccgcattttacacgcggctatgggctggtgttcggcatgagcgagcgcaaagcaatggcgatggcgctggttgaccgtgcgttgcaggcaccggaatacggcgagcacgcaacaggtccggcacaggatgaagagttcgtgctggcccatgccgacaacgtcgaagccgcaggctttgtttcgcatctcaaactcccgcactacgtcgatttccaggccgaactggagctactcaaacgtctgcaacaggagcagaaccatggctaa

SEQ ID NO: 33918 - DNA, 579 bp, Escherichia coli
atgtacgttgccgtgaaagggggcgaaaaggcgatcgacgccgcccacgccctgcaagagagccgacgccggggcgatactgatttgcctgaactgagcgtcgcccagattgaacagcagcttaacctcgcggtagatcgcgtgatgaccgaaggcggtattgccgaccgcgagctggccgcgctggcgctgaaacaggccagcggcgataacgtcgaagcgattttcctgttgcgcgcctaccgcaccacgctggcgaagctggcggtcagtgagccgctcgacaccaccgggatgcgtctcgaacggcgtatttcagcaatttataaagacattcccggcggccaactgcttggccccacctacgactacacccatcgcctgctcgatttcaccctgctggcaaacggcgaaacgccaacgctgacagcgaacagcaaccgtcgccacacgtcttcagcctgctggcgcgtcaggggctggcgaagtttgaagaagatagcggcgcacaaccggacgacatcacccgcacgccgccggtttatccctgttcgcgttcttcccgtctacaacaattaa

SEQ ID NO: 33919 - DNA, 777 bp, Escherichia coli
atgagcgcgttagctgtattttcgtttcaggaagagcatcaggttcgtgtagtgatgattgatagcgatccgtggtttgttgcatctgatgtgtgtatggcggcgggtattgattctacggccattagaaagttggatgaggacgaaaagggtctgcatttaatgcagacccctggcggataccagaatgtttcaatcatcaaggagtcaggtctatacaccctaatcctccgctgccgtgacgcggtgaagcaaggcacaacagcttggcggtttcgcaaatgggtaacgaacgaagtcttgccctctattcgcaaaaatggagagtacgtttacgttgagccagagccaatgcgagcagcagagccgttgaactggaggcagaaagagtatctgcgagggctgattaacgatattgcacaaagttttcaataccgaaatgcctggattagcggtgtatggttggctttgcgtcgggcgtgtcgtaatccatccccgaaccccataactgttgatgatttgccagcaataacggcagaactgcgacggattttgacggctgctgagtcggcattggggaacatgcgcacgtatgaacgagagttgttgcgtgatgttgttcgtggtggtaggcggagtatgtcgtgtggtgatttgcccatcaccgatatcaactctgatctggaaaaggcgttacccgcgcattttgaactggcagttcaaaaacttgagcagttgtccgcgcagctaaagccagcagaaatcaccaataaatag

SEQ ID NO: 33920 - DNA, 165 bp, Escherichia coli
atgttcaaattcaaatttgcggcagtcgttcgcacagacaaaaagtcacacatccatcatctttccaccatcgcgtcatctgaacgggaagctcgtcgccagttcgccagccggtttgtcctggtattgtctgcccgtattccggtgcgcgaggtggctgcatga

SEQ ID NO: 33921 - DNA, 225 bp, Escherichia coli; identical to SEQ ID NO: 33871

SEQ ID NO: 33922 - DNA, 273 bp, Escherichia coli; identical to SEQ ID NO: 33870

SEQ ID NO: 33923 - DNA, 711 bp, Escherichia coli; identical to SEQ ID NO: 33874

SEQ ID NO: 33924 - DNA, 600 bp, Escherichia coli
gtgactaatcagattatttacgacaggaaacggtctgatgtaatgattgaccttgaaacaatgggtactaatacatgtgctccaattgtttctatcggggcagtgtttttttctccagaaagtgaggaattaggtgccactttttatgtaccagtgaatctcagaagctcgatgttaaatggtggtgttgccgatggtgataccattttatggtggttgcgacagagcaaggaagccagagccgcaatttgtactaatgatgcccttgatattaaggatgcactttttgaattatcacactttattacttgccatgcttgtaatttaaaaacattgaaagtatggggaaatggagcaacgttcgataatgtaattttacgcggcgtttatgagcgcgttggcttagcctgtccgtgggaatattttaatgatcaggatgttagaacaatcgttaatcttggtcagtttattggttttaatcctaaaaaagatatgccatttgatggcgaacgacacaatgccctggctgatgctattcatcaggctaaatatgtatccgcaattttctcccgtcttgtaaaagggcaaggagaatcgtaa

SEQ ID NO: 33925 - DNA, 423 bp, Escherichia coli
atggcaaaggcttttacaccagaacagagggaagaactgaataaacaaattgtggaactcgtgcgcctgaatggacgaggaacggttaggcaacttgcggatgaaactggtattagccggtgtgctgttagtcgtttatcaagagagcttgctgccagtggtgatttgtatatctctggctccgggatatttctgtctgcacaagcacgcaaggactggcaaaacgcccgtaaaaaactatcaagagtaaagccgaagaaatcggtagtggttgatccagaccttatctggtcattacctgacggagaaatacgtcgttacgacaggcgcttgaacatgatttgtcacgattgccagaagagcgaagttatgcagcgtgtgctggcgttttatcagggaaatcttcaggaggtagtactgtga

SEQ ID NO: 33926 - DNA, 627 bp, Escherichia coli; identical to SEQ ID NO: 33869

SEQ ID NO: 33927 - DNA, 450 bp, Escherichia coli; identical to SEQ ID NO: 33876

SEQ ID NO: 33928 - DNA, 414 bp, Escherichia coli
atgagcacttttaccgacaaagaactgattaaagaaatcaaagagcgcataggcagcctggacgtgagagacaatattgagcgccgggcttatgaaatagcgttagcctcgctggaagcagaaccggtggcatggctgcatttagacaatggcttaggtattccggcaataacccggagtaaaaacattgctgacagttggttatcaaagggctggtatgttcagtcactatatgtagcccagccactgccggtggtgccggatgataatcctattcagttttctgtttcacttcctgcagcgtttggtggagataaatattttattgatggtgtatttcaacctttgagatatgagcgtgactgtgaaagggcggttgtggccgctggcggtgtagttaattgggttaagtaa

SEQ ID NO: 33929 - DNA, 219 bp, Escherichia coli; identical to SEQ ID NO: 33877

SEQ ID NO: 33930 - DNA, 990 bp, Escherichia coli; identical to SEQ ID NO: 21471

SEQ ID NO: 33931 - DNA, 1029 bp, Escherichia coli
atgggattgtttacgacccgccagttactcggttataccgaacaaaaagttaaatttcgtgcgctgtttctggagctgtttttccgccgtacggtgaatttccataccgaagaggtgatgctggacaaaattaccggaaaaacgccggtggcggcctatgtctccccggttgttgaaggaaaagtgctgcgtcatcgtggtggtgaaacccgcgtgttgcgtccgggctacgtcaagccgaaacacgaatttaattaccagcaggcggttgagcgccttcctggtgaagatccatctcaactgaatgatccggcttaccgccgtctgcgtatcattaccgataacctcaaacaggaagagcacgcgattgtccaggtggaagaaatgcaggcggtaaatgctgtgttgtatggcaaatacaccatggaaggagaccagttcgagaaaattgaggtcgattttggcaggtcgacgaagaataacatcactcagggtagtggtaaggagtggtcaaaacaggatcgtgacacgttcgatcctacacatgatattgacctctactgcgacctggccagcggtcttgtgaatattgccattatggacggtaccgtctggcgtcttctgaatggttttaagctgttccgcgaaaaactggatacccgtcgcggttcaaattctcaactcgaaacggcagtgaaagatctgggcgcagtggtgtccttcaaggggtattacggcgatctggccattgtggtggcgaaaacgtcttatatagcagaagacggtatcgaaaaacgttatcttccagatggcatgctggttctggggaatactgctgcagatgggatccgttgttacggtgccattcaggatgctcaggcgttgtccgaaggtgtggtggcctcttcccgttatccgaaacactggctgacggtaggggatcccgcccgtgaatttaccatgacgcagtccgcgccgctgatggtgttgccggacccggatgagtttgtggtggtacaggtgaaataa

SEQ ID NO: 33932 - DNA, 684 bp, Escherichia coli
atgtccgttaatgaatcagaagagaggttgcttaactccacaaagaaaacatttctgtcaatgtggtctcacagcaatattttctataagaaaggaaaggaaaggaaaggaaaggaaaggaaaggaaaggaaaggaaaggaaaggaattttgcgatgtaatggtcgtctttggcaatgatgtaatcatcatgtcagataaacttattaattataatattgaaattgacgaaaaaatcgcatggaatagatggtataaaagtgctatcgaaagcagcataaaacagctaaatggtgcatataaccatataaactcatatcccgacaatctatatactgatgctcaagcaacagagccattctcaatggaattaccacattcggatgaaatatgcattcatttaattgctatcgcaaatggttgctctaacgcatgctatagaaaatacggtcgctatggattaaatattgatacagcatgtaccggaaaagacaccttatttactataggtatacccacaagaaaattcgtccatatattcaatgatagcagtctagataaaatatttacatgtttagatacaaccagagatttcattgattacattcaagctagggaaaacttacttacaacttcagataagtacattaaaatatactcaataaacctcaagatgcgggtgtga

SEQ ID NO: 33933 - DNA, 423 bp, Escherichia coli
atgttcctgaaaaccgaatcatttgaacataacggtgtgaccgtcacgctttctgaactgtcagccctgcagcgtattgagcatctcgccctgatgaaacggcaggcagaacaggcggagtcagacagcaaccggaagtttactgtggaagacgccatcagaaccggcgcgtttctggtggcgatgtccctgtggcataaccatccgcagaagacgcagatgccgtccatgaatgaagccgttaaacagattgagcaggaagtgcttaccacctggcccacggaggcaatttctcatgctgaaaacgtggtgtaccggctgtccggtatgtatgagtttgttgtgaataatacccctgaacagacagaggacgccgggcctgcagagcctgtttctgcgggaaagtgttcgacggtgagctga

SEQ ID NO: 33934 - DNA, 222 bp, Escherichia coli
atgcgcgtgcccgttacggggattttttacggtgatattcggggccggacagttccggtcgctccagtctatcgctgcgcccgtccggtccacgtcaaaaacaagccagtgctgcgcatgtggctggttctgctggatgaaacgggcaaggatggcgatatctttcggcagaatgcgaacgccgtacgtgaaatcgttcgtacagtacggtttgtgcggtaa

SEQ ID NO: 33935 - DNA, 192 bp, Escherichia coli
gtgactaaacaggaaaaaacagcccttaacatggcgcgctttatcagaaaccagacattaacgctgctggaaaagctcaacgaactggacgcggatgaacaggcagacatctgtgaatcgcttcacgaccacgccgatgagctttaccgcagctgcctcgcacgcttcggggatgacggtgaaaacctctga

SEQ ID NO: 33936 - DNA, 657 bp, Escherichia coli
gtggaaaaagagtttaacgatcgcacgggtaaactattaaccgccacgcaatacgttaataataaacgaaatggcacggaggaaacttatgatcaaaatggaataaaatatattacgtgctatcaaaatgatgaggaattatcgtctttatacactccaacacaaataaaagataatgcaacaaaaggcaactccagcgctcaatttacattaggaaaatacgaattcacctgtgcaaatatagatgaagggattaaatggttaaccaaatcggcagagcaaaaaaacactgatgcgatatactttttagctacagcctacaaaggcaatggcatacctgcaaacaatgaaaaatacataacatatctgcaacaagcagcaatgctgggcaatagtaatgcacaggcggaaattggctatttatatctcatcggaaaagaactaccacagaatctgcctgatgctggtgtctggtttaaaaaagcagctgctcagggtaattttgttgcacatttctacctgggaagaatgtatcaaaatggtgatggcgttgagaaaaatatggaaaaagccaggtttcatctatctaatgcagcagaaggtggaataaaacctgcgcttaaagcattaaatgaacttgaacatcaaacaaaataa

SEQ ID NO: 33937 - DNA, 567 bp, Escherichia coli
atgaattggctcactaataaggtaatatctgaaagtgatgataaatatgggttgataaagggggttgtaggtaggcatgagaatgcgccacttggtgcagacgtattatgccaagctcgtaaacagattcaaaatggatggaatgacaaaatatgggttagtattgaagaattggctgaacttgaaggtatctttcaacaggtggctattaaagttttaagtgataaaatatattttgattatcatcttgaatctcatatatttttcgaattaaagagagtttcatctcaatttacatcagagtttattgcttctgtattatcaagtgatggcctgattaggatgtgtgagattattggtgaaacaggtagtgattcaacaaatggcccttattttaagtttgatgaaatttacttcggggaaatacttgatgtgaatgaacttcgaaataaagcgaaaaatttagatttttcaatttatcccacacgcattcaagctgtacttaagagtattctggatggacaaaaatattatttgagagatgcaactgttggtgaagattggtaa

SEQ ID NO: 33938 - DNA, 183 bp, Escherichia coli
atgaatctggacgagcaagatgcacaaactattagctcatacataagggcatcaagaccagattacaaaggtccggtgttcgtagatttatctcgccttgaagagatttacatgtgggaagcaaggctacttacgcatctttttattcgcaagatgactatcaacattacaaaaccaatgtaa

SEQ ID NO: 33939 - DNA, 216 bp, Escherichia coli
atgagcacactcgcagaccttattcatgccgatatgtcggaagatggagcaaggcgtaataggtactggaaatcatcaagccttccagtttgtgaaagattcaaccacaggccaaaaccaaaacgtagccggcgagacaaagtgttgaaaaaactcatgcaaattaacatggctggttttgtcagattcgtgagtgaaacgactaacggggattga

SEQ ID NO: 33940 - DNA, 288 bp, Escherichia coli
atggacgaatcaagaaagcagtttgaagaatggtttgaaaattacaccggatgtgatcccaaaaataaaatatacgccaatatggttgagatgtattggcaagcgtggcaggcatcgcgagcagctattgaactggatatcgactggcccgaatcgaatgacgacttttggaaagatggtgaagaaggtgcttatgcgatgggttatgaggatgggagagacaaaacggtaattgcagtaatgaaagctatcagagccgctagaattaaagagaagaattttcgatga

SEQ ID NO: 33941 - DNA, 411 bp, Escherichia coli
atgaagcaaacaatcttcctccgtggtaaacaacaacagcaagccgcaatcaacgccatcctcgcaacaccactcgataaagacaagccagttaccatccgcattactgactacaagcgcaaccttgaccagaacgcaaaatttcacgcgatggtcgcagatatcgctaggcaagttcagtggcgcgataaatggttaaaaccggaacaatggaaggttttgttgatcagcggtcatgcagtggcaacaaaacaggaagctgatgttttgcccgggcttgaaggcgaatacgtcaacattcgcgaaagcagcgcgcagatgagtgtgaagcgtatggcaagtctgattgagtacacgacagcatgggctattggtcagggtgtcagatttaccgacaggaggtacgaatga

SEQ ID NO: 33942 - DNA, 675 bp, Escherichia coli
atgtgtggacgattttcacagtcaatgacgcgtgaagattatcttgccctgctcgctgatgaatcagaacgcgacatcccatacgatccagaacccatcggaagattcaacgtagcgccaagaacaaaagttctgcttctgagcgaacgtgatgagcagttgcacctggatccagttatctggggatacgcccccggttggtgggataaaccgccgctcattaacgcacggtctgaaactgcagccaccagcagaatgtttaaaccgctctggcagcatggtcgggcaatctgttttgccgatggctggtttgagtggaaaaaagaaggcgaccagaaacaaccctactttattcaccgggcagacggtcagccgatttttatggcggcgatcggcagcacaccattcgaacgtggagatgaagcagaaggcttcctgatagttacagctgcggccgacaaaggactggtagatattcacgacaggcggccactggtactgtcaccagaagccgctcgcgaatggatgaggcaggacgttggagggaaagaagcagcggaaattgcagccgacggttccgtgccggctgataaatttatatggcatgccgtaacgcgtgccgtcgggaatatgaaaaaccaaggcaacgagctaattcttccagttaagacctaa

SEQ ID NO: 33943 - DNA, 303 bp, Escherichia coli
atgaaaaactactactccatttataaatctggtgattattggattataaaaacatccaaaagcattgatcaacttaacaaaaatcagttcaaaacacaaaaagatgctatagctgccgccaaaaaattaatcaagaatggtggtattattgcagtgcatgcttcaagtggagaagtaagagatgtaatatcgcagccgagtagttcttggggaataaaaaaagccaaaacaacttccagtaaggttagcaaacagtctgtattcaagaccttagcaaataaaattgaaaaagataaggtttaa

SEQ ID NO: 33944 - DNA, 621 bp, Escherichia coli
atgacatacgataccaatgtttttataaattgtccgtttgataattcttatgatcctttctttgatgcagcattatttgccatatatagatgtaatttcaaacctcgatgtgccctagaaataaatgacgctggagaccaacgtattgacaaaattaataatataattaaagaatgtaagattggtattcatgatatatcaaggacagagttggatgatcatagtaatctgccacgatttaatatgcctcttgagttggggttatttttaggagctaaaaaattcagttctgcaaaaaagcaaaagagcaaacacaccatcattgttgatcgtgagaggcatagatatcagatgtatatttcagatatttccggccaagacattatgactcataacaataaccctgaggagttaatcagaattattcgtcatgctcttaactcttatagaattgtagaagcattaccttcagcacaaattatcatcgatgattacaatgaattccttcgagttaagcctgatatttgtactgattcgcagctagacattaatgacctaacatatagtgacaagaccagaataatcgagttatatctggagtttaaatcagcagccaattga

SEQ ID NO: 33945 - DNA, 363 bp, Escherichia coli
atgaatttttcttacacaaaacaggatggtcataccaaacgctgccttgtcagagcattcaatgttaatacagcaacaacagatatactcttcgaccaaatttcaaattctggtaaatttattgttgacactgtttttaaaataaacaatgaacaacatttaatactgaaagagttttctacaaataataaaagtcattacttacactttgcattatataatccaaaagaacaagtatcgatcacaccaaaaataaaaaccgcaagcgatcttcttgatgttgaaaaccttgacaatttgcacgcttttttatatgtaaaagaaaattgcatctctaatgcaaatatcaacaaattggtgtga

SEQ ID NO: 33946 - DNA, 480 bp, Escherichia coli
atgcaaatatcaacaaattggtgtgagattaaaatcgctaaaatattcgagcaatttggtataaaaataacaccatcagcaattttgcaaaaaaatgtcattcaacgaattaaagatgataaacttagggctttgcatcttaatattagcgttgatgcttctaattttgtgaaaacgcccagctttatagactctatttttcagaaagaacccaaacttaaagctagaggtatttcaggacatttaactcttgatgcaaaaggaaatgctgaactagcacaatctattgaaaccaaccctattggttggataaatgatttggattctgatttttatatagaaacaaaaaaaggagagaaaataactagtgacgacattaagttaacaaaagtttattatacagtcccttatggttcaaaatctattaattcaaaatatgcgaaagaaattctagaggactttgctcaaaaagagctataa

SEQ ID NO: 33947 - DNA, 486 bp, Escherichia coli
atgttaaaatcactcaattactcaggtatatcattaactttgttaaacattttagcctcagtattattttcaattttcctcacacatactttaacgaacaatactgacgcattaaatttggtcgccaatgtattttctatcctatctggttttcttttgttggttatcacaatgtctggtgaaaactctactctgatgaacaacttaagcaaattagacgctgcaaatcaagaaatacgtttcctcatgcgttttaacaaatattatgctttattcttgttatatattttaacattagctttaatttttgttttttatttaatatccaaggataaagaaaacacatctcaatacttcattctgtttaagaagtcaattggttacattatctcttttttaacttgtttttcttttatacaatcaacattcatcccactaaaaataaaagaattatttaaagagaaaagacaacttaataaaaaatag

SEQ ID NO: 33948 - DNA, 774 bp, Escherichia coli
atgtttgacacaaaacaacttcgatatagtggaaaggatggagtctatttccatctgcaagataatccagataactttttgacattatctgcgacagagaatatggagtatgattcacctatgatggtgacgactcaagcaatgcaatctggacagactgtaactgataacgttcaacgtgctccaaagactattactatctctggtgttgttgtagtgggctacgaaggtagcctattacgtacacgtcaaggccaacttgtagaaaactttattgacactgtagaaacttggcgagaccagaaacagattatcaccgtagttgctaaggatggaatctctatcactgactcagtaattactcagtttaaagcatctaaagaacatactatttcaaatggtttacgtattcagatgacattccaaggtgtagagttccgttctattgttggtcaaactgatgtttcatcagcaactggtaagaccactactacaaatgatggtggtgttacttcaaagaagaatatcggcaatgtaaccacctcacgcaatgaaacacctatgctgacctgcaaagagctatttagctattcggcaagcgagctatcagatgaagcgttaaaagcccgtgtagcatgttctaagaacgttagcgttaagaatggtgaaagtaccttcacagactcagctaattcaggtgctgcaaagctactcaaggcgggtaacgctctacggaaatactctgtgaaccctaacaagcgcggtacttattag

SEQ ID NO: 33949 - DNA, 150 bp, Escherichia coli
atgatagatgcccaaggttctgtccctggaataagttttgctacactgaagagattggagtatgcaattaattcttttgaagcttccaaagcagcttttgaattgtctttaatatttagttgtgaagagaactgtaataaaaaatcctga

SEQ ID NO: 33950 - DNA, 705 bp, Escherichia coli
atgagtgaagatagtgttgtggattcaaccatacagggactgaaagagaggctgtcaagcccattatggggatatatcattctttcgtgggtagggtttaactggaaacacattgcagtgatgtgccttagcaaggctccggtggaagtccgtattcaccagattaccgcatctgattttttctacattaagtacttaattctcccatgcttggttggattcgtgttgtcgtctatcttcccgtacataaatcaagcctctatgtggcttcagtcaaaagcgcttgaaatgaagataaagagaaaagttaaggctgataagctggaagagatggagttagcaacgcagaatctggaaattgagagagttgtgcaagagaaggaaagggaaaaaataaatactaaagatatggaagaaagggcggaatctttacgggaggacatgatgagcattgaagtagaggttgctcaattgaaatcagaacgttcacagattcaaagtcagatagaagcatctcttcagttaattgtccaaattgaggacattgttaaaggggtggattccggcaagtatacagacgaagactttaggtcattggtcaaagaatcagtgaacaaaagtcttcttgatgaagccagaagcacttatcaagcacaaaagtttcttgatgaaatgggtaaagcatcaagccttgaaaacaaatag

SEQ ID NO: 33951 - DNA, 546 bp, Escherichia coli
atggacaacattggctatattcgagtttcatcagtacagcaaatcacagaccgtcaacttgaaggggtcacactggataaggtattcattgacaaggcatctggaaagaatacagaccgtccacaactaaaagctatgctcgactatgttcgtgaaggtgatgttatccatgtacatgacctgtcacgtttagggcgttctaccgtggatgtattaacgctggtggataaactttcacagaaaggtatcaaggttcacttccacaaagaaggtctgataactggtgacgataaccccacgtctaagatgattctcacaatcttttcagcggtagctgaagctgaacgtaaaatgatgcttgagcgtcaacgagaaggctatgaagctgctaaagctgctggtcgtgtagttggaaggggtaacggtaaagcggttgacagagaaggtatcaaggctgctcttgctgctggtgactcaattgctaaagtagctgcacaattcaacattgctaagtcaactgtgcagcgtattaagtctgaatcataa

SEQ ID NO: 33952 - DNA, 387 bp, Escherichia coli
atgccaaccagaaagagcacgaagaatactattaaaaattatctggctaactttgacagctacgagcaattaccaagcaagcttgatgatttttttattggattctgtagaagtgaaggtcacccgaaatataacaaaaaactattttatcttctaaagaatcttgatgaaattaactcatccactgtgacaaatcatcttcagcgtcaagcaaccagacttagccatgaactaccaactgatgcctattgtgcgttgcttgctgtgatgtgcgcgaaattaattagcattgttgaacatcacattaccgttggaaatatcgaaccaatggaaaacgaacaaacagactttgaatttgacccttatctaattgcagaaggattttaa

SEQ ID NO: 33953 - DNA, 279 bp, Escherichia coli
atgaacagacacacactgacaagaatttcagaagaagcctttaacgagcttaacagaattaaacaaacgaccagcttaccccacaaaacaatcatgcagcttgcgattaaccgtgatatttccgaagaggatttaatcagaatccctgtagcgaaaggacgcaagcatattcgaattgaacgagaagcgcttaatgctcttaaagctgagaataaactaccagttgatattgcccgtctattgagtctgaagattcacaagcttgctgcggaggtttaa

SEQ ID NO: 33954 - DNA, 324 bp, Escherichia coli
atgaacgaatacccattacaaattatgattgataacgacactgccatgatgattcaggctttcactgatgcaggtgtggcaattgattttgataagttgttagctttgatggctgagaactcagaagaaattgaagactttgttcagtcgataggatgtgacgaaccacgaatgatgttaccaattacagatagcaacatgaagcggcttattatcgaagaaacaaaccgatacagcgttagccctgaaaaatacatgaaagcagctattgcgattctgtactttgacaatttacttttgacggattctgtgagggttcactaa

SEQ ID NO: 33955 - DNA, 504 bp, Escherichia coli
ttgcttgagcttgaaaagaaatactatccggttttgaaagcacagcgtattaagcttgatgctacttatgacaaggttactcagcttcaagcagctattgaacctactgattttgagattcaggatgaaattgaacaaaagccatacgcatattttgattatcaatataatgacggttacggcgttttccctgagcaaattgcagacgtgattaataatattcctgaaggttttagggtcgctaagattgttaaagcttttcgtggtagtggtgcatttgtcttcatgactgacaagacccgggaagaattaaatgaagttgccagacaaaatattatgaagtcccgtaacgaggttattgatactgcaaagaaagaacttgctaaccagcttggaactatgaaaacgcttattggtgaatacgaaggctttaagaagagtgctctacaggctgatattgagcagttaacgaagatttctcagaaatacgcaaaggctatttaa

SEQ ID NO: 33956 - DNA, 222 bp, Escherichia coli
atgtatgaagaacgtttagagactatcaaggcagtttgtgaaaaacttaaaaaccaaccacgcaagccaaagacagtaaaaagcaagcgtcaatctgtcacctcaaacaataaaacaaagattcgcaaaatcccttcgtggtgcattggccgtgttccggttggttcaagaattatttgtgaggatggtgattatcattgggtgtcagttgtggttagttag

SEQ ID NO: 33957 - DNA, 513 bp, Escherichia coli
gtgacgcaaatgggcgcgcaggtttctcacgggcaactggaaaccatcctcaactacattgatatcggtaaaaaagagggcgctgatgtgctcaccggcgggcgacgcaagctgctggaaggcgaactgaaagacggctactacctcgaaccgacgattctgtttggtcagaacaatatgcgcgtgttccaggaggagatttttggcccggtgctggcggtaaccaccttcaaaacgatagaagaagcgctggagctggcgaacgatacgcaatatggcctgggcgcgggcgtctggagccgcaacggtaatctggcctataagatggggcgcggcattcaggctgggcgcgtgtggaccaactgttatcacgcttacccggcacatgcggcgtttggcggctacaaacaatcaggcattggccgcgaaacccacaaaatgatgcttgagcattaccagcaaaccaagtgcctgctggtgagctactcggataaaccgttggggctgttctga

SEQ ID NO: 33958 - DNA, 426 bp, Escherichia coli; identical to SEQ ID NO: 30526

SEQ ID NO: 33959 - DNA, 192 bp, Escherichia coli; identical to SEQ ID NO: 12354

SEQ ID NO: 33960 - DNA, 2190 bp, Escherichia coli
gtgcgccctgcggggctaaaagaaaacggcaacaacgacacgatggcaatttatcatctcagcatgaagattctttccagaagcaagggctacagcgccgttgcttctgctgcctatcgtgccggagaaaaaatactggatgagcgcaccggagtgattcacgactacacccgcaaaaacggtgtagccagcgcagtgattctgacgccagcaaacgccccagcatggtgtgcgaaccgcgccgaactctggaatgctgttgaaaaagccgagcggcggaaaaactcacaacttgcgcgggagttcgaactcgccatcccccgtgaactggcgcaggatgccgcacgggaaacagttctcaacttcgtaagggaaaactttgtcagtcgcggcatgatcgccgacgtggcctttcacaatctgggcgggtcaaacccacacgcgcacatcatgctatccatgagggcaatcacgcctgacggcttcggggagaaagtccgtgagtggaatgactggactcacgccgaaacatggcggggatcatgggcagaccatgcgaacagggcgctggcgaacgccggttatcaggaagagatagaccatcgttcatacgagcgacagggggttgagaaaacgcctggcattcacctcggaaagtcggcctgtgcgatggaaaagtggggcatcgaaacagaacgcggcgaacagaatcgcctgattaacaggcttaacctggaaatacaggtttcccgcgacgaactcaggaacagtgagctgacagagcccgcacgccgtatggctgaccttctgaatattgagcttcctgacaacgcaacttcgtacatactgcatgacatcatcgaagcgttgccgacggacagtaacgcagcatggaaactcaccagtaaagccatgtcgatgatggcagatatgcaggcgacgcgcagacgctgggaagatctgaacaccgaacgaaaggaagcgatgagccatgctgccagcctgaaaaaatcatcgccgttttcgtccggtttttcccgtattcccctgatgcaatgggttgcaccggaatacggccgcgaacaggaaaaaatccagtcgttgagccagcgcatggaaaaattgcggcagcatcactggaaggttgagaaacaggacattcccgcgagtcaaaaagcatttgaaacacagtggcagcagtggggtgcatctggccttgcagatctccgagaacagttgcgtaaacgtgaagaggaattgcgccggaaggagcaggaggaaacagaacgtcgtcgggcggagcagctcaggagaaatgacaatgccgttatggattcaggggtactgaaagcagtcgttacggggtatggcgaggcccccatgccaggtaacggggaaatgacctgttaccttctgcttcacaaccggaacggagaatatacgctctgggggaacgaactggagaaataccgcgccagaatttttgagagtgttgatttaatgcgtgacaggagtggttatatctgtgagcgaagcgaaatcggtcaacgtccaccactgcaacatgtttattcctctgcgacctttgagcaactgctgacgcaggtttgccagacatggccgcaacatacccgcgatctccgccagccgaagacatggccggagtctttctgtcttggagaagaccgccagccagccatgccatcactggcggcaaggaaggtggattttacgcagggacgtctgccaccgactctgatgccggtaatgagttctgtcgaccgtgaaacccgccagcttcagcttttgctggtcatgggtgtggatgactctatgggcggtgttgtccggcttaatggtacgctgtatcccgcgtttgccgtccccacagccgacaacagccagctggtaatcaatgcactgaccgacaaaggtttacgctttgcaggctatggtgaagcggtaaaccacgatgctgacagtccggcacgtcctgcgccggaacttatgcagtttcatctgaaaacctggagcgaaccgctttttgctatcgtcaacacgccagaaaaacagccggatcatctgttccgctcgctgggctttgagcgcacctgggatgaatggcaacgtgatgaatatgcccgaacacacgccaccgagaggagacatgatcgcggttggtcacagtga

SEQ ID NO: 33961 - DNA, 162 bp, Escherichia coli; identical to SEQ ID NO: 31288

SEQ ID NO: 33962 - DNA, 786 bp, Escherichia coli
atggacgaaaagaaacttaaagcccttgcggctgaactggccaaaggccttaaaaccgaagccgacctcaaccagttttcacgcatgttgacaaagcttaccgtcgaaacggcgctcaatgcagaactgactgaccatctcggtcatgagaaaaatgctcctaaatcaggctctaatacccgtaatggctactcgtcaaaaacggtattgtgcgatgatggcgagatcgaacttaacacgccgcgtgaccgtgaaaataccttcgaaccgcaactaattaagaagcatcagacacgcatcacccagatggacagccagattttgtccctgtatgccaaaggcatgactacgcgggaaatcgttgccacgttcaaagaaatgtacgacgccgatgtctcgcccacgctgatatccaaagtgaccgatgcggttaaagaacaggtctctgaatggcaaaatcgaccgttggatgcactgtatcccattgtttatcttgactgtattgtggttaaggttcgtcacggcgggagtgtcattaacaaagcggtgttcctcgcgctgggcatcaataccgacggtcagaaagagctgctgggtatgtggcaggcagaaaatgaaggtgcaaagttctggctgggtgtactgactgagctgaaaaatcgtggccttcaggacatcctgattgcctgcgtggacggcctgaaaggcttcccggaagcgataaatagcgtgtacccgcagacgcatattcagctctgcatcatccatatgtgcgcaacagcctga

SEQ ID NO: 33963 - DNA, 339 bp, Escherichia coli
atggcgttggataagtttgcaggcgtctgggatgaaaaatacccgcaaatcagcaagagctggcgcacacactgggaaaatctcaacaccttcttcggttacccaccggatatccgcaaggccatctacacgacgaatgccatcgaatcgctgaacagcgtcattcggcaggcgataaagaagcgcaaggtgttcccaacggacgactcggtgcgaaaagtgatttatctggcgatacagtcggcgtcaaaaaaatggagtatgccaatccagaactggcggctggcaatgagccgttttattatcgagtttggtgaccgccttagcgagcacctttaa

SEQ ID NO: 33964 - DNA, 435 bp, Escherichia coli
atggaggaaagaacggagaccgtcacccgtcgccgtcggcagagtggtttatggggaaagatttgtggagcgtttggcaccagtgactggggctgggaaacctataaagaggatgtgagccgcagtgttatcaatatcaacaccgtcaggaaggaagttatgtcactgacccgggcatatttcggggagctgcaggcatccattgagcaggatattaaccagcccgtccgccaggaaatcgatgcctttttctgcgcattcagggagaaagttgaacaactgcgtaacacgctgattcagagctctgaagatcataaacgcgatcagcaggcacaggaacggcttaccaggcgacttcaggcattaaatgaaagggttcctgagctcattactgacagtaaggcgctgagggaagagctggagacaatgctgtga

SEQ ID NO: 33965 - DNA, 387 bp, Escherichia coli
atgacgggcactgatttttctgctgacggactgatgagacgtgatgtcactggcggtaataatcaggggaacgctgtagcctccctgcacatgaccatcatgatgaacaggattagcactgtcgctgaccgacagaccatggtcagaaaagtaaagcatggcaaaatgacgggaatgccggcgaaggataccatcaagctgcccgagaaagttatccagtttactgatgctggcgaggtaacaggcaatcttccgtgggaactgctcctggtaattattcggccaggagttaagccggtcacacggattcggatgagaacccatcatgtgcaggaaaatgaccttcggagaggatgtatccgccagcgcacgttctgtttcctgtaa

SEQ ID NO: 33966 - DNA, 429 bp, Escherichia coli
atgaaactcatcagtaacgatctgcgcgatggcgataatatttcaccgcatctggcgtgggatgatgttcctgtgggaacgaaaagttttgttgtcacctgctatgacccggatgcgccaaccggctccggctggtggcactgggtagttgttaatttacccgctgatacccgcgtattaccgcaagggtttggctctggtctggtagctatgccagacggcgttttgcagacgcgtaccgactttggtaaaaccgggtacgatggcgcagcgccgccgaaaggcgaaacccatcgctacatttttaccgttcacgcgctggatgtagaacgtattgatgtcgatgaaggtgccagcggcgcgatggtcgggtttaacgttcattttcactctctggcgagtgcctcgattactgcgatgtttagttaa

SEQ ID NO: 33967 - DNA, 1683 bp, Escherichia coli
atggttacctggacccaaatgtatatgccgatgggaggactggggctatccgctctggtcgccctgatcccgataatattcttcttcgttgcactcgcggtattacgtctgaaaggacatgtcgccggagcaataacccttatattatctattctgattgcgatattcgcctttaaaatgccgattgatatggcatttgctgctgcgggctatggctttatttatggattatggcctattgcgtggattattgttgcggcggtgttcctctataaattaaccgttgccagcggtcagttcgatattatccgcagctcggttatctccatcactgacgatcagcgtttgcaggtgttactgattggtttctcctttggcgcgctgctggaaggggcggctggctttggtgcgccggtggcgattaccggtgcgctgctggtgggcctgggcttcaaaccgttatacgcggcggggctgtgtctgattgccaacactgcgccggtggcgtttggtgcgttgggcgtgccgattctggtcgccggtcaggtaacgggaatcgatccgttccacattggcgcaatggcgggacgtcagttaccgttcctgtcggttcttgtgccgttctggctggtagcaatgatggacggctggaaaggggtgaaagagacgtggccagcggcgctggttgctgggggaagcttcgctgtcacgcagttctttacctctaactatattggtccggaactgccggatattacttcggcgctggtgagtatcgtctcactcgctttattccttaaagtctggcggccgaaaaataccgaaacggcaatcagcatgggacaatccgcaggtgcgatggtggtgaataaaccatcttctggcggtcccgtgccttcagaatatagtctggggcaaatcattcgtgcgtggtcaccgtttttaatcttaacggtgctggtcaccatctggaccatgaagccgtttaaagcgttatttgctccgggcggcgcgttttattcactggtgattaatttccagatccctcatttgcatcaacaagtgttgaaagcggcacccattgtcgcccaaccaacgccaatggatgcggtgtttaaattcgaccctctctcggctggcggcaccgctatttttattgcggcgattatctctatcttcatcctcggcatgggcatcaagaaagggattggcgtctttgccgaaacgctaattagtctgaagtggccgatattgtcgattggcatggtgctggcgttcgccttcgtcaccaactattccggcatgtccaccacgctggcgctggtactggcaggtacaggcgtgatgttcccgtttttctcaccgtttctcggctggctgggcgtattccttaccggctcggacacctcctctaacgctctgtttggttcactgcaatcgaccacggcgcagcaaatcaacgtctctgacactctgctggtggcagcaaataccagcggcggcgtaactggcaagatgatttctccgcaatctatcgccgtggcctgcgccgcgacgggcatggtgggccgagaatctgaactgttccgctacaccgtgaagcacagtctgatctttgccagtgtgatcggcattatcacgctgttgcaggcgtatgtgtttaccgggatgttagtttcgtaa

SEQ ID NO: 33968 - DNA, 2208 bp, Escherichia coli
atggaacttagtctaaaaaatgtaacaagctacgacaaaaataaatatacgaaaatatccctcgaaaaaagaataaatatcctttacgggcaaaacggagctgggaaatctaccatatcaaattttttctataatccagcagacgatgactatagggactgccgctgcacaaacattaataactatcgtccattggtttataatacaaagttcattgaagacaacttctttgataaagatgttcaaaaagggatttttacattaagcaaagaaaataccgagatcgaaaaagagataagtaagaaaagagaaatagttaaaacattaaaaataaaactagaggcaacaaaaacaaattatcaaaaaattaaagaccgcaatcatgatgcagaaacaagttgtactgaatcaatatggttaaataccgaatacataagaaactctgatgtcaactcattaatggcagggtaccttaagaataaaagaaaccttttcacaaaggtaaagtcttctattagattacctgatatagatttaaatcaattattaactgactacagagagttattgaatcataaaaacaccaccatacaaacaatatctccatataatccttaccctatttcttttgatgatgaaaatttattaaagactcctgtcattgattctagcaatagctatctatcagaaacaatcaaaaagcttcagaatctcgattgggttaaaaaaggtaaagaaaattatttagttggcgacatttgccctttttgtcaaaaagaaaccattgatgataaattcacagaggcgctcgagcaaatttttgatgagagctacgctcagaaaataacatcaattgaaaaattaaaatatatttatgaattaactactcaagaacaacttcaattactaaaaacacagttaaatgactgtacagcaatctcaattgaagaaagaaaaactagtcttgctcacatttcttcccttgagaaaatgctaaaaagtaacattgagttaattaataacaagatacaaaacccgtcactcagcgtaactcttgataaagataaagatattgaggaatctcttctaaaagacataaaacaatataactctagaattaatgaccttaatgaaaaggtaaaacaatttaaccttactcaagataaaataaaaaatcagttttggggagcattgagaaactaccgcaatacagactttgaggttttagagaaaattcaagccgaaaacgacatcattatcaagagtctcgaagaaagcattgattctattaacaaagaaatcaaacacactgatgatgaaataaaggaattaagaaataaaacatccaatatcgacacaacaatctcctcgataaactcaaaattaaaaaaccttggcattacctgtttctacattgataaacatccaaccataaaaaatagtttcgttatagttcgctcagataatacaccaagtaaaaatgtatatagatctcttagcgaaggtgaaaaaactctcattacatttctctattttattgaatattgtaagggacaaacaaacacagatgaattcgacaaccgagacagtttaatcgtcattgacgatcctatttcaagtctctctcagaactatatctatgatatagcatcgatgattcactatgacattttcacttctgctaataaagtgataatcctcactcataatctatatttttttcatgagctaataaagttagctccaatttcagaaaggaaattcaatagcacctatcagctttttagaataacaaaaaacctacatagttctttttctaacatcagcagagatagtttgcaaaatgaatatcaatctttatggcaaatactcaaggatgccagagatggaaaagttcacaatgtagttatccctaatacaatgagaaacatcttagaatattactttgcatttgttcataaaactaacgagttacaagatgaattgaacaggcttgcacaaaatgaaagcaatagtaatttcaaggctttctatagatatataaatagaggttcacactcagattcgataaacataacagatatgggtgaaataacacccgacatatacatcacacaatttaaagagatatttagacttatgggagatatttcacattttaataaaatgtatgaagagaaaaagaatatagaagacactaccgcttag

SEQ ID NO: 33969 - DNA, 387 bp, Escherichia coli
atgttgcaattcaatgaaaacggtcagttccacctgatcggacgacgtggtcgagtggtaaaaatagaggagaagcggatatcactggttgaaatcgaacaacgacttctggcacttgacggtattatggatgtcgctgcaataccattaatacgcaatggtcgccaggctatcggtgtcgtggttgtaccaaataaagaggcccgtcaaatatggcaatgctccggagggaaaactctggagttgtcctggcgcaaagcactattaccatggcttgaacctgttgcagtacctcgttactggcgcattattgatgaaataccagtaaacaatatgaataagcgtgtctatgcgcaattacaggagttatttcatgatacgccatga

SEQ ID NO: 33970 - DNA, 222 bp, Escherichia coli
atgaaaatcatcacccgtggcgaagccatgcgtattcaccgtcagcatccggcatcccgtcttttcccgttctgtaccggcaaataccgctggcacggcagtgctgaagcgtataccggtcgtgaagtgcaggatattcccggtgtgttggccgtgtttgctgaacgccgtaaggacagttttggcccgtatgtccggctgatgagcgtcaccctgaactga

SEQ ID NO: 33971 - DNA, 1152 bp, Escherichia coli; identical to SEQ ID NO: 17408

SEQ ID NO: 33972 - DNA, 441 bp, Escherichia coli
gtggcaaacctgcaggtcgccacgtcagaaacctggcgcgacaaacagacgggggaaatgaaggaacagacggaatggcaccgcgtggtgctgttcggcaagctcgcggaagtggcaggtgaatatctgcgtaagggcgcgcaggtctacatcgaggggcaactccgtacccgtagctgggaagataacggtattacccgttacgtcactgaaatccttgtgaaaaccacgggcaccatgcagatgctggggagtgcaccacagcagaacgctcaggtgcaaccgcagcctcagcagaacggccagccacagagtgctgacgcaacgaaaaaagggagcgcgaaaacgaaaggccgtggacgtaaggctgcgcagccggagcctcagccgcaaccgccggagggtgaggattactggttttcagacgatatcccgttctga

SEQ ID NO: 33973 - DNA, 324 bp, Escherichia coli
atgagtgatatttcagataaagaacaaaccagaaagaaaccacgaatcaaaaagacactggaacagcaattagcatctgctcagatgcgtttaaatcgtttacaacataagtctaagaaagagtctaaacagatagaaacacgccagaaaataattttaggtgcggaagttgccaaggttcttgattgtgatatttttacggtggataaggatcttgttttaggtatgctactagagatacctcacctacatccagatgataaagaaagatttaaaagaagcggaatgttatttctggctagtatgaaaggccgaaaaacttaa

SEQ ID NO: 33974 - DNA, 201 bp, Escherichia coli
atgctgatggcggggattcagttcaccgctggtgagcatgagttccagttgtttcatcagcagtggaaaagcctggtccagatggtatgcatccgcgtcgctgaactgccctctgataccggcgcggtcggcaaggtaatgcaactgattgccctcctgcaccagacgtgccccgaaacagggcgtcacggtgcagggtag

SEQ ID NO: 33975 - DNA, 714 bp, Escherichia coli
atggcaacggcgggaattttaaccatacgtgcagcaaatactccagaacaacacgttcaggctgtttacaaagcagaacaagatataaactctacaaaaaacgaaaatagcaaagctaataaaacaaaaggggagaatggatttgctattgtcaccagtggactggcatcttctggtaatgacgtttatgaaaattatatggccctggcttttgacagtgtagatgatgtgaacgttagacgttcggcagatgttacaagctaccccgtagagaatggtgctactgtgtctgatcacgttcaaattaaaaacaataagttttctcttaaagggcgtatcactgaaacaccgattaaaagcgatcctggcttgttaaagagtgcaggggtgaacgggaacagaagatcattagctatagactacttgaatcagattatggacagtagacagccttttcttcttgttacagaaaataaaacttttgagaacgttgttttaacaggcatcgaatacacagaagaggcaagcgaatctctggtatttgatcttagctttgaacaaatcaggctcgtttcttatggcactgtaaacactgtagctctcaaaacacagccatctaagaacattggggctaatatgaaaaaacgtgttaacactgaaaaatcaagtagtgaaggtgaagacactattactcctgcctttaaacaggaatag

SEQ ID NO: 33976 - DNA, 300 bp, Escherichia coli
atggcgatatcagcaaagaaagccgcctacaaagaaaagaaagcaaaagccgcagaactagccaaactacgccgccagcaaaaagcagcattaaccagaatgataaagaaggctagagaagacggcacatttgacagcttgccagacgatatcaaagcaaagtgccttaaacacgaagcaaagcgggaaaaggcagcatacttctataatcagtggaaagagaagcaagcatacgccgcacgtcgtgaagaggtggcgggtattgatgaattatccctgcaacacttcaaatcaatttaa

SEQ ID NO: 33977 - DNA, 135 bp, Escherichia coli; identical to SEQ ID NO: 30527

SEQ ID NO: 33978 - DNA, 741 bp, Escherichia coli
atgtcaagggcagttaacagtatactggaggtgaaatcaggcagaacagaatatatcctctcaccggtttttgagcctgtatggaatcagaccgggaaaatatttgcttttgaaatgctctcggatatccgttcagcaaaagacgggaggaaaatctgcgcatctgtttttttcagaagtgcgcctccggatattcagtacaaaatactcatcagtcagttgaagactgcggaaacgcttcataaatggtgtctgcagaagaaaataatgctgagtgtcaatatttcccgggtggtagccctgtatctgagaaaacatggcatcccggggcggccgggaacacatatcaggcttgaggtcagtgaggactttccggcagtggcgttaaaacccggtgatgaccccctgttacgttttttgtcagaacgtttcaccctctggctggatgatttcggctcaggaaatgcaggcttaatgtggggactgtccgggatgtttgaacgggtaaaaataagtcatgagttttttcattatgccctgaaaaacaggagtgcaatgccgcttctccatgctgtggcagacactgttgcctgtcataaccggggcgtaatacttgaaggtgttgaaaatgaagcgttgttccgtattgccagagacatgaatgtccagggctgtcagggatggctctacaggcgtgtgggagctgatgaattatccgcgattactgagctgcatggataa

SEQ ID NO: 33979 - DNA, 264 bp, Escherichia coli
atgtacaccctgaacaacggcggggcatttatggcccctgaaccggatgacgatgatgacgaaacatgggtactgttcaatgccatgaacggtaaccgcgctgaaatgagcccggaagccgccggcattgccgcctgtctgatgacgtacagtcatcacgcctgccgtacggagtgttatgccatgacggttcattattaccgtctgcgggattacgccctgcagcatccggaatgcagcgccattatgcgcatcatcgactga

SEQ ID NO: 33980 - DNA, 249 bp, Escherichia coli; identical to SEQ ID NO: 33321

SEQ ID NO: 33981 - DNA, 873 bp, Escherichia coli
atgcctaactgtattgcccagaatgcagagacacacaactcgtcaaatgtaggcgggtctggccttgtgttgaccggaagcagttacgcttacgctattaatcttcaagctaaaaacaatgctcaacgtggaattagtgtggcgttagggtcttttctacgagctgacgggtttactgagagtgaaaatattctacctgtgactgtttcgcagggttccacgttggtttctccaaattgcacaataaacaaaccagatgctcttgcgcttttaattgagaaaggaggaaaggcatttttccaggtagcaacaactgataagtttactatgtatggtagagcaacagtacagtcaatgggggttcttcatgcgccagatggcgacataacgaacagttcaggcaactcaatatctgcaattaactcaacagttgacgttgacagaacaactttccatggctctcctgctgtagctatctatgcaatggatggagcaatagttaaatgtaccaatggagagtctcagacaactacagggacaacaattattgctcagaacgcaaaagtcagcgccgacgggtttaaagttagaggaaaaccaagcaatggattcagagccacgaaatcaggaagaatatcagccagaaattcagtagtagaagaatcggggcaatattcattttctgcagaagggcttggctcatttattgacgcaacaaactcaacatcaggaagcgcatttacaggctataaagcgagtggcggtggacaaataaacgcaacaggcacgacaacgacggggtcatatgttgatgcgccatataatcctgaaatcaacactactgacaataagttaacactgattagtaaatga

SEQ ID NO: 33982 - DNA, 804 bp, Escherichia coli
atgacggtctcaaccgaagttgaccacaacgaatacacaggtaacggcgttacgacatcatttccgtatacattccgcattttcaaaaaatccgacctggttgttcgggtgtctgatcttaacggtaacgtaacaaaattggtgctggatagtggttattcggtaactgtgacgggtacttatagcggtggttttgtggttcttccgtcgccgcttgctgctggctggcgaataaatatagagcgtgtgcttgatgtggtgcaggagactgaccttcgaaatcaggggaaattttttccagaagttcatgaggatgcatttgactacctgacgatgctgattcagcagtctttttctggtctatctcttgcactcagaaagccatcacgtttatcaaattattatgatgctcgagataacagaatccaaaacttagcaagcccaattcttccgaacgatggtgtaaaccgtaattttgtagaaaacctttttattgataaaagcgcatctgcttctgcattgcgctctttgctggaaagcgcagctggggctggaataattggtacattgcagggattaaccgttcagtcagttttagataatgtaaaaatcccactgacgtcattcgtgttttctattcctgatgattttgctaatgcagattctttagcagaatatcttgaaaatagatgctataccggcacgcaagtaatagtgcatgtctccgcaggaactcataattggaatactctaaataagatttttgggaaagagtggggatttgacaattattcagtttcttaa

SEQ ID NO: 33983 - DNA, 708 bp, Escherichia coli
atgaatttatttgagcgtttgctgtatcgccgtctttgcaatgagcaatccactgaaggtggccaggcagatacagcttcaacgggagcaactgaaaccactcagggctcgggtgaaatgcaggagcaaacccagtcgcaggataactcccaggggactgactctgagaaaggttctgaagctcagaaaactgagggagagcttgctgctgaaaaagccaataccgaagaagcagaaaaggataagaagccagagggtgcgcctgagaagtacgagtttcaggctgccgaaggcgtagagctggatacagaagcgttgaaggaattcgagccggtggcgcgtgaactaaacctgaccaacgagcaagcgcaaaagctggttgatgcttatccgaagattctggcaggtgtgcagcagcgccaggcagaagcctggcagaaaacaaccgagcagtgggctgcggatgtaaaagctgacaaagaaatcggtggcgacaagttgatttctaaccttagcgccgcacagcgtgcgcttgaccagttcgggacacctgaactcaaagaatatctgaacaccaccggactgggtaatcaccctgacctggtcaaaacgttcgtgaaaatcggaaaggcgatgtctgaagatggcatggtcaccggtggtaatgaaggccagcgtagtgcggccgaagtgctctatggcaaataa

SEQ ID NO: 33984 - DNA, 336 bp, Escherichia coli
atgattaatcgtaccaagctggagcacatcctcgaatatgccagacagcagaggcgctttggtcagcattgcaaaattccgccaggagatatggttgaaatcgtggagattgccatgcgcaatgctggcaactctccggtaactccggatggttggataagctgtagtgagcgaatgccgaacgacgcgcagtggtgcgtagtgaacacaaaatacgggtattacgtgcaatgctggtctgaaggtcaagggtggcttggtgatgatatcagcatccctgaatgcgatgtaatcaattggatgccgctaccggaaccgccgcaggaggcgacgtaa

SEQ ID NO: 33985 - DNA, 126 bp, Escherichia coli
atgccttatccggcctacaaagtatcgcaaattcaatacattgcaaaaaaacacgtaggcctgataagcgtagcgcatcaggcaattatacgtttgtcatccgtctggaaggattatcgtccctga

SEQ ID NO: 33986 - DNA, 1251 bp, Escherichia coli
atgcgtcgtttcaaccacttccggttgcggttcggtaacctgaacgggggcttctacgacttcagccacttcttcaacaactggcgtgctaacaacaggttcggcagcggcggcgacagggacctcagtcaccatcggctgcacttgtacttcttcctgttcgcgctgctcttcaacctgtacatcttgcggacgtacaattggatagcggatccagactttgccagaggccagttccggagacgcgcacgctacggtcaacggcattggcgactgggttggataacgctcgtcacgatagcgacgacgacgctgaccacttacgcgcaggtgacgaggcgagcggcgagaacgacgcggcatgccaccgttgtcacggttatcagcattgttctcttcttgctgttctggtgcagtttgcgctacgactggcagcggaactttcaccaattctgtgcgtggggctgccgcttcctgaacaattggttcggctgcgacagtttcttcaaccaccggtgcgactaccgcttcttcggctacgctttgctcgtaacgcactttctgattgagctgacgctgtttacgacgcggctgaaccggacgtacacgttcttcctgttcggtttcctgaacagattgctcttcaacattcagcgccttcacttcttgttgcgcctgacgtttatcatcgttacggcggcggctacgttcacgacgcggcgtttgctgctcgtcggtggtacgcgctttttccgttacctctgcctgctgacggctctcacgcgtctcggcagtctgctgctgtgcctggcgacgattacgacggttttcttcgcgattatcgctgccttcagtacgttcactacgagggtcgcggcgctcattacggtcacggcggttgttctgacgaggcttgcgacgatcctgttgacgttccggtttcgcttctgctttcggtgttggttgctcggacggtttggtttcttcaccaccgctgaacagcgctttcagtgcgccgaagaagcggctcaacagcccaggttgggcaggagcggctggtgttgccggtgcagatttaggtgctggggctacgacaggcgcggcaggttcagctggcgttggtgctggcggcacatccggcatggcaaaggttgccagcgcaggttgttccggacgcttacgttcagcgaactcttcttcagacggcagcgccatcgcttcttcatgcagcttcggcagcatgtagcttaa

SEQ ID NO: 33987 - DNA, 240 bp, Escherichia coli
atggctgatttgaatacgcgcacggtcctgacgcaccgcttcacgcagacggttttctaccgcacgctggtggcgtacaggcgtcatgtcgatgaagtcgataacaatcaggccgccgaggtcacgcaggcgcagctgacgagcaatctcatcggcagcttcgaggttagtgttaaacgcggtttcttcgatatcgccgccgcgggtcgcgcgtgcggagttgatgtcgatggccgttaa

SEQ ID NO: 33988 - DNA, 474 bp, Escherichia coli
atgctggcggaaaagatagaaggcgaactggcggtagtgattcgccatttgctaacacgatttaccgaccaggacgaagctaaaagactactttatgagcagcaaaaatcagaagaagcgctgttgataaagcgcgaaggtgattcactggtggacttttgcggctatctgatgtcgttggttaaatgtgaaggaatgatggtgggcaatgcggaaatagtgccatttagcccgaggcgatacctgtatcatgcttatttagcctatatgtcagcgcatggcctgggaaaaccagtatcactgacacgctttggtactgatatgccaggagctatggcggaatacggaaaggagtataagcgggctaaatgcactaaaggcccggataaagggcgagtgataacaaatgttctgttagatgatgatgctgatggctggttgccagcagctacagggattaacgacagaacataa

SEQ ID NO: 33989 - DNA, 618 bp, Escherichia coli
atgaaaagtagccttgaacaagctttccaagaagcagcacacgcagcagatcgtgcagtcagcggtgcgatgctgaagtattctaatgggttggtcacggatgaagacgacataacaggggtactgatcggccggttggatgctgtgttttccgaagaaattggtggtgtaacatggtcttcatccattctaaggcaccgtaagggggtagcagcagaagaaaagaaggtcggtgctgacatgctgctccatgtctcaatctcaacaccagagctcacctattcaaagggggttttgattcagtcaaagagagttgatgaaggtattgcaatgacagcacaaggtcacaaagaattgctgggacagtgcgacaaaatgctaaatattaccccggcttcgtttgtttttacctatacgaagtcagggatgcgctgcgcttccgcaacgaagattgttggaacaagtagccgaatacttaacgattcgtgcaacctgacctcttatcggttcttcctggaactgttccgatgcacaattggagatcgcaacattacatcggccaagtttgatgatcttcggatacctcaaggcattgccatcaagggaacactggagtaa

SEQ ID NO: 33990 - DNA, 1437 bp, Escherichia coli
atgaatgctaaaatttcatgtccaattgatgggtatatcataacagatttcataggagacggagggaacggagatgtgtatcttgtaacttcaagttctggcgaggaagcattcgctttaaaaatactaagaaatgtacaagaatcaacttataatagattcaaggtagaagttaatttcttgaaagataataaagtagatggggtaatgcctttgcttgatttttaccttccagataatgcaaaaaaagaacaagcttggtatcttatgccattggctgaaagctttaaagaaagtgtaaagcaaaaagatccattatcaatcatctctgaattcattcatctcactcaaaccattatagaactccatgaccaaaacatatctcaccgggatataaagccagataatcttctatatttgaatggcaggatatttttagcggactttggattggtaaaatatcctgaaagaatcgaattaacacccgatatgcgagacgttggcgcaaaattcacaatggccccagaaatgagacggatagcaaatcgtgctgatgggctcccggcagacatttactctctggcaaaatcagtatggatgtctctgactaaagactatcttggttttgatggtcagtacagcacaaaatctaatatcggattatcaaactacataaaagaactatatctaccgcccttagatgacctattagtgcgcgcaacagataacgatccgtatcagcgaccaactgctgcggagtttaagacagaacttgaaaattggataaaaattaataatgatttcatccagcgtaatttaactgaatggttcgaaatccaaaacctactattcccatacagcacaccgaatagtgtagagtggacaaataatgatgacataataaacatactcaatttaatagctggaagggagtctctaaatcacatgttttatccttccggtgggggaagcgatttgatttatgtcgaaccagcctcagaaaaaggatttatcgcgcttatagtctgtgaacgatgcgctgaaattttaaagcccaaaaaactttcatttgaatcatttggtcatgatcccgaatggaattattttcgtcttgaatgtgaagtaatcgaaccaatgaaaatttcgggtcccgttactagttcaacgatggatgaatacatggttgaaattacgcctggaaattacatacctccagattgctgggaaataaatgagtatcaaggtaaacctctacctgaaaccgctagaattgtcagcaggtatataaaaggtagttttgtatttttctgcaagtcatcaacttataacagaataagccagacgtataatgcttggcagaatgtgggggaaaatgaattcagaaagctaatcgcaaaatttgctcagtatgcttctgcccgaagaaccattaaataa

SEQ ID NO: 33991 - DNA, 351 bp, Escherichia coli
atgccaactttaataccccgcgcatgtcgcaaacgtggttgtcctggcacgactacggaccgttcaggctactgtgagcagcatcgcaatgagggctggcagcagcatcagcagggtaagagtcgccatgagcgtggctacggcagcaagtgggatatcaaacgcgcccgcatcctgaagcgtgataatcatctgtgtcagaactgcctgcgtactggacgtgctgtcgcagccacaaccgttgaccacatcaaggcgaaggcccacggcggtactgatgaagacagcaaccttgagagcctgtgctggtcgtgtcacgcagcgaagaccgcgcgcgagcggctcaagtga

SEQ ID NO: 33992 - DNA, 558 bp, Escherichia coli
atgcttgaatttgttgagtcagtaagaaaatctttattagatgaaaattatgaggctgcattgtttattgccttatctcttcctgatatatgtgggaaacttgaaactcctgaagagcggaacgggccaagagcaaaaagatggtttaaggataaccttaaggataaatattttgcagataatctttatgagacgtttttggctaactttcccgagcaattagataaaatgcctcaatacttaatcgatgatttaaaaacaaaaaaaccattggtaagctttgaccatgaaagctactgggctttaagaaatgcatttttgcatgaggcatctgatagtactaagttacaaaaaattcaacttacgcactcttctgcgcacatgaatatgtttaacggtgtgcttcagttaagtgttattaatttatctaatgatatctgcgatgcggtagttaagtgggttgagcggatgaaggataataatgatgtatgccagaggataaattcgagggcaaaaatcaaaaatgaaatgttgggtggcgctattcgatttgggtag

SEQ ID NO: 33993 - DNA, 231 bp, Escherichia coli
gtgaacgtagagaacctaagtaacgcgcattacatctataacgagatgaaagagctacagcgacagaaaaccatactggaaagtggtgctgggcttggtgtgacaatccagtctacctatcaagacgatgcctttcttgaggccatacgcccgcatgctgttgctgagcttgatcaccgcatagagaaaaagaaagctgtgctggttgatttgggtatctccttctcctaa

SEQ ID NO: 33994 - DNA, 270 bp, Escherichia coli
atgggacttgaaatgattatcggcctggctgttgctgtgctggctgcaattgcaggtgcttttggtctgggtaaatcacgcggtacaagcatcgcagaaacacaagcgaaccagcaacgcactgaagaacgcgcagcagctactgaagccgttgcagaacgccgggtagaaacaacaaaaggagccagggatgtacagcagactgttaaccatcttcctgatgacgatgttgaccgtgagttgcgcgaaaaatttacccgcaaaacctga

SEQ ID NO: 33995 - DNA, 615 bp, Escherichia coli
atgaaccaatcacaatttcagcaggcggctggtatcagcgccgggctttctgcgcgctggtttccgcacattgatgcggcaatgaaagagtttggaattacagcgattaatgatcaggccatgttcattgcacaagttgggcatgaatccaatggctttacctcgctggtagagaattttaactactcggttgaagggctgaagaaaacctttggtaagcgcctgacgccgtatcagtgcgaaatgctggggcgtgtcgatggtaaacaggtcgctcaccagccacaaatagccaatctggtttatggtgaccgcatggggaataacagtcagggtgatggctggaaatatcgcggtcgtggcctgctgcaaatcactggtcgtgagaactacaccaaatgcggtacagcgctgaaccttgatctgatcagtacgccagaacttttgacgcaagagcgacatgcggcccgttcggcggcatggtacttcacgttacgtggttgccttctatattcgggggatgttgagcgcgtcacgcagattattaacggcgggcagaacggcattaaagaccgccgtgaacgttacgccaaagcaaaaaacgcactggtatga

SEQ ID NO: 33996 - DNA, 339 bp, Escherichia coli; identical to SEQ ID NO: 33963

SEQ ID NO: 33997 - DNA, 234 bp, Escherichia coli
atgtcggactgtcaccctgttttattgcccgaaggccctttctcacgcgaacaggcgatggctgtcacaacagcttaccgcaatgtgcttattgaagatgaccagggaacgcatttccggttggttattcgcaatgctgaagggcagctacgctggcggtgctggaattttgaacctgatgccggaaaacagctaaatccatatctcgccagtgagggaattctcaggcaataa

SEQ ID NO: 33998 - DNA, 528 bp, Escherichia coli; identical to SEQ ID NO: 11115

SEQ ID NO: 33999 - DNA, 2631 bp, Escherichia coli
atgttttccggagatggcggacaactcctgtctgataaatcactgaccggctctgctggcgggggtaataacagaatgaaatttaatatactgccgctggcattttttatcgggataattgtttctccggcccgggctgagctctattttaatccgcgttttctgtctgatgacccggatgcggttgcggacctgtctgcatttacacaggggcaggagcttccgcccggtgtgtaccgggtggatatttatctgaatgatacgtatatctcaacccgtgacgtgcagtttcagatgagtcaggacgggaagcaacttgccccctgcctgagtccggagcatatgagtgcgatgggggtaaaccgttatgccgtgccgggtatggagagactgccggctgacacctgcacatcactgaattccatgattcagggtgccacattccggtttgatgtcgggcagcagcgattgtacctgaccgttcctcagttatatatgagtaatcaggcccgtggttatattgcgccggaatactgggataacggaattacagcggcattgctgaattatgacttcagtggtaatcgggtgcgcgacagctatggtggcaccagcgattatgcctatctgaatctgaaaacaggactgaatatcgggagctggcgtcttcgggacaacaccagctggagttacagtgccggaaaggggtacagccagaataactggcagcacattaacacctggctggagcgggatatagttcccctgcgctcccgtctgacgatgggggacagttatacccggggggatatttttgacggtgtaaatttcaggggtattcaactggcctctgatgacaatatggttccggacagccagagagggtatgcaccgacaattcacggtatttcccggggaacatcccggattagtatccgccagaacgggtatgaaatttaccagagtacgctacctccaggcccgttcgagataaacgatatttatccggccgggagtggaggtgacttacaggtaaccctgcaggaagctgatggcagtgtacagcgatttaatgtgccatggtcttcggtgcctgtactgcaacgtgaagggcatctgaaatatgctctcagtgccggagagtttcgcagtggcggacatcagcaggataatccccgttttgctgaaggaacgctgaagtatggtctgcctgcaggctggacggtgtatggaggagcctggatagctgaacgctaccgtgccttcaatctgggggtgggtaaaaacatgggctggctgggtgctgtttcactggatgccacccgtgcgaatgcccggttaccggatgaaagccggcatgacggtcagtcatatcgttttctgtataacaagtcactgacggaaacagggacaaatatccagttaatcggataccgctactccacacggggctatttcagctttgctgataccgcctggaagaaaatgagtggttacagtgttcttacccaggacggggtgatacagatacagccgaagtatacggattactacaatctggcttacaacaagcggggaagggtgcaggtgagtatcagccagcagacgggggaatcgtcaacgttgtatctgagtggcagccaccagagttactggggaacggacaggacggaccgtcagcttaatgctggctttaactcatctgtgaatgacatcagctggtccctgaactacagcctgtcccggaatgcatggcaacatgaaactgaccggatactgtcatttgatgtcagcattccgttcagccactggatgcgttcggacagcacatctgcatggagaaacgccagtgcccgttacagtcagaccctggaggctcacggacaggctgccagtacagcagggctgtatggcacattgctgggggacaataatctgggatacagcatccagagtggttatacccggggagggtatgaggggagcagtaaaacaggatatgcctctctgaattacagagggggatacggtaatgccagtgcaggatacagtcacagtgggggttaccggcaactgtattatgggctgagtggcggtattctggcacatgccaatggtctgacactgagccagcctctgggagatacgctgattcttgtccgtgcaccaggtgcatctgatacgcgcattgaaaaccagacgggggtgtctacagactggagggggtatgctgtactgccttatgcaacagactatcgtgaaaaccgggtggcactggataccaacacccttgcagataatgttgatatagagaataccgtggtcagcgtcgtgcccacgcatggtgccgttgtgcgggctgactataaaacccgtgtgggtgtgaaagtgctgatgacgctgatgagaaacgggaaagcagttccttttggctctgtcgttacggccagaaacggggggagcagtatcgccggagagaatggtcaggtttatctgagcggaatgcctctgtcaggacaggttagtgtgaaatgggggagtcagaccacggaccagtgtactgcagattataaattaccgaaggaaagcgccggacagatattaagtcatgtcacggttagttgcaggtaa

SEQ ID NO: 34000 - DNA, 453 bp, Escherichia coli
atgcagggaaagaaagagaataccctgagaattattgatgccacaaacggacagatgccggaagacagggaaagtttgttctgggtgaatgtcaaggccatcccggccatggataaggcgaaaaccggcgagaattatctgcagtttgcaattgtcagcagaattaaactgctctaccgtccacagggactggttattccgccagaacaggcaccgggtaaattagagttcactcgtgaaaacggagggctgactctgcttaatccgacgccgtattatctgacagtgactgacttaaaggccggaaataaaagtcttgaaaacaccatggtacccccacagggaaaggtcactgtgaatatccctggaggatacaccggaggagatattacttataaaacaattaacgattatggtgctctgactgaacaggtgaggggtgtggtgaagtaa

SEQ ID NO: 34001 - DNA, 300 bp, Escherichia coli
atgagccagcgcacgaaagggatgctgcgcatggtcagccagacgtggctgaccatcgttctggtctccgcgctgctgatagcgtcgagcgcgggcattctgtggtggcaggggcagcagatactcgagaactatacgaccatccgggagcagaagagcacgcaggccatgctgtcagagaggaacagcggcgtacagctctcgacctgcggcgagcagagacgccgctgcgtgagggtgaacccggaagcgggacagttcggagaggactcgagctggatgatactggcggggaaatag

SEQ ID NO: 34002 - DNA, 333 bp, Escherichia coli
atgaatacatatattttcctgggaggggctattgtggctgaagtcataggcaccatctttatgaaatattcagaaggatttacacgcctgtggccgtctgtaggaactgcaataagttattgcgctgccttttatctgctttcccaaacattggaaaatatacctaccggtattgcttacgcaatttggtctggtgcgggaattgtactaataagcctagctggttggttggttagcggtcaaaaacttgattggcccgcaattgcaggaatgttccttatttgcgttggagttttggttattaatattttttcaaaatcttctgcgcattaa

SEQ ID NO: 34003 - DNA, 171 bp, Escherichia coli
atgcacgaaccccccgttcagtccgactaccacgcccgttccggtaactatcaacttgagtccaacccggaaagacacgacaaatcgccagtggcggtagccattggtaactgggttcacggagcagagattgtagagaatgcctacagagttcttgaagtgaaagcctga

SEQ ID NO: 34004 - DNA, 231 bp, Escherichia coli
atgcggctgcgtctcgcgcggatttgcgggactggtgatgttcttgccgaacatgcagcctttcgctgtcagcgaccagaattttttgatgttgttaatcgcggtacggctgtatcgttcgcgttgttcaacgatccccagcttcaccatctggtgatatgcctgattagccgtaaggcggataccatactgtttcagcagtgcactcagcgacagcgtggggcgacttga

SEQ ID NO: 34005 - DNA, 537 bp, Escherichia coli
atgtcatttattaaaactttttccgggaagcatttttattatgacaggataaataaagacgacatcgatattaacgatatcgcggtttccctttcaaatatctgtcgctttgccggtcatctttcgcacttctacagcgtcgcccaacatgcggttctttgcagccagctggtgccgcaggaatttgcttttgaagcgttaatgcatgatgcaacagaagcgtattgccaggacattcccgcaccactgaaacgccttcttcctgactataaacaaatggaagaaaaaatagacgccgtaatccgtgagaaatacgggttacccccagttatgagtacgcccgtgaaatatgccgatctcatcatgctggcaaccgaacgccgcgatctcgggcttgatgatggctctttctggcctgtactggaaggtatcccggcaacagagatgttcaacgtgattccactggcaccgggccatgcctacgggatgtttatggaacgctttaacgagttatcggagttacgcaaatgcgcatga

SEQ ID NO: 34006 - DNA, 183 bp, Escherichia coli
atgaccatcaccgaagccgatatgctggagatgatccgcagcattgccggaatcaaacaaccagcaagcaaaattaacaggtgttcagcgcctgtttccgttgtgctgcaacaggaacgccaccagcggcgggaaaacgaaaaggcgtaccaatggacgaagccaaacaagttacggcgttaa

SEQ ID NO: 34007 - DNA, 255 bp, Escherichia coli
atgaacactaaggtgaaagaagcagtaaaatgttgggcttctagtccaacgtggtttagcaggcatccaatggatacggcggagttccgacgggctgtttcaaatctcaagcgcattacccctaccccatctttcgaagaaatcaaagaagcgatcatgttctttgtttccgatgcgccaacaatgctaggtacgccgtcggatattcctcaggcggttcatgacttcgctggaaaaatttataacaagctgtga

SEQ ID NO: 34008 - DNA, 447 bp, Escherichia coli
atgcgcttccagggaaaaataattgctgaagcatgcagtcttgccctgtcagacaggcagatgactgtggatatggggcaactcagcagcaatcgatttcacgccgccggtgggtatggggaccctgtgggctttgatattcaccttcaggactgcagcactgtcgtcagtcagcgggtggggatttccttttatggcgtatcagatattcacgaaccggagttgctgtcggtggaagaggagaatgatgcctcagacggaatcgctatcgctttatttaatgaaagcggagagctggtaaaacttaatcagcctccggagaactgggtgcatcttacccgcggagatatgaaactgcatatgcaggcgaggtataaggccacacattatcccgtcaccgggggaaaggcaaatggacaggtatggttttctctgacctatctgtaa

SEQ ID NO: 34009 - DNA, 264 bp, Escherichia coli
gtgtggtggccggaagatgcggaccatattgcttttattcgcgggcgtattggttttgaactgcctgcctggtttatcccgaaggatgagaagcaggtgccgacaggcgctttcttcgctggtgctattgctgttttcgacaagacctggaagggaccggcaatcagctacatcgggcgcgatgaacttgaggcatgtggtgaggcctttctggcgcaggttcgccagcaggcggaaaaactggtcagggagatggcggcatga

SEQ ID NO: 34010 - DNA, 1029 bp, Escherichia coli
atgaaagcgatagatctcttctgcggcgcaggtggcctgacagttggtcttaagatggctggctttgacgttatatcagcagtcgaaaaggagcctattgtttctgaaacctatatgcagaatcatcctgatgtatcattgtatacgggagacataagggagttgtccccccaaaaaatcatgattgaacttggtctccagcaagggcaacttgatttgcttgcgggatgtcctccatgtcagggtttttcaagtttaagaacgaggaataaatattcttcggttagcgatgaacggaatgatttaatattttcgtttttggaatttgttaaatacttccttcctaaagtagtaatgttggaaaatgtgcccgcattagccaaagattatcgcatgaaaattttttgcgatgaactgaagcagttagggtatttcattgattcaaattctgttgcgattgaagatgcttctaactacggagtgccacagagacggcggcgtatggtaatgttggcttcaagattaggatatttaccaagagcggaaaaaaatagcaaaaaagtaactgttaaggatgtgattggagatttgccattacctcaatatagtgatgattttttgcataatataaaagagaatcgctctgaaaaagtcatgaatataataaaactagtgccaaaagatggtggtagtcgttctgacttaccatatgaatactggctaccgtgccataaaaaatatccaaatggatttagggatgtttatgggcgcatgaagtgggatgctgtatccccaacaataacaagtggttgcactaatccatctaaaggacgattccttcatcctgtacaagatagagcaatcactttgcgagaggcggctctattgcaaacttttccgaaggattattactttccaatcaagtatggtaaagacagagcagcccttatgattggtaatgcgttacctccagaatttatcaagcgtcatgcagaggtaataaaaaaacatcttattgaattaggataa

SEQ ID NO: 34011 - DNA, 2013 bp, Escherichia coli
atggaaaaatctttatttttaagtttccacggaagaataattgatcatttgggcatacaaatgtatcaaagcccaacagctgctattgctgaaatggtttctaactcctgggatgctgatgcaactgaggtgaaaattactcttcctacgcatgacgatttctctattacgattcaagataatggtatcggaatgaccctagaggaatgtcagaataagtttctgacagtggggtatgataagcgtaaaaataatgcaaaaacgctttcccgtgatttaaaacgtccactgatgggaagaaaaggaattgggaaatttgcaggttttggtattgcgtcagttataacagtaacaacgattagtaaagatactggcgagaaaacatcatttgtactagatattgacaaaattcgtgattcatcaaatgatgattatatcaacacatcgaaacttaccatcgatgtaattgacagagttgaacctaacaatgaattaaaaaaagcgcatggtacaacaattaagttaacttgtttgaaaattcagcgcctgatttcagctgatttttttgcaacatctatggctcgccgtttctctgtaaatgctgccgcagcagatttttatgtgagcattgatgagaagttaattccgacagaagactttcttagcaagtcagaaatgtcctttcctaaggactacaaacaagatgaaaaacccaaaggattgactgagattgataaagatggatggggaacagaaatggtcggtgaccatcaaataaaatggagagttttcttcttaaaagaaactataaaggaagaggaattacaaggtatttcaatattttctcatgggaaattagcccaaagaccatttatgtttaatttggcaggagggttgcctagccagaatgggccagaatatatgacgggtgcagtattagctgactaccttgatgaatttgatgaggatgtcatttcaactgagcggcaacggttgaattgggggcatcatcatttagctactcttgaagagtgggggaaggctcgtattcgcaatttattaaaaatatggaaagaccggagggctgaagaaaaaacgaaactgatagaagacaaagtttctgactttagttcgagaattgaaagactcgccccaagcgagaaaaaaaccattatgacagcccttaagaagttggctagcattaatcaaataaatgcaaatcaattcaaggagttagctaattctgttcttactgcatgggaaggtggtcggttaaaggagttaatcaggcaagttgcagaagtacccgatatggatggcgataaattgctatctatgcttatcgaggctaatacaatacaagcattgcatacagcagaatctgtaaaggcaaagctggacacaataatagggcttgagtcacgaataaaaaatcgtgaattagaaaatgcagtgcgagattatattgcgaataacccatggttaatatcaccaaagtgggaaaccttcgctaaagagagaaatgtcggagatttggctgctgaagcagctaaagattcaggccttgataaggatgaagattttaatggacgagttgatttggttttagcgagtggtgagcatttgctaatccttgagtttatgcgtccagggttaatgattgatttagatcatttagttaggtttgagacatatgtagacacatttcgtggtcatcttgaaagttctacgggctcaagatttaatactgctactggttatttggttgccgataaaatagccaagaaaaatcctgcatttttaaaaaaggttagaaagcttaaagaggatggacttgaaactcttacttggggtgatctgcttgctgaagctaaacgtcaatggcaagaattcttagatcatctagttgaacgttcgcctaacgataagcgaattcatgctttaattaatagtaatacgataaaaattccagagggtgagaaagctcaagagacaatgcaacaagtgcattaa

SEQ ID NO: 34012 - DNA, 879 bp, Escherichia coli
atgacagctcgctacatcgcaattgactggggatcgaccaatctgcgcgcctggctttatcagggcgaccactgcctggagagcaggcaatcagaagcaggcgtcacgcgcctgaacgaaaaatctccggctgcggtgttagcagaagtgacggccgactggcgtgaagaaaatacgccagtggtgatggcaggaatggtcggcagcaatgtcggctggaaagttgcgccgtatttatctgttcctgcccgtttttcatctattggcgaacaattaacgtcggttggcgacaatatctggattattcccggattatgcgtttctcatgacgataaccacaatgtgatgcgcggcgaagaaacacaattgatcggcgcgcgtgctctggctccttcctctctttatgttatgcccggaacccattgcaaatgggtgcaggccgatagccagcaaatcaacgattttcgcaccgtaatgaccggtgaattacatcatttactgttaaatcactcattgattggcgcaggtttgccgccgcaggaaaactctgccgatgccttcgcggctggccttgagcgtggccttaatgcgcccgccatattgccgcagctttttgaagttcgcgcctcgcatgtgctgggaacgcttccccgcgaacaggtcagcgaatttctctctggtttgttgattggcgcagaggttgccagtatgcgcgactatgtgacccatcaacacgccatcacccttgtcgccggaacatcgctgaccgcgcgctaccagcaagcctttcaggcgatgggttgcgacgtggcggtggtggcgggcgacaaggcatttcaggctggtataaggagcatcgctcatgcagtggcaaactaa

SEQ ID NO: 34013 - DNA, 570 bp, Escherichia coli
atggcagaagacgatgctgtagatacttatgtagaatggattggtagttatggctatcaaaatagaatgctagtgacaaaatttatcaaagagacgcttttctcagatataaatgcacttgatgcgagttgttcatcattggaatttggtatgtttctcaataagttgtcacaactattgtctcttcagtcggcagaggctttatttctgaaaactttaatgaataacccaataattaaaaaatttattagcgcagaagattactggatattttttctgatatcgttaataaaatttcctgagactgcagaggaactcctgaaaaatgcactggtaaccctacccgcagatgctaattataaagacaaaacgttactcctgaaggcgatttacagcggatgtacaaatcttccattttcactttttattaataatgaacaattattagagattagggagtgttgtaaacaggcaataaaagtaacatttgcagtagagctctttgatacacaaaatagtaataaaaaacaaaataaaaaaccatggaagaaggtaatgttcaatgtttaa

SEQ ID NO: 34014 - DNA, 1584 bp, Escherichia coli
atggcaagtaaagctaaccttgttaatttggatgcgatgatttcaagagaggatttctctgctcaatccgataatgatttatctttcgaatctatacaaaatatagctatgagagatatcggaatgttgtctggcctactcagaaaaccagattttcagagagaaacaaatcactggactccagagcaagtagtttcattactaaagagttttgtcacaggtgatttaataccatccgtgattttatggaagagttcttttgtgtttgttatagacggtggtcatagacttagtgttttaagagcatggaaagaaaatgactatggtgatggcactatatcgcaaaaattctttggaaatagtatttccggagagcaaagaaagatcgcacaaaaaacaagagaattggttgactccacagttggtaaatggtctgagatagaaagaaaaatgcaggattctaataatgaccatgatgagagtagaaggcttacaaatatttacgtaagggctttgcaagtccagtgggttaaaggtgattccgataaggcagaaacgtcttttttcaatataaataaaaaaggtactcctttagatgaggttgaggaaactttacttaggcataggaagaaacctatatctatcgctgcgagagcaataatacgagcaggaaaaggacatagatactggtcctctttccctgaggataagactaaaaagatagaagagctttcctcaaatataaactcctctcttttcgatccagacgttaaatctcaaattaaaacactcgatctacccctgggtggctcacgcggtgtgaggttagctcttgatatcttaatagatcttatgtctatttccgtgtcccagagcgaaaattatcaaaaagaattgcttaatcaaatcgaagattcagatggaagcgaaactgttgttgttctggaaaaaaccgcaaaattactaaattggattactggaaatgacaagggcagcttaggattacatccggccgtgtatttttatagtgcatcaggtagacatgtgaatcctatgtttttagggacgactctgtttatagcgaaaaaattaaaatttaatgataagaacttcttcaaaaaattcacaagtattaggtttaatttagagaaaactctaataaacaataagtctatgctagcatcgttagtgaacagagcaggacataagaaaagaactgagtattactctaatttatttgagtcaatgattgatttccttcttgaggtaaaaaagaaagacaaaagcatgagtgatttcagccttacagaaagtgaaatactccagcttgctcactttgaaggtaatatcctatctgggacaagtatcagcaatgcaactaaaattagtgaggaagcgaagaatgctgtattcattgatactgcattagcttcagcaattacatgtcctatctgccagggatatttagatccttcaaaatctgtctcatatgatcacatcaaaagagttgcagatggtggtaaaggttcggcaaaaaatactcagttaactcacccgtattgcaatatgtctgtcaaaaattag

SEQ ID NO: 34015 - DNA, 156 bp, Escherichia coli
atgaccacaagtggatatgctttaataacacgcaataaaaacaatatcaattggttattgcaaataatgttattaatgtctgcttctggtacaaagcggactgtcagattaggtttggttctgcgtcgtaagcgtgccagctttggtctgagctaa

SEQ ID NO: 34016 - DNA, 858 bp, Escherichia coli
atggggttgaaaatgagttttgatgagattattgagcagcaaagacaaaagcagcgccaggtagcagaagcggatactgggtttatttctatttacgagctttacatagcactgcaaaaacgattcccggatcaatcgcttaatgtgctcagccttcagctactcaaatgcctgaatgaacataagcctcctctttacaaacgtgaatctcttcaggactcatggcgagagtttggatttataccaaagtatgattattccagtggacgaccagagttaactcctgcattgcttagggtgactaacgggcgctatgacagccccgaagagatgatcacttcagtacaaaaatacccccttggtgaagccgatctggagcagttcgcactgcgccgtgccgatattatccgggtactgggcattgatattgaaaaatccccagctcctgctgtcagcgattatgtgagaaaacttgaggaggagattgagagcctgaaagttgagagggataagctgctagccgctgcccgtgaacctgcagcacgaggagagtcctatgctgcaatgcgtgaagaagtctatcgggcagtcatcgctatactctacaagctggatgcagagggtaagctcaagcctgatagctatggtcattgcctgccaaatgccagtaatctcgaaaaactgctctataagtatgcggcatttttctggcctaccattaaggagcctccgcatagcgcagaggttatcaaacgaaatttacgcgagacaagaaatatccttcaggatgaaacctttcaaggattcgaatcattacgtactgccggacacgaaaaacggaaaaagagtaaaaaataa

SEQ ID NO: 34017 - DNA, 219 bp, Escherichia coli
atggaacaagaaaacaccttttcaagcaatatccgtttcttccatgagccccagcgattgattcgaatcaaccacatgattgagctgctggcagtcagccgtactactctctggcgttgggtgaatgaggggatttttcctgagccccgtaaaattcaagggagaacactcggctggactgccagccagtatgaggagtggttgagtaaatcacactga

SEQ ID NO: 34018 - DNA, 1068 bp, Escherichia coli
atgaataaattagaaaaatatagagattatcagttcgagaaatcatcggtaattaataatataccggcctcgcaagcagctcagtggattaatgctcaaggatactttctgtatgacgaagtgttctggccgatacttcatgcagagggagagtatgattccaggatcatggaagccctttttgatacggtgaatcaaacctatctgcggacttcgcgttttctggctgttcgctatgatttacatctcaagagctatacagatgacaatcaggttatttcggacttctgccagcaattagcccaggtattacgtgctcgttatccaaagtcttttttcgatatattctgggttcgtgagcatgacaaagcgacagcgcagcactatcactgtgtgctcatggtggacgggaaccacatacgtacaccaaaggtattgaatgggctggtggagaagacctggagttcggcaactaacgggaaagtttggtttcccaaaaacggatactacatggtccataagcgcgattcgcagaccctgggggagcttctgttaaggttgagctatttcgctaaatacgccactaagaccggaatcgcaaaacatattccgttgtacggacgcaagcactacaaagtactgaagcaacaaaagcctaaacccaggactccagccaaactcaagcaatgccagccacctgccgaacgttactgtccgctgccaggtaagcttgacccgttatttctcggtgataatgaacccgcagagattgactctctggattatgaaacaaatagccagattcgcagcattcagcgtttactgaagctgtatcagcgcggaaaagcagctgaaaaacctcaactatctcctcactggctacggcatttcgatcgctattacgacaattactggccctgcggagtcagcgtcgctcagtactgtaattggcacgatttaaatccttcaacagcccggcgttatctctgcgattatccaccagcagttatctcacctggcatcctgaggggttggcttcaaaaggagattcaatatgtcatacgctga

SEQ ID NO: 34019 - DNA, 714 bp, Escherichia coli
atgtcatacgctgaacaggcactgtatcgtttgaagtatgccgggaatagacgtcgtcgaaaaaactatcatgaatggcggctggaacgtctaacggggctcgaatatcgcccacttacgcccaatgagatacgtctgcaaacgcagcatatccatccggttgcgtgctcgctggatacactctttgaaaactttctgaagttgcctgttgcccgccagaaaagagctcaggactacagcgagcgatgcgaccgctggaagattgactgggcctggcacaagcaaaattatcgtcgtgaagcgattctgcatggcattacacaaaccgaatacgcgcaacgctacaggataccgcaccgcagagcctggaatgcgctgcataaagctggtggcgcatcgcttagggcgctgttctgggtttaccatcgtcgccagtttcagcgcgaaaaagtcgagaatggtcttagcgttggtgaatatattgtgaaatatcaactgactcagaaatctgctgcccgacagctatcacgacgcccgatgagcgcagagtgggggcagtattttgatatttactatcagagctggtggcctgaaggctactccgtcagcgattttgctaaagcagcgggactgaaggagacgacagcgcgtcagcatctttacgattttccagaggggatcattgatccgatgttattgaaaccgttcctgtag

SEQ ID NO: 34020 - DNA, 3243 bp, Escherichia coli
atgctgaaacgtctgttaagtaaactgacgggaaaccgtcagcagatagaacatcacctaaaaaatcagtaccaggttgaggaaaacggacttagctttccgctatcgctggttgatgattcgcagctttgggcactggcatcctggctagaacaactggctgaagaagactatctgatatcacttacagaccggtggttgttgagttgggacgcactgtatcgcctgctggaggatgaggaacatgccagcagcctgcctcttatcggtgtacctgacgtactgcctttacgcgcaagcctgagttcacgaggagcattaagcgatagcgattttcgcgtctggattgctgaatgggctacgcttccagcccgcaagccgatccgtttcagtcgtaccggtgccattttaacccatgaaaatcagcaatacctgttatcacgtgaaaactgggcactcttacaggcaacagaacaactcagtgcacagaaaaatcagactcctggtgaaaccactaaccagttgggatgggccgctatccgcaaatgtgcgaagcaagcagccgcaaaatttgatgattatttagaaaaaacgcatgtcgtcaaaccaacttcattgtcattacgtctgcgtaaagcaacggttgccgatactgctgttatcgaaattgagccccatttcgaggaccagcctgctaactggctaggcagttttgacaaaaactcgcaggttcacgatagctaccgcatccctggagagaatggcgaactcagccatgtcattatccctcccgaagtgaaagaagtcctgaattcaatacactcgattccaggccgtcgagtggccggaagcgaagcgctttcctttgttcgcaatccttataccttcctgggtgaagatgccgccagtgttattgcccctgaagaacatgaacaggcactgtttgatgccaggattttctttcatcatttcaggttgataccgcaactgaatgcggaaaataagatcgcagaagttacgctggtacttgagcctgtttcacctgttccccagccagaaatcacttttgggttctcagccccccgggagctggataaattcatacagcaactcggtattagcgtcgctgcacagatgcctgccggttcatggcaaggttacgagctggaattaagtcagttcactgaacagcagtggcacgattgccaggcacttctaactcgctggcagcaagaaatagaaggaaaagaatttagcgatgtgctggatattgcgaagtatggcgatcgcgtgattggcattggtgaatttgaaaaaatctcctctccctggctgaccaaatcgcagagtgaaaactggcttccagatgacatcgatttctccgcgttttcagtcgaaacactgtctggctggcaacctgaaaaccttcaccatttcgatgaactgcaggagagaattactcaggcagaagctgtaggtgaaacgcatatcaccgcaccatggaatgacagccaattaccgttggatgctgctaaaaccttcagtaagaactgggaaaaacagcaaagcactgcaaatgaatctcaaggcaacgttgcagataaaacggcccgagccgtactcaaaattgagcagaatattgaagaaacggcctacatcaaacagcgccgcaattcactcctcaatgcgcgtcatgccgagcctgaaattcctctgagccttaaagagcatatccgactcaaagaccatcaacgtgaaggcgtagcctggctccagcaactcttccttcgttcacctgaggaaaccgcaggttgcctgctggcggatgatatggggcttgggaaaacgctgcaaattctgagcttcctggtatggttcattgaaaaattcccgcaagaaccgccaagtctcattgttgctcctgtctctcttttagataactgggaacgtgaactggacaatttcttctataccgcaggaataccggtattgaaattgtatggcgagaccattaaagcggtgaaatatcccaaacaggctatccctgctcatctgcaatctcaggggatcaaaaacctgcttaaacctggctggcagggtgaggcgaaaatcatcctgacaacctacgaaacgcttcgcgaccaggagttttctctggcacgccagccgtggtccattatggtgtgcgacgaggcacaaaaaataaaaaacccagctgcgttaatcacacatgcggccaacgcggtacaagctaggtttaaagtggcatgtacaggaacacctgtcgaaaacacacttgtcgacctgtggagcttatttgattttgcccagccaggattgttaggggcactaaatgaatttggtaaacactatgttcgccccatcgagaacgaagatggccgcgatacggaacggttggaaagcctgcgagcgctgatagaacctcagactttacgccgaaccaaagaagaggttgcgcgtgatttacctcagaaaattgaagtggaaagctgcaagcaattgacgttgtctggcgtgcaaaaacagctctacctttcgtccgttgcaaattggcaacaacagcaagcactgagcgaagggatgcagcaggccggaaccggtatgttaggtttgttacaccgactgaaactcatctgtgcacaccctgcagtagttaatccagaaccacgttttcgtgataactcacccaagcttaactggctgctgaaaatactcgcagaactaaaacacaccacgaaagataaggtcattatttttacggagcttcgagatttacagcgcgaacttcaacatgcgatccaccaaaagtttggtttccgccctgtcattatcaatggtgataccagcactaaaagtcaaagtcaaaacagccgccagcgcctgattgatgattttcaggctcagcctgggtttggggtgattattctctctacggttgccgtcggattcggcgttaacgtccagaaagccaatcatgttattcatttcactcgctgctggaacccagccaaagaagatcaggcaacagaccgggcgtaccgaattgggcaaactaaagatgtgtatgtctattacccgacggtgaaggacactgaaatcaccacatttgaagaaacactggatgaccttctgcagcgtcgacgtgcattggccagagatatgctctgcgctactcccgatttgagtggtgcggattttgaggccattttgaagggggcttaa

SEQ ID NO: 34021 - DNA, 1683 bp, Escherichia coli
atgacgcctgcactgaattctctttctcaacgcattgcagcgaggctctcttccagccaacgggatgaccattatctgcataatgatttccacgcgctggcctcagctgctctcgacatggaaaagcggtttgataaggcagaaaaaatccctttaccgccacaaaaaatgcgactggcagctctgcgtcgccttcgccttgcacaagaactcacggagcgagagtggcggatggtgttttatggtctcgccgataatgatccgtcatatcctgaccagccagtactgctggaggatgatacgtttttccctgaagtaaacaatgcaatcaaaaagcggcttgaaactaaaaccctgaaacgccgagactgggccgcactctgttcaagctattttgcttaccagaacccatcacctgagacaaacccgcactggtgcgtactgcgtggtcatatcgctcagggttacatggtggtgaaagcggctatacgacgagaaaaatcgtggatgaaaaccattgagttttatcacgatatttttaccccgcaggcgggaggcgtgatctccagacagttacttgcgggtgagagcaattcactctcgtcattagaaaaaatcgcgcaaatccctgatagcagttggttgtggaaacgtattttcacggtgcttttagcgcaactggacacactcgacgatccccagtttctggacaaaattagctggttgttaggtctggctgcccagtgggtacgtttccgtgatgacatcatgactgcgaccttgactcgctattaccattctatttatcgcgatcaggctcattcagctttgaagcaggccgcgctggaatactgggataacccgcaactgaaaagccagcagaataaatggcatcagtatgtctctgagccggtggctgcgatggtccggggctggctggcaaaacaagatctgatgcatttctttgaattgctgcgcggtaatggcgatgttgaccaggcacgattgcactattggctacgtttcgccaatcagatgggatttacccgtatcgtcatggggactgatgcctggcaagaccgtggtagtgactttgtgaaattccgcgaggagaataagggacgattgagttacttacgaggtggacgtaactttgataacgccatgattatgcagatcaacgattatctgttcgttgagttttccgggacagggaatgcaatgtatgcctatcgaataggtcacgcgccatttaaccctgaatcacgcacgcttgatatcaacattcatctaaaagataaagggcgctgcgtgctccgactgccccatacaccgcgcgcagaagggtataacaaagtccggataaccggctggatgttgaaatacgacgacgagctgcgtcagttgggcattcggtggatggcagaagaagccatcaagtttgtcgataagaaagcgtcctctcccgcctctatgtccgacattaaaatcatcaacccgttgcgtgatacggctatacagcatctggttgaaggtagttcatgtatcgtcagcgataatcgacaaaaaggtggcgtactgtccgtacaactcaatactcctgacgacaccatagaaagagagttgttacggctaggctttgcgcccgtggctaaagaaccgcatcgttactggatcaaataa

SEQ ID NO: 34022 - DNA, 741 bp, Escherichia coli
atgtttggaaatgcatttggcgttaaaaaacgccgcagcgatgaagcagagaaacccttctggatctcctatgccgatttgatgactgccatgatggtgttatttctggtcgttatggttgcgtcgctgagttccgttacgcagcgtattcaacgtgcggagcaaggtgaaaaaacacgggggcaggatattttcagattgtgtgagcgcctggaattgcatgcccgcaacgtgaacaaaaccattgtggtggattgccatgataaccgtatcagttttggtgaagccgggcgtttcgatcacaaccaatttttcctgaacgctgaggggcaaaaagcgttgcaggatgtggttcctcttgtgctggaagcgtccaacagtgaagaaggtaaaaaatggtttaagcagatcgttattgaagggtttaccgacaccgacggttcgtacttatacaacctacatctctccctgcaacgttctgagtgggtaatgtgtagtctgctcgatagccgcagccctctgcaaaaaaatatctccgcagaacagcagctccaaatccgtaaacttttcctcgcgggtggtgtctccttcaataatgccaaggaaagcaaggaagccagccgccgcgtcgagttgcgcatgcagttcttcgggcttaaagataaacgtgataaggccgatgaggtggatttcccccccgtcgtcaataaagaagtttgccagttggtaatgcccctatga

SEQ ID NO: 34023 - DNA, 2190 bp, Escherichia coli
atgtcctggcttaattctgtcttattggcgcttacctcggtgcaaccttatatggtaccggcaaccgttatcggcctcgtcagttttgcattcctctgttttattttcttttatttttttagagcagttaaaattattaacggcctgaaaaaatatactcagtcaattaatggcatcgaaaataatgagcctggtaatcagcttcagcatctgcaaagtttgtttgtacagcctgagttaaagcacgcctggaatgaattcgaagaatcgttgcactcacaatatgaactggaggacggggaagagaaaatcgtccgtattagggctactgcaccgagcgccagtttcttctcggagcaacaactggtcgatattccgctgaacaccgaatttttcaaacacctgcccggtattctgaccggtgtggggattatcggtaccttctacggtctgatgattggtctcaaccacttcgaccccagcacaccagagcaggtctccagcagcgtcaataatctgcttcgcgatgtgctgtacgccttcctcggttcagcatttgcgattacgttctctatccttatcacctggctggagaaattctgtctggcgaaatgctacaaatatctggaaaaattcaccgcagctctcgacgccctctatgacagcggtgttggcgaggagtaccttgcctcactggtaaaatccagtaatgaaagcgcgacccaggcacgccatctgaaagagagcctggttaccgatttacgcgatatgctgctgcatctggccaacagccagaaagtggaaaacgagcggctagcgaccaccctcagcaccacctatcgcgaaacaggacaacagtttgccgagcaagtcagcggtgcgattgaaaacagcctgaaatcaccgctggataaaatagcgggcgcggttcagaccgccagtggcgatcaaagcggcatggtacaaaacatgctgcaggatgtgctgaccgcgtttatggcgaaactcgacaccacctttggtcagcagtttactaatctcaacgaaatgatgggacaaaccgttggcgctattcagacaatgcaaaccggtttcggcgcgttattacaggacatgcgtcaggtgagcgatgattcccgccagggcagcgcgcagctcatcgagcaactgttatcagagatgaaatctggccagcaagctatgcaggctggcatgaatgacatgctcaccagccttcaggcctcggtggctaaaattggcgcagaaggtgaaggtgccggcgagcgaatggctcgccaactagagaaaatgttcgctgatagcgaggcgcgagaaaaagcccaggcagaacatatgaccgcctttattgaagccattcagaattcagtgcagcagggacaaagcgccacaatggaaaaaatggcagcctctgtcgagtcgcttggtgaacaactgggtagcctgtttgggcagattgataagggtcagcaacagatttcagcaaatcagcaagcgaatcagcagtccctgcacgaacagactcagcgggtaatgagtgaggtagacgatcagattaaacaattggtcgaaactgttgccagccagcatcagggaacaactgaaacacttcgtttactcgcagaacaaactaaccgccagattcaggatatgcataccggcgcggacaaaatgcgtctggcggccgagcgctttgaacatgccggtgatcgggtgtcggaagcaaaccaccttaccgctgacgtgctgaataaagcgcaatcggcaggttcatcactctcccttgccaccagcgaactcacctctgtggtggctgattatcgtaacaatcgggaagcggttagcaaatccattgccatgctggagttgctcgccgcaaatacgcagtctgaacaaaccacgcgcacccaattcatcgccgaccttaagcagcacggtgagcgtctgcagagctataaccgggaagcacaggcctttatggaaaatgtcagtgacgtgctagggaaagggtttgaagacttctctgaaggtgtttcacgcagcctagataaaacgctgggcaaactggacgttgaaatggcgaaggcttctactctgctcgcgggttctgtcgaacagatcggagaaagcgtcagcgagcttgatgatgtcctgtcacgcgttcgtgcctaa

SEQ ID NO: 34024 - DNA, 1710 bp, Escherichia coli
atgaacaacgctgaacagctatttctgaacgagctggataacaaattctggaaggccgccgacaaactgcgcgccaatatggatgccgccaactacaagcatgtggtgctggggctaatcttcctgaagtatgtttctgatgccttcgaggcgcgtcagcaggagctgacgaccctgttccgcgatgtcggtaatcccgacaacatctacgccatgtcgcgcgatgattacggttccgacgaagaatacgctcaggctatccaggaagagctggaagttgaagattactacaccgaaaagaacatcttctgggtgccaaaagccgcgcgctgggacacgctgaaaaacaaagccatgttgccgaccggcaccgtgctgtgggtggatgaaaccaccggcaaggatgtgacgctgcgctctgtctcctggctggtggataacgcgctggatgaaatcgaaaaaaccaacccgaaactgaaaggtattctgaatcgcatcagccagtatcaactgagtaacgaggtgctgaccgggctgattaataccttctctgacgcaaacttcagcaacccggaatataacggcgagaaactcagcttaaagagcaaagatattctcggccacgtttacgaatatttcctggggcaattcgcgctggcggaaggtaaacagggaggtcagtactacacgccaaaaagcatcgtgaccctgattgtcgaaatgctgcaaccgtacaacgggcgggtgtatgacccggcaatgggttccggcgggttcttcgtttccagcgaccgtttcattgaagagcacgcgggcgaaaagaattacaacgccgctgagcagaagcgcaatatttccgtttacggccaggagtcgaatccgaccacctggaagctggcggcgatgaacatggcgatccgcggtatcgactttaactttggtgccaaaaacgccgacaccctgctagacgaccagcacccggatctgcgcgctgacttcgtgatggcaaacccgccgttcaacatgaaggagtggtggaacgcgaagctggaaaacgacgtgcgctggaaatacggcacaccgccgcagggcaacgccaactttgcgtggatgcagcacatgatccaccacctcgcgccaaaaggttcgatggcgctgctgctggcgaacggttcgatgagttccaacactaacaatgaaggcgagatccgccgcaacctgattgaagcggatctggtggaatgtatggtggcgctgccagggcaactgtttaccaacacccaaatcccagcctgtatctggttcctgaccaaagataaatccggtggcaacggcaaagcgcaccgtaaaggtgaagtgctgtttatcgacgcgcgccagattggttatatgaaagatcgcgtgttgcgcgactttacccgcgaagatatcgccagaatcgccgataccttccacgcctggcagacggataaagactacgaagacgaagccggattctgcttctcagcaacgctggaggatatccagaaaaacgactttgtgctgacccctgggcgctacgttggtgccgccgagcaagctgaagatgatgaaccgtttgccgagaagatggcgcgcctgacggcgcagcttaaagatcagcttgaagagagcgcgaagttggaagcgcagattaaggcgaatctgggggggctgggttatgagttttga

SEQ ID NO: 34025 - DNA, 1386 bp, Escherichia coli
atgagttttgagttcatcgaaactgagttaggtaactttgtagagatagtcacaaaaaaatgtgatgcatctattatagatgttactaattatatttccacggaaaatatgttgcctgaccgtcagggtgtaactatttcatcaggcatccctgatgtcaacaaatttaattcttttgaaataggtgatactttattttctaatattcgaacgtactttaaaaaagtatggtttgccacattttacggaggtgtttctcctgatgtgctagtatttaggactacacatgaaaaactcacaagtgaatatttacatttgattttaagcagtgatgattttattaattatagccatcttacatccaagggcgcaaaaatgcctcgaggtgataaaggggccatgctgagctacaaaataaagattccttctttaaaatatcaaaaaagatgtacaaagctaatttttacgttaagtaaaaaaattgatagtaataatcgcatcaaccaaaccctcgaacaaatggcacaagccctgttcaaaagttggtttgttgattttgaccccgtaaaagccaaaatggcagtactggatgcgggcggttcgcaggcagacgcaacacttgccgccatgaccgccatttctgggaaagatgcggatgcgctggcggtttttgagcgtgaacaccctgagcaatatgccgagttaaaagccacggcagaactgtttccggcagcgatgcaggacagtgagttaggggcgattcctaaaggatggggggtggcgtcaattagtgagatggggaaggttacttgtggcaaaactccgtcaaaaaaagaaccagagtattacggtagtgatgttccattcataaagataccagatatgcatgggcaactttttgtgcttaaaactaatgaatatttaagcgaagccggttcaaagtcgcaactaaaaaaacttgtacccgcaaattctatctgtgttagttgtatagctactattggtgttgtttctatcaccaatgaaccatctcataccaatcagcaaataaattctgttacacctcataagagttccttactctattatctttatttttgtatgttgggattgaaagatcatcttcacattttaggtagcgcaggtagtgcaactttaaatgtcaatacgtctactttctcaggaattaaaatcgctcagcctgatgctaaagtattggagttatttcatgccaaatgtacacatttatttaatgagattaaatcgctcagtgtacaaactgaatcactaacccaactccgcgacacccttctccccaaacttctctcgggtgaaattaccctgcaggaagcagaacaggcagtcagtgaggtggaaaatgtataa

SEQ ID NO: 34026 - DNA, 1188 bp, Escherichia coli
atgtataaagttgatacgccgactaacagcttacactccctacaggaagtctctttcagtagtcttggttttaccgaacgtggcaatctgcaggaatggctggcgcagaatccccaagcgttaactcgcgataatgacgatgaactactgattatacagaaagagttcgccggttttgacgacaccaaagagcgccttgacctgctggctatcgataaaaaaggcaatctggtgatcatcgagaataagctcgatgattcaggtcgcgacgtcgtctggcaagcgctcaaatatgccgggtattgcgccaacctgcgtaaagagcaaattctgcagatcttccagctttatctggataaatacgacccagaggaaaatcgcccggcggcagaggtgcttgctgaattcctcgaatatgaaacgctggatgaagccttaatcaaccagagccgtacacagcgaatcatcatggtcgcagccaactttcgcaaagaggtgaccaacactgccctgtggctcatgcaatttggtctgcgggtacagtgctttaaggttaaaccctataagttcaacgacgatgtattcgttgatatccgtcaggttatccccacaccggaagcagaatcttacatgatcggtatggcgcaaaaagaggcggaagaacaatccgtcagcggcggagtaaagccagtccaattaatgcgtaaagctttctggacaaagatgctggagcgcctcaaagccagctcctgccacttatataacaatatcagcccctctaccgatcactggatcagtgcgggctctggtattagcgcggtgtcgtataacctgattttcagtaaaaaagagattcgggttgagctgtggattgccaaagcttccgcagagagcaatacctttgcttttaactggctacatgaacgcaaagaggcaattgaaaacgcgtttggccatgcgcttaagtgggaacctctgccgggtaaaaaatcgtgtcgaatttcctatgccagcccggccatcagccttgatgaagccaactggcctgaaatgatcgactggctactggtaaacctgacggcatttgaaaaagcgttagatccctttattgccccactgaatatggcgctcaaagagatttcaaacgtgcccgaagaaatggaagaaaccgagacagaggaaacctga

SEQ ID NO: 34027 - DNA, 3135 bp, Escherichia coli
atgctgagcgaagacgatttagaacagcaaagcctgcaatggtttgctgaactgggctgggaagtattgcacgggccggatattgcgccagatggcaacaatccgctgcgtgcgtcgttccacgatgtgtttttgcgcccggtgctactggagcagttgcaaaagattaacccacatctcccggttgccgtgctggatgaggtgatactgcgtatcgcccatgcgcaaagcccggatctggtcgtcagtaacaaagccttccatcacctgctgctcgacggcgtgccggtgcagtacaagcaggatgacaaagttatccacgacaaagcgctactgatggattttaaccacccaaataataaccactttacggtggtgaatcaggtggccatccagggaacgaagcaggtacgtcgcccggacgttatctgctatatcaacggattgccagtagtagtgattgagctgaaaagcccgattgatgctaatgccgatatctgggcggcatttaatcagttgcagacctataaaaacgaactcagcgatctgttcatctgcaacgaagcgctggtggtcagcgatggctacaacgcccgtattggctctctcaccgcgaacgaagagcgcttcttgccgtggaaaacgctgtctaatgaagacgacaaaccgctgtttgaatggcagcttgaaacggtagtaaaagggttctttaaccgcgaactgctgctcgactacattcgttacttcatcctgtttgaaagcgacggcaaacgactgattaaaaagattgccgcttaccaccaattccacgcagtacgtgaagcggtgacggcgacgattgtggcctctaccggtaaacacttgccgctgcgcagcaacatcacgccaggcagtaaaaaagccggtgtggtgtggcatacgcagggttccggtaagagtatctcgatgtgttgttacgccggaaaactgctacaacaagcggaaatgaacaacccgaccatcgtggtggtgaccgaccgtaacgatctcgacggccaactgtatgccaccttctgccaggcacaggatttgcttaagcaggaaccgttacaggcaaacgatcgcgaccagctccgcgagatgctcaatgtccgtgaatcaggcgggattatttttaccaccgtacaaaaatttgccccgcttgatggcgaacagactcacccggcgctaaacctgcgcagcaatatcgtcgtcatttccgatgaagcgcaccgcagccagtatggtcttagcgccacgctgaaccgggagactggcgcttataaatacggttacgccaaacatatgcgcgatgcgttacccaatgcgtcgtttatgggctttaccggaacaccggtttcttccgaagataaagacacccgcgcggtgtttggtgattacgtctctatctacgatatacaggatgcggtggaagatggcgcaaccgtgcctatctactatgaatcgcgcctggcaaaactcgacctcaaccacgaagagctggaaacgctgtctaatcaggtggatgagctggtcgaagatgaagagaccgatcagaaagagaaaaccaaaagtgactggagccgtctggaaaaactggttggttctgaacctcgtatcaatgaggtggccgccgatctggttcagcattttgaggcacgtaacgccacaatgaatggcaaagcaatgattgttgccatgagccgtgagatctgcgtgaagctgtatgatgcgctggtggctctacgcccggaatggcacagtgatgacgtcgagaaaggtgaaatcaaaatcatcatgaccggctcagcctccgataataaattccttcagccgcacatctacaataagcaaaccaaaaaacgccttgaagcgcgctttaaagatctcaacgacccgttgaaactggtgattgtgcgcgatatgtggcttaccgggtttgatgcgccatgttgtcataccatgtatatcgacaaaccgatgcgcgggcataatctgatgcaggccattgcgcgcgtcaaccgcgtcttcaaagataaaccgggcggtttagtggtggattacatcggtatcgccaatgaactgaaacaggcgctgaaaacttataccgattcaaaaggtaaaggacagacgacagtcgatgctcatgaagcgttctccatcctgcttgaaaagctggatgtgattcatggaatgtttgccaaaacaccaaccgccgccgggtttgattacaccggttttgcagaggtgccccaacggtttttactcaaagccgcagattatgtgctgggccttgatgacggtaagaagcgctttttcgatgtcgtgctggcgatgaacaaagcctggtcgctgtgcagtacgttagatgaagctaaacccttgcaaaaagagatcgcgtttttgtcggcggtgaaagtggcgattatcaagctgacgacaaccgacaaaaaattcagtcagtcagagaaaaatacgctactcggtaaaatcctcgataacgccattattgcgacgggcgtggatgatgtgtttgcgctggcgggtctggataagccgaatattggattgttgtcagacgagtttctggaagaagtgcgcgaattgccgcagcgtaatctggcagtcgagttgctggagaaactgctgaacgacggcattcatgcccgcaccaaaaacaacgtggtgcaggagaagaaatactcagatcgcctgaaagccgtgcttctcaaatacaataaccgcgccattgaaactgcgcaggtgattgaagaactgatccagatggcaaaagagtttcaggaagcgatggcgcgtgatgaagcgctggggctaaacccggacgaaatcgcgttctacgatgcgctggcagaaaacgaaagtgcggtacgggagctgggtgatgacgtccttaagaaactggctatcgaagtcacgttaaaattgcgccagtccacaaccgtagactggcaggtgcgagaaagcgtgcgtgcgcggttacgtattctggtgcgtcagacgctgcgtaagtacaagtatccgccagataaaacaccttatgcagttgaactgatactgaagcaggctgaagtggtgtcgaacagctggacggtatag

SEQ ID NO: 34028 - DNA, 3033 bp, Escherichia coli
atgaaaaaattaactccacagttgcaatgtgaacataacctcagcacgcatccgctttacgatctgtggggtatttggcgtcgacgtgctaataaaatattattgtctccaggccaattgactttcatccatcatggggtgagtgtgcaattgcccatcggtgatattaaaaatgttaaaataaataaaaaatggttgtactctgagattgttattggtttggagagtaagatatatcaattaaatggtttcaatctgcaacagctggaaacgcttatcaaaaaaatccaatgtacagctttagatattttccagcacagcaatgagtggagggaattgctggagctagtaaaacgttatcaaaaagggggacactatttttcttcgtgggaatggcgatctttgtcacagttaatgcaggtaaagaaacgattgctggatcttgcgattgatgcagattttattgctcatgaaggtaataaccccatagcacaactggcgctgaagttatccatggacgatgtttcagaatctgccaggagccacttcaacgagaaagttatcccacagttattgtcagcttatcagactttctttgaacagatcgaatctcaaccgcttagtgcccctcagcgtaaagcctgtgttaccaatgaagatcatactttggtcgttgctggtgcgggtaccggaaaaacgtcgacattaattggtaaagcagggtatttattgcaagcaggtttagctcagcctgaaaatatattaatgctggctttcgggaataaagcagcacgggaaatggctgaacgtatcacagaacgattgccagaaagtggcggcaagctaaaagcaacgacctttcatgcttttggaaaccgtgtcgttgctgaaagtgtaggcgtcaagcgttctcttacacgttttgcagagcaaaataatgaactgcgccattttattgaggcgaaattagagtcagaaataagtgtcaacgatgattataaaactcaactagttaaatattttgtttgttatagcacgccaggacgttgtgaatatgacttcaatgctattgaagaatatcatgagtttctgcaaagttgtcgcctgattacgctgacggggcagtgggtaaagagtgtgggggagttgagagttgccaactatttatatttgtattctgttccattcgaatacgaagcgaattatgaggtaaatacagcaacgattgagcgccgccagtataaacctgatttttacctgccgagaagcaagacctatattgaatacctgggcgtggatcggcaaatgagaacggccccttttgttaatcaggctgcataccttgaaggagtcgcctggaagcggaagttgcatcaacaacataatacccgactggaagagttatatagctatcagctagccgaaggaatacttgagaataatttactcgatatacttaatcgggtaagtgaaccacagcatttgcgtgatactgatacgcttctggatgaacttaaaaactccagttcatcgccgtggcaaggatttatcgatctgatgctccgctttcttgggcttttcaaagaagggcaattttctttttcagacctcctggcatcccctcaacgaatagacatggggcgtactcaggcatttatcgaattattcaaaccagtatacgatgcctatgaagctcaccttaaagagcagcgcgagatggacttcagcgatatgatcgcggaagcaacaacagcgcttcaggagggacaatttcatcaccgatatgactacgtactggttgatgaattccaggatctttccggtggacgaggcaagttgttaaaagcattactggcaacccgggataatatgcggttatttgcggtaggagatgattggcaagccatttatcgttttaacgggtctgatctaagattttttacccgctttgatcatcaattttcgccagcgaaaatgttgcctcttgacaagagttatcgttttaataatcgcatacatgaactcagctctgcctttgtcacccgtaatccagcacaattgaagaaagagattactacgctctcacaggtggagcatgctgcagtacagctgcttgatattcaggaacaaatgcacggtattgacctgtccgatcgcaaccaaagaaaggctgaagcttatcgtctgcaaatcaagagagcgcttactcgttgtcatcgtcgggaagtgagactcaacagtaccaggcgggcaccagtaatgcttattggccgctatcgtctggaaaatatgcgagagcttaaggatatggatgttcaggcgctaatggctgaatttcctctgctggatattcaataccagaccgcgcatgccagtaaaggcctggaagcgaattacgtgctactccttggtcttgagaaagggtgttttccatcggcaaaggaaaatgacgaactgatagatcttcttctcccggagcaagagccatatttgtttgccgaagagcgccgtttgttttacgtcgccgttacccgcgcccggcactatgtatttatgatctttgatagccaaaacacctcagcgtttgttgaggagattgccagaatgggtcaacagctcatcactaaaagtgattctcttgaaatcggtcagtggcattgccccgattgtgaatcaggctgcttaacgggtaaagtgagtcgctatgataaaaaattctatgtctgctcgcactctcctgcctgtgattatatggctagtgcctgcaagcaatgtagttctccgatggtgatgcataatggtttgcaaagaatatgcgcgaacccagaatgtcaggagatagaaattgtctgccgacgctgtggtcttggcacaatgcttaagcggaaaaataaggatggtggtgttttctatggctgcaatcgctatcgccgggacgaagctgactgttgttatgagaacatcacacttgaggagtacgagcggagagtcgatgccgcaaaacaatgtacagcgatcatgcaggagagatga

SEQ ID NO: 34029 - DNA, 816 bp, Escherichia coli
atgaagtcgaaatttgaatgggtacgtaaagcgcaacgatgcctgcggatgctttcagagctacatcgtcttggctaccaacaactgcggggtatgtcttacttcaatgcacaggggttcagattcgcaatcgccccgcgagattattttgccgacaatggtattgcgattccgaccgacaagctttccgactccttagtcgctatcactggtgcgggtcactatttcagttggacagatactgacggtaatgatgctcgcaccctggcagagaaatttatcacccgttttccggatattgcccttactggcaagggacgtgactgggggtatgctggttggttatctgaactcattggttttcttgagcaaggtgacatggtcccaaccgtttgctgggaggagatggaagggctcccggaaaatttaacaactttgccagtctgggttgaaggtcaggataatttcaattggattggtaataaatccgtcatttcgcaaagtaatccccattttcctcttcccataacgaaggctggtcaatctcgtggcgagtggtgggggagacaaccatactggacggatgctctccatgaaatttcacaggtgatgcaagacggtggtaggttggtaactattgatgttaaaaggattggggaccagttatttgatgtaaatggcccagcttacaggctacttgatgcgatgagctctgtctcagaacatgaaggttacgagggatataaaggtgctcctcggctcgtgttggctttactttggaagttgcaggaaattagcgagcaaagtaaaccgtaa

SEQ ID NO: 34030 - DNA, 1323 bp, Escherichia coli
atggcaacagtgataactcaggatcgacagatagcaagccttgttccccctgtaggaaaaaaccggattgtcgtcagcgtcaaatcaaaagcaggtgcggggttgtatatcgaatcccgatcagggagccaaacaaagagttggctctaccgtccctacctcaacggcaagcagataaaaattaccctgggagcttatcctgcaatgacgctggcccaggctcgtgaagcacatgctgaagccattgagttagtgaagcagggaattgaccccagatacgttcgtaaaactgaaaaaacgaataatgagcagatgcccatattttctgaattgtgggaaaactggttgtcattcagagaaaccagcaagccaataggggctcgtacactggctgattataagggaacgtatcgtcgccatcttgagcaggggctaggctccgtgagagtgtgcgatttatcgcgttcgtatttgtttgcacacctgagcaaagtccgacaatccagcgctgaaggtgtgcgcaaagggcttatcatcctgaatatgacacttgaccatgccacacttcagggattaatcgagctcaaccctgcccgtctgttaaaaccggcgatgtttggtgcttccatggctaaaccgcgtgagcgctggttatcgcaggatgagcttcaacggctctggaaaacactagaagaagctactgctggtggcggttcagttagcaccggtggaaaaggtatcgcttccagtgtcgttttatcccatgcgatagctaacacactgaagctgattattctgaccggcgttcgccgctctgaagcggttaaaatgcgctgggatcaaatcaacggcgatcgctggacaataccggaaacaaagaatggtaaaagtcatgtagtaacactgcatccgctggcactgtctatcctgaagaaacagcgaattatctccgaaggcgcatttgtctttgagtccaccagcaaccagggattccctataaccggagacgctgtcacacgagcactggagcgcctgcgtaaaaaatatctggcagagctggagccattttctccccatgatttacgccgcagtgtcgctactggttgcgctgaatatctggatgccccggagcgcctgattgagcgattgttaaaccacattcctaaagaccgcctgatcagaacctatcaggtcgggcagcaggcggaaaaattgcgtagtttgtttttgagctggggggattttgtggagcggtatgtagcgcagtctgccagccatgaggtgacggataatgttgttcaggttaagtttggcggcagataa

SEQ ID NO: 34031 - DNA, 801 bp, Escherichia coli
atgaataaaaaattgctttgtttattaatatcctcttttttattatcaggctgtgcaaacttcaaaaaaatcagtgctaatgaacttgctgccgaaagagacgcacaaaaagcgactgaatacgcgaaaaaaattcgtaataacccggttatccaggattcaacaaaacaatggattaatacaacgccaattattgaaaagcaggtaaagcaatcagcgccgccctgcccgattgtgattaatactcgttcagatattgagctacgccagatcgcacaacgcatcacacaaacctgtcatatcccggtacgaatcagcgccgatgtctggacctatctgaacggtacaggcactggctcaacacaacaaatgacaggctcaattccagcacctgatgcaaatggaatggttcctctggcgtcagtaggcagtcagccagtaaaagtctcttctggcggtacatcactccctgagctgaatatctccgggcttcctgccctactgcaaaccgtatcttcacggctgggaatatcctggaaatacgataaaggtcgtatcacattcttctatctggaaacgcgctcattcccgattacatatatggacagcaatgtggcatacaactcaaaagttgtgagcggcacaatgtcttccagtggcagtaccggctctacaagttctggcggtatgactggcgacgcatcaaatacgcaaactacaaccgtggaaatgaaatcatcgctgtacaacgacctgaaaagtgaaccgccccgggtttcctggagagtattttatctgtga

SEQ ID NO: 34032 - DNA, 261 bp, Escherichia coli
ttgctttcatggcagaaaggtacactggtcggcggtcatgacgataacgattctgcgcttgatatctcgtacatgagtaacggaaataatattgactatggcggcgataaggtgtttgcggggaattaccgtagcgattatttgtggtacgcaatgctgggtggaacaaacagtcgcgcaaaagccgaattaaacggagcattctttaacataacccgcccccgcaatatcgcgtttaactatatcgtgagggcggcgtga

SEQ ID NO: 34033 - DNA, 1620 bp, Escherichia coli
atgttaagacaagccacccaaaacctcattaccgccctttatccgagattgtcccatgaggacgaattgcaaggtgagagtaattccatatcgaaccaaaaaaggatactcgaagcctttgcaaaacagaatggctttaccaacctgcgctggtacaccgacgacggcttttccggcgcgaacttccagcgccccggttttcaagccatgcttgcagacattgaagccgggaaagtgggtacggtcatcgtcaaggacatgagccggttagggcgaaactacttgcaggtagggttttacacggaaatgctgttccctcaaaagggagtgcgttttatcgctgtcaacgacaatgtggacagcgcaaacggcggcatggacaacgattttacccctctgcgaaatctgttcaacgaatggctggtgagagatacgagcaagaaaatcaaagcagtaaaacgagcaaaaggcatgagcggcaagcccgttaccagcaagccggtctatggctatctcatggacgaggacgagaactatctcgttgacgaggaaaccgcgccggttgtccagcagatataccagctttgccttgccgggaatggcccgaccaagattgcccgtatgcttacggagcagcaaatccctacgccgggaacgctggaataccgcaggacgggcagcacccgccgctaccaccccggctatgagtgcaaatgggcgacgaacaccgttgttcatatcctcgaaaaccgggagtacaccggctgtctggtaaacttcaagacggagaagccctcttacaaggtcaagcacagtgtagagaaccccgtagagaagcaggccatttttgagaaccaccatgagcctatcatagaccgggaaacatgggagcgcgtgcaggagttacgcaagcagcgcaaacgcccgaaccgctatgatgaagtggggctgttctccggtatgctgttctgcgccgactgcggtcatgtgatgtaccagcagcggtatcagaacaagaaccgcaagcaggactgttacatctgcggcagctacaagaagcgcacccgcgactgtacggcgcactttatccgcaccgacctgttgaccgccggtgtcctctccaatctccggcaagtgaccgaatacgccgccaagcacgagagccgctttgtgaagctgcttatccagcagaacgagatcggcggcaagagaaagaccgccgcagccaccaagcagcttgaacaggcgcaggagcgcattgccgaagtgagccgcattatcaagcggctgtatgaggacaatgtgaacggcaaaatcagcgacgagcgtttcatggaactgtcggcagactatgagcaggaacagcgggaactgaaagaccgcgccgccgctttgcaggccgaactggacaagtcgcaggccgccaccgtcaacgcggaaaagtttatgggtatcgtccgaaagcaccttgcctttgaggaacttacccccaccctcttgcgggaaatgattgagaaaatcgtcgtgcatgagtgtagctatgacgagaacggcacccgcaggcaggacattgagatttattacagctttgtcggcaagattgacttgcccgaagcctaa

SEQ ID NO: 34034 - DNA, 189 bp, Escherichia coli
atgacagataacaagcagcacgacacccgcaccgcccgccgccccgactgcgtgacggaaatccgcatgggcaattccgtccttgtcgtgtccggctatttcaagaaagacactaccaccaccgccgccgacaaaatggcgcgggtactggaagcggaagccgctgctacacaaaaaccggcaatttga

SEQ ID NO: 34035 - DNA, 843 bp, Escherichia coli
atgaagaacgaaatcaacgctgttttggagaatatgacgactgccaccccggagccggaggactacaccggcgaggacggtttactgtactgcggcaggtgccgcaagccgaaagaagcctattttgcgccggataaggccgctatctttggccgcgaccgccacccggcagagtgcgactgccagagagccgcccgcgaggaacgggaggccgccgagaagcggcgcaggcactttgacaccgtggaggaactgaaacgccggggctttaccgaccccaccatgcgggactggacttttgagaacgacaacggcaggaacccgcaggccgggattgcccgccggtatgtggaacactgggaggatatgcgagccgacaatatcggctgcctgttctggggcggcgtgggaaccgggaaaagctaccttgcgggctgtatcgcaaacgcccttatggagaaagaaatccccgtccacatgacgaattttgcccttatcctcaacgaccttgccgccagctttgagaaccgcaacgagtacatttcccgcctttgccgctatccgctgcttatcattgacgacttcggcatggagcgcggcaccgagtacgggctggaacaggttttcaatgtgattgacagccgttaccgcagcggcaagccgctgatcgtcacgaccaacctcacgctggacgacctgcggaacccggaggacaccgcccattcccggatttatgaccgcctgctttccatgtgcgtcccggtacgctttaccggcgacaacttccggcaggaagccgcgcagcggaaaatggagagcatgaagaaactgattaccgactga

SEQ ID NO: 34036 - DNA, 852 bp, Escherichia coli
gtgggtgtcaaagggtacgcgatacatttatccttttcccccggaaacagcgttctaaatgcgtacaaaccgtcaaaatcaacccgaacacagggaggtgatcctatcgctgattatatcatggcagacacgaagctgcccgcctatctgccctatccccgtttcctgctgaaaatggagatttcccagaccgccaagctgctctatgcgctgctgttagaccgctccaccctctcccagaagaacaagtggcaggacggcgagggcaggatttatattatctatcccatcgcggagatagccgaaatactggataaaggcagcaccaccataaagggggcgctgaatgaactggacatggcggggctgctggaacgggaacggggcggcttctccgcaccgaaccgactgtatgtgaaagtgccgcgtgtgccacaggtacagttttccgaccaactgatggccggaaaaccgaccctcatagagccggaaaaccgaccaactgatggtcagaaaaccgaccttatgatggtcggaaaaccgtcccctaaccaaactactataaacaaccttacagagaaccaaacaaagggagtgagtggggagccgcccgcgccctatggccgataccagaatatttttctgtcacagaccgaatacgacgagttgcaggcagagtaccccgacaggctggaacggttcatcgaggaaatgagccgctaccttgccgccagcgggaaaagctaccagaactatgccgccgcccttcggatatgggcggggaacgacaaaaagggcgccccgaaaaagggcatccctgactactcatgcaaggagggcgagagtttatga

SEQ ID NO: 34037 - DNA, 387 bp, Escherichia coli
atgagcgataacctgccccgcatggactaccgccagcaccggcgggcgcggcggctggtgcatgagtgctgtaactacgacgaggggaactgcctgctgttggacgacggggagccttgcgtatgcgtccagagcatttccttttccctcatgtgccgctggttccgtgtggctgtcctgccccttgacggggagctggccgcagccctcttgtaccgggggagccggaaacggtgcgccgtctgcggcgcggcctttgtccccaaatccaaccggggaaaatactgccccggctgcgccggacgcatgaagaaaatcaaagccgccgagcgaaagcagaaacaaaggcagaaatgtcacgctttagagcctttcaaacccgcataa

SEQ ID NO: 34038 - DNA, 1617 bp, Escherichia coli
ttggcaacactcaagcatatcaactctaaaaacgccgactacggagccgccgaacaatacctgctttttgagcatgacgagtttaccatgaagcccgtccttgatgaaaccggcaggcttatcccccgcgaggactaccggctgtccacgctgaactgcggcggggaggattttgccgttgcctgtatgcgggcaaatctccgctatgagaaaaaccaacggcgggaagatgtgaaaagtcaccactatatcatcagctttgacccacgggacggcccggacaacggcctgaccgtagaccgggcgcaggaattgggcgagaagttttgcgccgagcatttccccggccaccaagcccttgtatgcacccacccggacgggcataaccacagcggcaatatccatgtgcatatcgttatcaattcgctgcggatagaggaagtcccgttcctgccctacatggacaggccagccgacacgaaagccgggtgcaagcaccgctgtaccgacgcggccttgcgctacttcaagtccgaagtcatggagatgtgccaccgggaggggctttaccaaatcgacctcttgaacggcagcaagaaccgcgtcacagaccgggagtattgggcgcagaaaaagggacaggccgcgctggacaagcagaacgcccccatgattgcaggcggtatcacgccccggcagaccaagtttgaaacgaacaaagagaagctgcggcagaccatacgcgccgcgctgtctgcggcggcctcattcgaggatttttcctctctgctgctgcgggagggcgtgaccgtcaaggagagccgggggcggcttagttacctcacgccggacaggacaaagcccatttccgcccgcaagctgggcgacgattttgaccgcgccgctgtccttgccgttttggagcagaacgccgccagagccgcagaaaaggccgcggctatatccagcaccccgccctctatccaagaccaactgcgggcagacagagccgcccgaaccgccccgaatgtgcagcggcttgtggacattgagcagaagaaagccgaggggaaaggccggggctatgaacgctgggcgaccatgcacaacctcaaacagatggccgcgacgctgaatgtgtatcaggaatacggcttcacttccccggagcagttagaagccgccgttgataccgcctatcaggaaatgcgccagaccagcggcgaactgaaagcactggaaacgaagctgcaagggaaaaaggaattgcagcgacaggtgctggcctacgccaagaccaaacccgtccgcgacggcctgaaagcgcagaaatcccccaaagcccgcgaagcataccggcaggcgcatgagagcgattttatcatagccgacgcagccgcccggtatttcaaggcacatggcattaccaggctgcccgcccggaaagcgttgcaggacgagatcgagcagcttgtttccaagaaatccggcctgtataacacctatcacgcacagaaacagcggtttaaggagttgcagaccgtcaagcggaacatcgaccagattttgcgccgggaggaaccccgccgcagaaaggagcagagccatgagcgataa

SEQ ID NO: 34039 - DNA, 399 bp, Escherichia coli
atgccgaagcgatacaacacgccccaccgcagccgcgttgtgaaaacccggctgtccgaagatgaatacgccgacttcacagcgcggcttgcgccctatggtatcagccagtccgaatttctccggcaggcgatacggcgcaccgccatacgcccaattatccatgtgtcggcggtcaatgacgagctgctttccgctgtcgggaaactcacagccgagtacggcaggatcggcggcaacctcaaccagattgcccggtatctgaacgagtacggcgtaccctacaatgcgctgtccggcgaggtacgcgccgccatagccgaccttgccgccctcaagtatgaaatcttacagaaagtaggtgacgcggttggcaacactcaagcatatcaactctaa

SEQ ID NO: 34040 - DNA, 486 bp, Escherichia coli
gtgtggggagtgaaaggaaaaattctctgccccgccggttgccaaaatcctgttgcccggattactaaggcaaaagaaattttgaaaaatccccgtccagcgggtagctggcggcctttgaaatgtatctttagcggaaagggaaaaagccgcagccagcgggcagcaaagccccgttccggcgtcatattggcgaaaggaaaaaaggccgcccacagcgggccgcaagccctgtcctgtccgttctatgtacggaaaaaccagacaggggcagtctgcggcagtcttagagcaagtttctaccacggtgccaaaatccgcaattctgcggttttgtccctcgcgggaaacttgttggggagtgccttccccaaaccctgctatggcggcttgcgccgcaaaaagatttccgttcggcaggccgtttttttgcgagaactgccccggaaatacctaacagaccagcctattttttgtgataagtga

SEQ ID NO: 34041 - DNA, 612 bp, Escherichia coli
atgagaaccctgttcttaacttcaagtggcttaaacgaaaagactatggtattattttggaaatgtatcggaaaagaaccgattaacacaaaagcgattttggttccatccgccgcagttggaaatgatggtgcgcgagaaggaatcattgtatgtatggagcgccttatgaatatgggaatacctatgaataatattcttatatataatcttgcgtttttactttccgatggatataaaagaacatattcaagttatattagtgacatacctgtaccgtttcgcttaatgagtgttcaagaactcactcaatatgacatgattgctttttgtggaggaaatgcccatacgcttcttagcgaaataaacagaacaggattttcgaagcccctaaagcaagcaatagagaatggattggtgtatctgggaattagcgcaggtagtatgattgctgccggaaatttttccgatggattaggatatttagcaaatccgttgataccacacgctgaaaaagagagcccttttggagatatatcgaagaacgatttgattgaattggctgacggtcaaactgtattgattaaagggaatcgacaggaaattatttaa

SEQ ID NO: 34042 - DNA, 930 bp, Escherichia coli
atgaaaaatcttggatattcacaaaattttttggttaataaaaagttggtagaacgtttaataagcaagtcaaatattgatgtaacagattatgttattgaaattggtcctggaaaagggataataacagatgtactttctcagcatgctggagaggttgttgcagttgaatatgatcaagaattatataataatttagtaagatatcacagtcatgataatgttacatatatatttggtgattttttaaaatataagttgcctttaaatcgcagatataaaatattctccaatattccttttcagataacagcggatattattaggaaattaacagacgatgtaaatccaccatcagatataaatatcataattcaaagagaggcagctaaaaagaattgcggtattccattacaaaaatatgaaggttttcgtgctgctataataaaggcacaatataaggtagaaattacacatagttttaaaaggagcgatttttttccttcgcctaatgttgatacagttatgcttcatatgcagttatgggatgatagattgagtggtgatgatcttcaaaattataaagatttagtggcttttttttacactaatattaaaggagagactgctaaagagagactttctattttattttctaatgagcaaatcaaaagattgggaaaagccaatagaattagtctttcaaattcatatacgttaatcacggccgagcagtggatgaatatttattattactccaaaattggattgacagatgaaaagaaaaaaaagtttcaagatgcatataaaaaacttcaaaaaatgaataaaaaattgaaaaagcaaaacagaacatctttacgaaagtctagtagcaataagaaatgtagaacaaggattgatacttctaatggtacaaaaaatagatag

SEQ ID NO: 34043 - DNA, 198 bp, Escherichia coli
atgagtaaacttctcccctatgaaacaatcgtcaaggcgcatgagggcgacccggacgcaatcgacaccgttctttcccactacgtcggatatatccgatactgttccaaagtacacgggaaagtcagcgccgaggttgaggaacatataaaacagaagctaatcgccgcgctgttcaaatttcgctttgaccgataa

SEQ ID NO: 34044 - DNA, 423 bp, Escherichia coli
atgaccgaagatgaagcctacaaagtgcatatccagtacacctttaacgccttttgcaaggttgtcattcgtcacgccgccatagatataattttgaagctgcgccggaggtgggaacgggaagtttcccttgactatctgatgaatgagaagtttgtccagcttgccgagccggagcagcttgaagaatatctttttaccgcctgcggccagaccgccgttctgtaccatgcggaactcgccgccgcccttgcccttttgccagagcagacacaggaagaaattttccgttactatttcctgcgccagccgcagcgggtgatcggcgtacatatcggacggacacgcagcacagcagggcggcatatccagcttgccttgaagcggctccggcggctcatggagggaaaacgctatgagtaa

SEQ ID NO: 34045 - DNA, 444 bp, Escherichia coli
atggaaatacaaggtattcttaaaaatttacgcgagaaaaacaaccttacgcaagaacaactggctgaacgtgtgcaagttacccgacaggcggttagtcgctgggaaacaggcgaaacgcagccaaatacagataccttaaaactgttatcacgagtttttgatgtgtcaatcaatacgcttctgggttctccacggcaacttgtttgtcagtgttgcggaatgccattgaatgaagatggtctgattagccgagaaccagacggaagctataacgaggactattgtaaatggtgctatgctaatgggaaatttgcatatcaatccaaggaatctttattggattatctggttgcgaatatgccaaatcccgataacgcagatgaagaaaccagacgtaatcagtttgatttgtacctttcgcaattaaagcactggaaataa

SEQ ID NO: 34046 - DNA, 1134 bp, Escherichia coli
atgaagatgggcgaatttccacacagcaccggcgcccggcaagatgggccgattcccacactacagcggcgcccggcaagatgggcggatttccacacggcagcggcgcccggcaagatgggcggatttccacacggcagcggcgcccggcaaggtgggcggattctcacgcggcagcggcgcccggcaaggtgggccgattcccacgcggcagcggcgcccggcaaggtgggccgattcccacgcggcagcggcgcccggcaaggtgggccgattcccacgcggcagcggcgcccggcaaggtgggccgattcccacgcggcagcggcgcccggcaaggtgggccgattcccacgcggcagcggcgcccggcaaggtgggcggatttccacacggcagcctcgcccgacaaggtgggccgattcccacgcggcagcctcgcccggcaaggtgggccgattcccacacggcaccggcgcgcggcaaggtgggccgattcccacacggcagcctcgcccggcaaggtgggccgattcccacacggcaccggcgcgcggcaaggtgggcggattcccacgcggcagcctcgcccggcaaggtgggccgattcccacacggcaccggcgcgcggcaaggtgggcggattcccacgcggcagcctcgcccggcaaggtgggccgattcccacacggcaccggcgcgcggcaaggtgggcggattcccacgcggcagcctcgcccggcaaggtgggccgattcccacacggcaccggcgcgcggcaaggtgggcggattcccacgcggcagcctcgcccggcaaggtgggccgattcccacacggcaccggcgcgcggcaaggtgggcggattcccacgcggcagcctcgcccggcaaggtgggccgattcccacacggcaccggcgcgcggcaaggtgggcggattcccacgcggcagcctcgcccggcaaggtgggcggattcccacacggcagcggcgcggggcaaggtgggcggattcccacacgacaccggcgcccggcaaggtgggcggattcccacacggcagcggcgcccggcaaggtgggcggatttccacacggcagcggcgcggggccagtgggattcaggagaatag

SEQ ID NO: 34047 - DNA, 453 bp, Escherichia coli
  misc_feature (426)..(435): n is a, c, g, or t
atgaaaagtatagcaacagcagtatctactatcaatgtaccattccacggcgcagagctttatgttgtcaatcacaacggcgaaccgtataccccaatgaaacctatcgttgaaggcatgggtatggattgggcttcacagtttacgaaaatgaagcagcggtttaaaacctccattgtgaaaatcacaatgcagcttcctagtgatgaacagcgccgtgagattatttgtttggcacttcgcaaacttgcaggttggctgcaaaccattagccctaacaaagtccgccctgaaatccgcgacaaggtaatccagtatcaggaagagtgtgacgatgtgctctacgaatactggactaaaggccatgtagttaacccacgcaaagctaaaaaggcgttgccgggtaaaatcaccactgaacagcannnnnnnnnnccatgtggtcgtcactga

SEQ ID NO: 34048 - DNA, 429 bp, Escherichia coli
atgtggtcgtcactgaaatcccattttggatgttcatacaaagaaatcagcgatgagcagtttaccgaagctctgtcacttgcagctcgcgttccgcttgaaggcgagttaatcggcaaacaagagaagaaagcaaacgagctttctgcaaaagaagcaaacagccttgtatggttatgggattatgccaaccgcgcacaggcattattccgcgaactgtatccggcgctaaaacaaattcaatcgaactattccggcagatgctacgactatggccatgagttctcgtatgttatcggaatggcaagagacgttttaataaaccacacacgagatgttgatatcaatgagccagacggaccaacgaatctttccgcatggatgagacttaagaataaagaattacctccttcagtacataactactga

SEQ ID NO: 34049 - DNA, 261 bp, Escherichia coli; identical to SEQ ID NO: 5351

SEQ ID NO: 34050 - DNA, 573 bp, Escherichia coli
  misc_feature (466)..(475): n is a, c, g, or t
atgcagtattcaccagaaactgttgctctcatatttatgctggcaggttttggctctgcagctggaagttgtataggtggttttatgggggactggcttggaacccgaaaagcatatgttatatcacttcttatcggtcagcttgttattatccccgtttttcttgtggaccgggactatgtatggttacttggccttctaatctttactcagcaggtttttggtcaggggattggtgctctggtgccgaaaataatcagtggttattttaatgtggagcagcgtgcggcaggactggggtttatttataatgtaggttcacttggtggagcatgtgcgcctattcttggtgcagttgttgcgtctcatacaagtcttggtacagcaatgtgttctcttgcttttatcttaacatttgttgttcttgtccttattggttttgatatgccatcacgtgtacagagannnnnnnnnntacagagatggatccatccagaagctgcgcttgaatatgatactgtcgatggaaaacctttttatggagcaagaaaaaagaatgttgcagaagaataa

SEQ ID NO: 34051 - DNA, 312 bp, Escherichia coli
atgaataattttataaatgaatgtatttccgctccgagaataaacggcatggcagaatttttctcatcaactgcatcaggggaaaaacacaaaccttttagactagtagaaatagatgatcggctttttcattcttatgattacattaagtttgccaaacacctcacaaaaaacagcggccctttcgttaatcattatttttgcagtataccatacagcaaggaagaagagtgcagattaggaacaacagtaataaaatacgcaatcacgctaaacaaaaaaattaaacacatggtgtcttggtatggctga

SEQ ID NO: 34052 - DNA, 141 bp, Escherichia coli
atggcgttcagtccatgcatcggaatagatgtattccgcgccgaagtagggttgatgcgaaacattacccacggtgaatttttgccagtccaggcgtgttttgaaggtgtaattatctacagcctgggaaatgtgtcctaa

SEQ ID NO: 34053 - DNA, 531 bp, Escherichia coli
atgaagcaaataaagtcacccggtgagactatcgagtctcatggcggaaacgaaaattttaacttcgtgcagctctctcggagctacttacaccaaatgcgaaaattagctcgcaaaagccccatagcgcatgaaattttgtattacctagtcgaacacatgggtagaaccacaaatgccgttgtgtgcagttacacaacgctctgtgaaataaccggtgtaagtaggccaactgtaggaagggctataaagctcctgaaggatgatcagtggatagataccgtaaagatcggcaatgcaaatgcctattgcgtaaatgagagggtgttctggcaagctggaagaaatcaaagaaaatacgcgatcttctcagcaacagttatcgcatctgccaccgatcaggagagcgatttccaagaaaaagccaaacagaaactgacctatatcccaatcattgaatctagtgacattcctacgactggaactgacgaactaccgccgccagaccaaggggatctttcgttggagtga

SEQ ID NO: 34054 - DNA, 384 bp, Escherichia coli
atgctctatttcaacagttgggaacgtccaactgatgatgtagttgatgaatcaacgcatggttttatggagggctttaataaactttttaccgatcttttctcaacctttaagctaaaaaccttcagaacccatcttggtatgtatctatttggtttcggcgctgaatggctatttacagcgacatttacctatttcattgttttcaaccttgaacaaccgagaacatttgtttctgagatgaactcattaagcagtatttgtcagttcttctctacagcattctttatgatgtggtgtgccaaacgaggatttaaacgcccatttatcattgctatcttaattgttgtatcttcagtgattggttatgttggtaaagtgtaa

SEQ ID NO: 34055 - DNA, 132 bp, Escherichia coli; identical to SEQ ID NO: 6261

SEQ ID NO: 34056 - DNA, 867 bp, Escherichia coli; identical to SEQ ID NO: 22971

SEQ ID NO: 34057 - DNA, 375 bp, Escherichia coli
  misc_feature (362)..(371): n is a, c, g, or t
ttgcgttttttagcatggtttttaaaccacgaaacgcaggcaaaagcgtggattaacgatctcattaaaaataaagcgcgaatcctcgataccaaagagcgtaacatttttgaaaatcgctttactgcactaatgaacgctccggaagatatctacgcagatattctttctcgcttgtttaacaccactcactctggtcagcgactgcgagttctgaatttaataggcagtaaaggtgaactggcattacaggttggtgaggccgaaccgtttggccttatcaatattggtgatgcaccgtctctttacaaaatgtgtgaagaggatacgacatttgattatcagagagatgattttgcaannnnnnnnnnttaa

SEQ ID NO: 34058 - DNA, 660 bp, Escherichia coli
  misc_feature (575)..(584): n is a, c, g, or t
atgggtgacaaaactgttgccgttgaggcatttgaaggcaacaatctggttctgattgatgaagggcataaaggcaccggaagtgctgctggtgcctggatgcgccgtcgtgacaaattaacacgtgacggatttgcgtttgaatattcagcaacttttggccaggcagtagccggtggcaataatgttgaggcagttgaaacagaaattcagaagaaaaaagcaaagctgctttttgaaacaacggccttaggtaaactgaacgaagaagagttagcgcaaatagcattaaccagcgaagaaaaacgagatgcgcgtattcaggcgacgcgagaggtctatggaaaatcgattctgttcgattactcctataaattcttctatgaggatggttatggtaaagaatcactgattcttaaccttaatcctgaagaggataaaaaagatgagcgtcggtatgagtattttaccgcgtgtttgctcagcttttatcagcaacaatatttattcaataagaataaagaaaaattaagtgaatttaatatcgaaaaaccgctgtgggtttttgtcggtannnnnnnnnnattcagacattcacgcagtattgcgttttttagcatggtttttaaaccacgaaacgcaggcaaaagcgtggattaa

SEQ ID NO: 34059 - DNA, 1200 bp, Escherichia coli; identical to SEQ ID NO: 6880

SEQ ID NO: 34060 - DNA, 1143 bp, Escherichia coli
gtgaatccagagcagatcgagttcaacaaacttttgagccaaaaccaaaaaaaagccagcataaaagcatgcttgcgagccggcgacgataaacttaagtgttctgggaaaattatccacgcccactctatccaacggggaaaaatacttgaatctatcgcagatataagcggagaaaacgaggggaaaatatatcaccttggcttagtgccggcagagaacatgcaatctatgcagccggaatttaagctacaaggaatcaaaaaattcagcaccttcaccggattctgcggcggccacgacaaagccatattccaaccgattgaagatgtagcgttcagtgcaacgaacaagcagctgaacatctacgcctatcgggctgcagccaaggaattacactccaaccttgagttaaaggctttgtgcgaagttctgctgggtgacaagttaaacgttgatgactttccagcgcacttccagatgatgctaccgcagatcaagtcaggcaaatacgaggtccctgacttcattcgcgaagccatgttgcaaggagagaaaaaccatcaaattcgggtacagcacatgcagtgcgaacacaacatttctgaactgcagcaaatctgcgacgagttgacagacactatcgaacgcgaggagccgttgggattcgagcacgtctaccatgtcctcgacggtgctttccctgtagcatgctgcgcgtcgtttatcccatacttcgaccatgatggcagtcggatcatatctaagcaagaggggcagcgaatggctcgatcaagcgcagcgagcaatgctgaaaaaaagaacgtgatgctcaacgtttttccggagggcgataaaacccatgtcatcttcaccttctctaagggtaaccagagtttcaaggcgtcgatagaacgactactcaagctggaggatgaagcgctgaagattggtctttcaaacatcgtgctcaactacgttggaaactccgcctacggtccgaagtacattaacgataacttcagccctgaacagatcaaacacattgcggaggtgttcgcggtctccgtattcgacagcagtaagtttcgaaagagcggtatcaatctatttgttggaagaccaaccgctgcgaccaagtaa

SEQ ID NO: 34061 - DNA, 783 bp, Escherichia coli
gtgaccaagagagatgacttcaaagcagccacgaaattagcgcttgcccgtcgggctgcacatttttgctccaatccgcgttgtctcaagctcacgattgggccgcactccgacccaaacaaagctttgatttcgggtcacgctgcacatatccatgcggcctccgaactggggccacgctacaaggcctcgcagaccgtcgcagaacgaacgtccatagataacggtctgtggctttgtcgggagtgcggagtcattgtcgatggcgacgactgtgcttacgacgcggacttgcttcgcaagtggaagcgagaccacgagaatatggtgtcagaggttcgcaccgaaggatattcacgcagccttgccttgcttcaatctgggcgcatggaaccgcagatagcgaaggaaatcgtctctgcaatgacggaccgtcgttcgatatgggccacattcgatgccgaatgtcccgaccacgtacgacagtcgcttgatgaacttcgtcgacgattcaccactattcgggggaatctcctcgacggaacagctcttgatgaaatactgctgtcgctaaccaagacgattctgattttcttcgacgcgatgaagtcagtcgaccttagaacattacgatgtagttcaggtaatcctgagtggctccatttcaatgacgcactgtcagcacttcggaaatccataggaatgcagattgccaaccttgcaaatgcctacggcattgccttgtgcaaaaatcttcagagtattgcgccgaccagaatctag

SEQ ID NO: 34062 - DNA, 465 bp, Escherichia coli
atgtattcaggctcggcaacactttcttctacaccgataagtcggtacaccacgatttgctttgttcggccttttctctcaccagtatcaacaattaacccaatctccatcaggtgtcgtaagctgtcctgcacagtctttttattcagttccgttacttctgccagtgcagatacagacgggtatgcgcacaaatcggcaccgcacatatcagcaagccaggtcaatactgacttactggatgaactgccggttttcacctttttagcccatcgtagtgcatcaatactcatacgaaccccagacagatatttgtttatctgcaaagtaatgttggtattgctgacgatacgcatgcttgaaagcaatggctttttctataagctcgtcagtctcacgttccacaacagctggatctgcaaaaagcagcccggactccaccacatcgccatattctttgtttaa

SEQ ID NO: 34063 - DNA, 219 bp, Escherichia coli
atgactgaaatcgttgcagataaaacggtagaggtagttaaaaacgcaatcgaaaccgcagatggagcattagatctttataataaatatctcgatcaggtcatcccctggcagacctttgatgaaaccataaaagagttaagtcgctttaaacaggagtattcacaggcagcctccgttttagttggcgatattaaaaccttacttatggatagctag

SEQ ID NO: 34064 - DNA, 213 bp, Escherichia coli
atgacaggtatcattgccagtatatacggcttcctggggtctgaatctgacattccagtgccaggagtgcggagagtggttcagataaaaaagacgcatctgaatatcgtgaaattatgggttcatggtgaattaaataaacctgataataacagtatggtgaaagtccggaataaaaaaatggtccggtattatgcaaaattctcaaggtga

SEQ ID NO: 34065 - DNA, 561 bp, Escherichia coli
atgaacttgaccggcgccagcgggaagcggaagagtcttgctgagcagcagaaactgattgaagaggcgctgcgtgcagcagaaggggctcacagggaggagttagagaaacaacgcctggcgctggaacagaaaattcaggaagcgcatgctcagtatgaacgtgctaaatccatggctcagcttacgaaacaggggcatgtttatatcatttcgaatattggttcgtttggtgagaatgtctttaaaattggcatgacccgacggctggagcccatggacagggtcaaagagttaagtggtgcttctgttccgtttgattttgatgttcacgccatgatttcctgtgatgatgcgcctgcgctggaaaaaacacttcatgacagtctggaaaaataccgcatcaacaggattaatctgcgtaaagaatttttccgcgtgaagcttgagaaaatcattaatgaagtggagcgtcaccacgggcaggtggaatatgtggctgacccggcgcctctgcagtatctgcagagtctggagtacgcggaaaatgaagctgcctga

SEQ ID NO: 34066 - DNA, 333 bp, Escherichia coli
atgacgagcaaagaaacctttacccattaccagccgctgggcaacagtgacccggctcataccgcaaccgcgcccggcggattgagtgcgacagcgcctgcaatgaccccgctgatgctggacacctccacccgtaagctggttgcatgggatggcaccaccgacggtgctgccgttggcattctggctgttgcagctgaccagaccagcaccacgctgacgttctacaagtccggcacgttccgttatgaggatgtgctctggccggaggctgccagcgacgagacgaaaaaacggaccgcgtttgccggaacggcaatcagcatcgtttaa

SEQ ID NO: 34067 - DNA, 207 bp, Escherichia coli; identical to SEQ ID NO: 7021

SEQ ID NO: 34068 - DNA, 963 bp, Escherichia coli
gtgacctttcacatctggacggcgtacagcccgttcaccacctgggttcagattgtcaaagactggatgaagacgaaaggggatacgggaaaacgtaaaaccttcgtgaacaccacgctcggtgagacgtgggaggcgaaaatcggcgaacgtccggatgctgaagtgatggcagagcggaaagagcattattcagcgcccgttcctgaccgtgtggcttacctgaccgccggtatcgactcccagctggaccgctacgaaatgcgagtatggggatgggggccgggtgaggaaagctggctgattgaccggcagattattatgggccgccacgatgatgaacagacgctgctgcgtgtggatgaggccatcaataaaacctatacccgccggaatggtgcagaaatgtcggtatcccgtatctgctgggatactggcgggattgacccgaccattgtgtatgaacgctcgaaaaagcatgggctgttccgggtgatccccattaaaggggcatccgtctacggaaagccggtggccagcatgccacgtaagcgaaacaaaaacggggtttaccttaccgaaattggtacggataccgcgaaagagcagatttataaccgcttcacactgacgccggaaggggatgaaccgcttcccggtgccgttcacttcccgaataacccggatatttttgatctgaccgaagcgcagcagctgactgctgaagagcaggtcgaaaaatggggggatggcaggaaaaaaatactgtgggacagcaaaaagcgacgcaatgaggcgctcgactgcttcgtttatgcgctggcggcgctgcgcatcagtatttcccgctggcagctggatctcagtgcactgctggcgagcctgcaggaagaggatggtgcagcaaccaacaagaaaacactggcagattacgcccgtgccttatccggagaggatgaatga

SEQ ID NO: 34069 - DNA, 147 bp, Escherichia coli; identical to SEQ ID NO: 23041

SEQ ID NO: 34070 - DNA, 303 bp, Escherichia coli; identical to SEQ ID NO: 7218

SEQ ID NO: 34071 - DNA, 303 bp, Escherichia coli; identical to SEQ ID NO: 7218

SEQ ID NO: 34072 - DNA, 999 bp, Escherichia coli; identical to SEQ ID NO: 23048

SEQ ID NO: 34073 - DNA, 315 bp, Escherichia coli
gtgtcatcctgtcgcgattgcgttcttagtccgtggctattgcaccatcatcacgcgaaaggtacagctaagcgcggcgggatggttaagccagcaacgttaaccgttgcatttaaaaaagcgcgggattctgtggattacaactggcgtgctaatggcaccccaccctctttccatgagcagagatctttatcagagcgattgttcagagagcagggaattgatacccaaattttgctgggtcattcgaatcaaaaaatgaccgatatttacaacgatgcacgcggcaaggagtggaaaaaactggtcatttga

SEQ ID NO: 34074 - DNA, 579 bp, Escherichia coli
atggttgcatcaggggattatctcgatgtaaccactccacagattgaggctggtacaggcgcatcatcttttattgttacggggacggcaccggtaacgcgggcaagcgatatggttacagttccgattaagaataatctttataatcttccttttacggttctttgtgaggtacataagaactggtataaaacgccaaatgcagcaccgcgtgtttttgacacataccggcatcaggcagatgcggggatcgtaatggggtttggttcatcaggtgggtacgacggttttccgtattgtgatataggtggttcaaaccgacgaataaatgaaaatgccgggctggaaaaaatgcttattggtatgcgggtaaagtccgaacggtccacatgtgtagtcagtaacggtaagttaagcagcgaaactaaaaccaaatgggaatatatccggagtacagcaaccattcgcattggtggacaaactacagcaggattacgccatttatttgggcatgtgaggaattttcgtctctggcataaagagctaacagatgcgcagcttggggaggttgtggagtga

SEQ ID NO: 34075 - DNA, 645 bp, Escherichia coli
atgcaggcggtgaatgccgtgctgtatggcaaatacaccatggaaggggatcagtttgatactgtcgaggtggatttcgggcgctctgaaggaaataacattgagcaggctgacggtaaaaaatggtctgagcaggaccgtgatacgtttgatccgacgcatgatattgacctctattgcgatcaggccagcggccttgtgaatatcgccattatggacggtacggtctggcgtctgctgaatggctttaagctgttccgcgaaaaactggatacccgtcgcggctcaaattcacaactcgaaacggcagtgaaagacctgggggcggtggtgtccttcaaggggtattacggcgatctggccattgtggtggcgaaaacgtcttatgtggcagaggacggtaccgaaaaacgttatctgccggagggcacactggtcctggggaatacggcagcagagggcattcgttgctatggtgccattcaggatgcgcaggcgttgtccgaaggtgtggtggcctcttcccgttatccgaaacactggctgactgtgggcgatccggcccgtgaattcaccatgacgcagtccgcaccgctgatggtgctgccggatccggatgagtttgtggtggtacaggtgaaataa

SEQ ID NO: 34076 - DNA, 369 bp, Escherichia coli; identical to SEQ ID NO: 7135

SEQ ID NO: 34077 - DNA, 441 bp, Escherichia coli
atggatctttttgcccgcagggttatcggctggagcctgtcagcgaatgccgatactgcactgataagcagtgccttgcggatggcgtatgaggtgcgtggtcagccgcgggacgtcatgttccatagcaaccagggaagtcagtatacaggactgaaatatcaacagcttctctggcgttacaggataaagcaaagtgtcagccgacggggaaactgctgggataacagtcctatggaacgcttcttccgcagtctgaaaacagaatgggtgccgacggatggttacgtaggcaaggacgaggcccggcaacaaattagcggttatatcctgaattattacaatagcgtcaggcctcaccattacaacggtgggttgacgccggaagaatcagagaacagataccgtttttactgtaaaaccgtggccaatattacttga

SEQ ID NO: 34078 - DNA, 330 bp, Escherichia coli; identical to SEQ ID NO: 7303

SEQ ID NO: 34079 - DNA, 243 bp, Escherichia coli; identical to SEQ ID NO: 6972

SEQ ID NO: 34080 - DNA, 210 bp, Escherichia coli; identical to SEQ ID NO: 22985

SEQ ID NO: 34081 - DNA, 327 bp, Escherichia coli; identical to SEQ ID NO: 23069

SEQ ID NO: 34082 - DNA, 261 bp, Escherichia coli
atgctgatggcggggattcagttcaccactggtgagcatgagctccagttgtttcatcagcagcggaaaggcctggtccaggtggtatgcatctgcatcgctgaaccggcctctgataccggcgcggtcggcaaggtaatgcaaccggttacccttctgcaccagacgtgccccgaaacagggcgtcacggtgcagggcagtccccaccagaggcggtcgtgattgtcgtcgggaggcgttgtcccggggagtgtgtctga

SEQ ID NO: 34083 - DNA, 243 bp, Escherichia coli
atgcggcttagtgattattttccagaatcatcaatctcagttatacattcagcaaaagattggcaggaagctatcgatttctcgatggtatcattgctggataaaaactatatcagcgagaattacattcaggcaattaaagattccaccattaacaatggccttattatattctcgcaccaggcgtggcaatgcctcatgcgcgaccggaatgtggggcgcttaaaaccgggatgtctttga

SEQ ID NO: 34084 - DNA, 1947 bp, Escherichia coli
atgacagtaaaaatttctggcgtgcttaaagatggcacaggaaaaccagtacagaactgcaccattgtgctgaaggccagacgaaccagcagcacggtggtggtgaacacggtggcctctgaaaatccggatgaagccggacgttacagcatggatgttgagcatggccagtacagcgtcaccctgctggttgaaggttttccgccttcacatgccgggaccattaccgtctatgaaggttccagaccaggtacgctgaatgattttctcggtgccatgacggaggatgatgtccgaccggaggcactgcgccgctttgagcagatggtggaagaggtgtcacgtaacgcctccgcggttgcacagaatacggcagccgcgaaaaaatcagccagcgatgccagtgcatcagccagcgaggcggcaactcatgcaaccgatgctgcagcctcagcacgtgccgccagcacgtcagccggacaggccgcgtcgtcggctcagtcagcgtcttccagcgcaggaacggcatcgacaaaggcccgtgaagcagcaaaaagtgctgctgctgcagagtcatcaaaaagcgcggcagctaccagcgccagtgccgcgaaaacgtcagaaacgaatgccgcagcatcacaaaaatcggcagccacttctgcatccacagcgaccatgaaggcgtcagaagctgccacctcggcacggggtgcggcggcctcaaaagaggcagcgaaatcttcagaaacgaatgcatcatcaagtgccagtagtgcagcttcctcggcaacggcggcaggaaattccgcgaaggcggcaaaaacgtccgagacgaacgctaagtcttctgaaacagcagcgggacagagcgcctcagctgcggcaggttcaaaaacagcggctgcattatctgccagtgccgcgtcaacaagtgccgggcaggcctcagccagtgccaccgccgccggaaaatcggcagaaagcgccgcatcatccgcttcaacagccacaacgaaggctggcaaagccactgagcaagccactgcagcagcgaggtctgcttctgcagcaaaaacctctgaaacaaatgcaaagacttcagcagacaatgctgcttcctctaaggcggcagccgcatcgtcagccagttcagcggcgtcatcggcatcatctgcgtctgcttcaaaagatgaggcgaccagacaagcgtcagcagcgaaaggtagtgccacgacagcaacaacgaaagcatcagaggcggcaggcagtgcgacggctgcatctcagagcaaagttgctgctgaatccgcggcaacgcgcgccgagacagcagcaaaacgggcagaggatattgcatccgccgtggcgctggaggatgcgagcacgacgaaaaaggggatagtacagctcagcagtgcaacaaacagcaccagtgaaaagctggcggcaacgccaaaggcagttaaaactgttaaagatagttcagttcaaaaaactggcgacacaatgggagggcagttaaaaatcagcacgataaatgctcttcgaatattcaaccaagcctttggccttatttttaggcgttccgaagatcatcttcatcttattccgactaatgaaggggagggggaaaatggagacatcggttcattaagaccattctctataaacttaagatcagggttggtgtccatcggtaatggactaaaagttggtggtagtgttactggtaatttgaccggaaacgcagatactgcgaccaagatcaagacagcacgtaagattggggcgtggcatttgatggatcggcagatatcaacttgcctggagtcaacgctaccggtaatcaaaacactacaggtaatgctgcgaccgccacgaaacttcaggcagccagaacgattaacggtgtgtcatttgatggtagtgcaaatatcacattga

SEQ ID NO: 34085 - DNA, 1152 bp, Escherichia coli
  misc_feature (1135)..(1144): n is a, c, g, or t
atgcgcaatacactcatacccatcttcattgcgatatgcttgtttataaccggtgtcactattttgaacatccagctctggtattccgcaaaagcagagtacctggcgggagcaagatatgccgccaacaatatcaatcatatacttgaagaagcgtcacaggcgactcaaacggcggttaacattgccgggaaggaatgcgacctcgaggagcaatatcagcttggcactgaagcagctctgaaacctcacctgcgcacaatcatcattctcaaacagggaacggtctggtgtacatccttaccggggaatcgggtcctactgtctcgtattcctgttttcccggacagtaatttactgctggctccggcaatcgacaccgttaatagattacctatcctgctctatcagagccaatttgcagatacgcgcattttggttacgataagtgatcagcatattcgcggggcgcttaatgtacccttgaaaggggtaaggtatgtattacgcgtggcagatgacattattggacctacgggtgatgtgatgacgcttaatggacactatccctataccgagaaggttcactccacaaaatatcatttcactattatctttaacccgccgccactctttagcttctacagacttatcgataaaggctttgggattttgatatttattctgttaatcgcctgcgccgctgccttcctgcttgataggtatttcaataaaagcgcaacgcctgaagagatcctgcgacgggctataaataatggggagatcgtcccattttaccaacctgtggtaaatggtcgggaagggacattgcggggagttgaggtgttagcccgctggaaacaacctcacggtggatatatatcacccgcggcatttattccacttgctgaaaaatccagattaatcgttccgcttacgcgaagcctgatgaatcaggttgccagacagatgaacgctatcgcgagtaaactgccggaaggttttcatattgggattaattttagcgcctcgcatattatttcgccgacatttgtcgacgagtgcttaaattaccgtgacagttttacccgtcgcgatttaaacctcgttctggaagttaccgagcgtgagccannnnnnnnnngccattaa

SEQ ID NO: 34086 - DNA, 1902 bp, Escherichia coli
  misc_feature (1887)..(1896): n is a, c, g, or t
atgaaactacattttgaatctgaccttacctatcagcaaaacgccattacttcggtctgtgatttatttgaagggcaagagaaatgggagagcgaaatgactgtgctggccccagctcagggcgcactctcatttgaagccgcaacaggttcaatgcctgtaaacccacagatacccgaagatgatgttctgctgaaaaacctgaacaaggttcagttgaagaatcagcttccaccttcacctgtgctcgacagccatgattttactgtcgagatggaaacagggacaggtaaaacgtatgtttatcttcgcaccatgctggagctgaataaacgttatggcatgagcaaatttatcattgtggttccttccattgccatcaaggaaggcgtttataaaacactacaaatcactgaagaacattttaaaagcctctatgcgggaattccatacgaatactatctgtatgactcgtctaaacctgcggatgtgcgaaattttgcaaccagctctgttatgcagatcatggtaatgacagttggtgcgattaacaaaaaagacgttaataagctctatcagtccagtgaaaaaacaaccgttgacgatctggataagccaattgatctgatacgtgctacacgcccaattattattgtagatgaaccgcaaagtgttgatggtggcttaaatggtgcgggtaaaaccgcacttgatgctatgcacccaatgttcaccttacgctattcagcgacacatgtgcataaacatcatatggtgtatcgcctcgatgccattgatgcttacaatcagaaactggtcaaacaaattgaagttgccgggcttgaagtccagaatgcaagcaatagcccctatgtaaaactggtcagtattaacagtaagaagaatagcattagcgcgactgttattgttgatatagccgataaaaaagggggcgtgaatcgttctgagattaccgtgtatgacggtacggcacttgatgacgaaacggggcgtgatatttatcagggatacaggataagcgagatccgcacgggcaaagacggttatctgacgctggaaacgccttctaatacctactatatgcaagttggtgatgtcgtgggtgatattgacccgatgctcatccagcgtcatatgattaggcgtacaattcgtgaacatcttgataaagaacttcgcctgaattcccagcaaatcaaggttctcaccctgttcttcattgataaggttgatttctatcgccagactaatgaagaaggacttcgtgaaccgggtgaatatgctcgtatctttgaagaagaatatctaaaagcgatcaaaagcccagcatataaagatttgctcccttctcatccagaacatgctaaagacgttcatgatggttatttctccattgataaaaaaggtggatgggctgaaacaaccgaaagcaataatgcaggccgcgaaaatgcggaacgcggttataacctcatcatgaaaaataaagagaagcttttgagtttctcgaatccggtgaggtttattttttcacactctgctttgaaagaaggctgggataaccccaatgtattccagatctgtagccttcgagagatgggaagtgaacgagaacgtcgtcaaacattagggcgtggtcttcgcctgtgtgttaaccaagaaggtgaacgtgttcgtgatgacagcattaacattctgactgtcgttgccagtgaaaattacgaagcctacgctgaacgattacagtctgaaattgagagcgaaacgggtatccgttttggtatcatcgaaaaagatgcgtttgcccatctgatcttctctgattcctcacaagctgtgggtattgccggttcacgaagtccttcnnnnnnnnnnacatga

SEQ ID NO: 34087 - DNA, 267 bp, Escherichia coli
atgctgtttttcgtccagttcatccagcagatcggcgataatatccatttcccgatgacgaatttgacacttaaacgccgccactgcttcgctacaatcctgctcagcatttgggttatccgtgatggcctcataccacgccagcgtcgattgatagttttgtgctgccttacgcaacgcctgataatcaatctcgctcactggtgcctcctttacggatctgcgctgcgatgcacgaaaaaaaagactctcgcgtatgacagttaa

SEQ ID NO: 34088 - DNA, 291 bp, Escherichia coli
atggcagaagatcgcagcacggtaacagcggcaaccggtatgacagtaacgccagccagtgcttctgtagtgaaagggaagagcaccacgctgaccgtggcattccagccggaaggcgcaaccgacaagagcttccgtgcggtgtctgcggataaaacaaaagccaccgtgtcggtcagtggtatgaccatcactgtgaacggcgttgctgcaggcagggtcaacattccggtcgtatccggtaatggtgaacttgctgcggttgcagaaatcaacgtcaccgccagttaa

SEQ ID NO: 34089 - DNA, 231 bp, Escherichia coli; identical to SEQ ID NO: 27231

SEQ ID NO: 34090 - DNA, 621 bp, Escherichia coli
atggctaagcctgaaattaaatatgacaatcctgaattggatgtaaattatgattatgtcggaattgttgacggtttaagttgtgacgacaggaaagaatttggcatcacaactgagctgggaaatttgctgagaagtgcgcaattacctgtaaaagaggcgctagtaaatactaagcaggagcttcttgatgcgttaagcacattccttaaagatgctatgaatggtcagcgtttcatgctccattttgtagctcatggaaacgaaaaaggaatacaaattggtactgactttgtgacttgggatattttacgtccgcatttgcaagaaatcaatgcagcaacggaacgaacactacttttgaatatgagtacgtgtaaaggtcttcatggagttaagattgtcggtaggattggtgagtatcctttttttggtttaattggtgcgaaagatgatttatatgtgattgatgcgctaaatgcaaataaaataatgtattgcaagtggcttgataacctaccagttcaaaagattgttcccgagacaaatgcggaacttggtaaggacgttttgtttaatatttcatctgaagggtttaggaaattaactaaccctgagtga

SEQ ID NO: 34091 - DNA, 645 bp, Escherichia coli
atgtttgatgcatccttgctgaatctgccatgggcaacgctggtgacgctcaccagtggttatatcggctattttattgcgaacgtggggctgaagaaccatcacaaacccattgaggtgacgttttcgacgctgatttttggtttgctgtcaatgatggtttaccaggctgttatgtgggcaggtctgaattcgtggctggcgacacctccaacacttctttgcgcttttgcatacgctgcattatggagaaaatatgggcgtaaatggatgtacagattcctcagaaataaggatatatcatggtctgatgataccccctctgcctggatgcgtatgtttgatcaacatggatactatatcagcgaggcgtatgtctatctgaagaatggtactgtgctgctttctgaaaatccggggaaatttgaaggccaggccagcggttcttttgtgttaggagtggaaaaagacatagtgatgtatgtcactcatgaaaaaaaaccggggcgcgatgaatggattgaaaaagatgttgaaagtaaaagctggggagcgatggcaacctatatccctgcagatcagattgccatggtgaggatcagacgaaccagaaataaagctattagcgcacggcagaaagattag

SEQ ID NO: 34092 - DNA, 1290 bp, Escherichia coli
atgaatcagttctttaataagctgggatttgcttccaataccacacaaccgggcgtctggcaggggcaggccgccgggtatgcctatggtggctccctgtatgcccgcacccaggtcaaaaatatccagctgatttccatgacgctgccggatatcaatgccggatgtggcggcatcgacgcctatctcggctcgttcagttttattaatggcgatcagttgcagcgttttgttaagcagattatgagcaacgctgccggttacttttttgaccttgccctgcaggcaacggtgccggaaatcaaaaccgcaaaagacttcctgcagaaaatggcaagcgacattaacagtatgaacctcagctcctgtcaggtggcgcaggggattgtcggaggattatttcctcagactcaggtgtcacagcagaaggtctgtcaggacattgccggtgagagcaatatttttgctgactgggccgcgtcccgtcagggctgcacggtcggaggacagtcatcgtctgttcgtgacaaggccagtgacaaagataaggaacgggtgctgaagaacatcaatatcatctgggactcgctgtccaaaaacaggatgcttgatggtaacaaagaactgaaagaatttattatgacgctcaccggtacgctgatttttggggaagacagcgagattacccccctgccggcgcgtaccactgaccgcgatatcctccgggcgattatggaggggggaacggcaaaagtttatcactgcaacgattcggacaagtgtctgaaggtggtggcggatgcaaatgtgaccatcgcccgggataaagccctgaaatcacagattacaaaactgctcaccagtattcagaataaagcggtgagtgatactccactggatgacagggaaaaaggcttcatttccagcaccaccgtccccgtctttaaatatcttattgacccgcagatgctcggtgtgtccagcagcgtggtttaccagctgacggactatatcggctacgacatcatgctccagtacattcaggaactgcttcagcaggcccgggccatgattgccaccgggaactatccacagaccgtgctggacagtgtgctggagaatctgaatcaggcacagcaacagattgcggttttccaggggcaggtaaaggtccagcaggatgcattgctggttgttgaccgtcagatgagctacatgcgccagcagctttccgcccgcatgctcagccgttaccagaacaactatcacttcggagggagcacgctgtga

SEQ ID NO: 34093 - DNA, 744 bp, Escherichia coli; identical to SEQ ID NO: 8105

SEQ ID NO: 34094 - DNA, 234 bp, Escherichia coli
atggcaacgtcaaaaaaaataaattatccggtgctgtatgagtccggaataacacctccgttatgtgaagtcagtgcaccagaacctgatgcgggtgggaaacgcattgtggcatatgtttataaatcatcacggaatacggtttttgaaaatcctgacattgtaaaaacctgtacggtcagggatttgaagaatgattttgtgaactgcgatgagaaaggtgagggacaatga

SEQ ID NO: 34095 - DNA, 516 bp, Escherichia coli
atgaaacagatttctttatttattccgctgctggggacgttattactttccggctgtgccggaacgaactccgattttgagtgtgatgccaccacatccgatacctgtatgactatggagcaggccaatgagaaggccaaaaaactggagcagtcctcagaagcaaagccggctgcggcatcactgccgcgcctggctgacgggaacttccggaccacgtcggtgcaggccgttgcggcgacaacgccgtcccgcagcaggcctgctgtgactgcacttccggagcagaaactgctggcaccacgtccgttgtttacggctgcccgggaagtgaaaacgattattccggtcagttcagttgcgtcggtaacacctccccgcccgctaagaacgggtgagcagacggcagcattatggatagcgccttatattgataatcaggatgtttatcatcaaccatccagtgtgttttttgttattaaaccgtctgcgtggggaaaaccacgtattaattaa

SEQ ID NO: 34096 - DNA, 321 bp, Escherichia coli
atgaacatgcgtaatattaatgttattactgcccgcgctgtgccggataaaaacgtatcagatgattttatgcatgctgttctcagtaactgcaccacaaggatagttcttcctgcactgaagaaattcggttctgaatcattgccgcacaattttaatatggctgctgtcggtgtgatgaaggagggaatgtcgatgcgtttattttcttctccggggcatattgtggttgccggacaatccggtggcggaaaatctgttccggtgaaagaactaatcgacagaattattcagaaatataaggaacccttcgatgaataa

SEQ ID NO: 34097 - DNA, 474 bp, Escherichia coli
atggccctgatggctctgtttgttttatggaaggacaacaccacgccggggaaattactggttaaggagattaacttcgtaagacaaacagcacctgccggacagttcccggtcagtgaatgctggttttcttcctctgattcttcaggcagatcagaaatacaggatatctgccattaccgcgcggctgatgctgcagattatgtcagggagactgaccggtcactgatgcaactggtcaccgcattctgggcaacgctggcactgatgtatatgtcgtttgcggcaggcaccgggaaatatccgatgtggcccggaaaaatgaaatgtgtccgggtgggaaccgcagatgaacatctgaaggaagtttatacggaagacgcttccctgccggaaaaaatcaggaaatgccctgtttatttccatgatgacagaacaaacagaagcaacggagataaaaatgaacatgcgtaa

SEQ ID NO: 34098 - DNA, 333 bp, Escherichia coli; identical to SEQ ID NO: 12755

SEQ ID NO: 34099 - DNA, 957 bp, Escherichia coli
atgtatggagatgctcatgctgaatggggggttaaacctaaaattcttggtgttggtggaggattaggcgttagaggtggtggtcgggctggtattgattgggaagataatgatgcgcatacggcaagtagtaatactcagtcgagccataatgctcgtcatgatatcgatgccagagctacacaagactttaaagaggccagcgattactttaccagtcgcaaggtcagtgagtccggcagccatactgacaataatgctgattcccgtgtggatcagttgtctgcagccctgaattcagcgaagcagagttacgaccagtacacgacgaatatgacccgcagccatgaatatgctgaaatggcatcccgtactgaaagcatgagtgggcagatgagtgaagacctgtcgcaacagtttgcacagtatgtaatgaaacacgcgccacaggatgcagaagctattctgacaaacaccagttcaccggagattgcagaacgtcgtcgggcgatggcgtggtcttttgtgcaggaacaggtgcagcctggtgttgataatgcctggcgtgaatcccgtggcgatattggtaaaggaatggagagcgtaccttcgggtggtggcagccaggatattattgctgaccatcaggggcatcaggccattattgatcaaagaacgcaggacagtaatatccggaatgatgtaaaacatcaggttgataatatggtcacagaatataaagggaatataggtgatactcagaacagcgtacgtggcgaggaaaatattgtaagaggacagtattctgaactgcagaatcaccataaaacagaggcattatctcagaataataaatataatgaagaaaagtcggctcaggaaagaatgcccggggctgacagtccacaggaacttatgaaaagggcaaaggaatatcaggataagtataagcaataa

SEQ ID NO: 34100 - DNA, 207 bp, Escherichia coli
atgctgatagaagccggactgagcacctacgagaaagagtgcgcgaaacgcggtgacgactatcaggaaatttttgcccagcaggtccgtgaaacgatggagcgccgtgcagccggtcttaaaccgcccgcctgggcggctgcggcatttgaatccggactgcgacaatcaacagaggaggagaagagtgacagcagagctgcgtaa

SEQ ID NO: 34101 - DNA, 234 bp, Escherichia coli; identical to SEQ ID NO: 28326

SEQ ID NO: 34102 - DNA, 357 bp, Escherichia coli; identical to SEQ ID NO: 17246

SEQ ID NO: 34103 - DNA, 234 bp, Escherichia coli; identical to SEQ ID NO: 10186

SEQ ID NO: 34104 - DNA, 846 bp, Escherichia coli
atgaactgcagtgcaggtcagctgcttgccagcgccgcctcccggcgtctggtcacgcagaccgcccggacaggctccatcggcgtcatgatggctcacagtaattacggtgctgcgctggagaaacagggcgtggaaatcacgctgatttacagcggcagccataaggtggatggcaacccctacagccatctaccgggtgatgtccgggaaacactgcagtcccggatggatgcaacccgccggatgtttgcgcagaaggtgtcggcatataccggcctgtccgtgcaggctgtgctggataccgaggctgcagtgtacagcggtcaggaggccattgatgccggactggctgatgaacttgttaacagcaccgatgcgatcaccgtcatgcgtgatgcactggatgcacgtaaatcccgtctctcaggagggcgaatgaccaaagagactcaatcaacaactgtttcagccactgcttcgcaggctgacgttactgacgtggtgccagcgacggagggcgaaaacgccagcgcggcgcagccggacgtgaacgcgcagatcaccgcagcggttgcggcagaaaacagccgcattatggggatcctcaactgtgaggaggctcacggacgcgaagaacaggcgcgcgttctggcagaaacccccggaatgaccgtggaaacggcccgccgcattctggctgcagcaccacagagtgcacaggcgcgcagtgacactgcgctggatcgtctgatgcagggtgcaccggcaccgctggctgcaggtaacctggcatctgataccaataaagaattacttaatacacctgaagctttaccggtataa

SEQ ID NO: 34105 - DNA, 216 bp, Escherichia coli
atgtggctactgattttctggctttcatcgccctttaatgtctcttccggtgatgcccgtcagcccacactggcggtgcacagccaagcctttcataccgaacgggcctgccgcgatgcattgcgcgccattaaaaaggagaatgttggcgaattttctctgcggggcgtttgtgtttctgacggaaatacgaaggaggaggctgagagctcatga

SEQ ID NO: 34106 - DNA, 234 bp, Escherichia coli
atggtcacagaataccgaggcaatatcggagatactcagagcagcatacgtggcgaagaaaatattgtaggaagacagtattctgaactacaaaatcaccataaaacagaggcattatctcagaataataaatataatgaagaaaaatcgggtcaggaaagaatgcccggggctgacagtccacaggaactgatgaaaagagcaaaggagtatcaggataagcacaagcaataa

SEQ ID NO: 34107 - DNA, 471 bp, Escherichia coli
gtggcgatagcccacatatgcggccttcgatgtgtaggttttggtaaacaccaggtggccaaccacgctgaatcccgcatttttccaggcggccataaagcgatcgacgcggttccagccgtagaagctgaccatcagcgcatcttttttcagcacgcggtacatttcattacaggccggttgcagccattcatcggttttatcgccagcgatggtgcgcccgaaacggtcacgaaaaccgacgaggtacggcgggtcagtcagtatgaaatcaatggcgttatcaggaatacgggccataacatcgatgcagttaccgaggacaaaacgggacatacaacgctccttctcttacagaggacaccaggagggcacccctgtggtgcccgttccccgctgcctgtgggctgttcaccgcgtccggtaacgggtcaggccgaccgtggaataccgcagccgtcgtctttttga

SEQ ID NO: 34108 - DNA, 363 bp, Escherichia coli
gtgggctatcgccacgaatgtgcctacatcctggcaaaaggccgtccggcgctgcctcagaagccattgcccgacgtgctgggctggaaatattcgggcaatcgccatcacccgactgaaaagcccgttaccagcctgcaaccactgattgagagcttcacacatccgaacgcgattgtgctggacccgtttgcaggcagcggatcaacctgcgtggccgctcttcagtccggacgccggtatatcggtatcgagctgcttgaacagtatcaccgtgccggacagcaacgactggccgccgtgcaacgggccatgcagcagggggccgcgaatgataactggtttgaaccggaggctgcgtaa

SEQ ID NO: 34109 - DNA, 195 bp, Escherichia coli
atgggcgaaaagtggatacagggcgcgatctgctttcacggcaggatggtacaagtttttctcattacgcaggtaattttgacattgggtctggtcattcaatcaataactatgaccaaatcgttgacaaccaacctggattctcccgtttttcatttgcaggtccttcgcgaggcgatggggttaattatgtga

SEQ ID NO: 34110 - DNA, 288 bp, Escherichia coli
gtgctgggctggaaatattcaggcaatcgtcatcacccgacggaaaagcccgttaccagcctgcaaccgctgattgagagcttcacacacccgaacgcgattgtgctggacccgtttgcaggcagcggctcaacctgcgtggccgcccttcagtccggacgccggtatatcggtatcgagctgcttgaacagtatcaccgtgccggacagcaacgactggccgccgtgcaacgggccatgcagcagggggccgcgaatgataactggtttgaaccggaggctgcgtaa

SEQ ID NO: 34111 - DNA, 258 bp, Escherichia coli; identical to SEQ ID NO: 11054

SEQ ID NO: 34112 - DNA, 207 bp, Escherichia coli
atgctgatagaagccggactgagcacctacgagaaagagtgcgcaaaacgcggcgacgactatcaggaaatttttgcccagcaggtccgtgaaacgatggagcgccgcgcggctggtcttaaaccgcccgcctgggcggctgcggcatttgaatccgggctgcgacaatcaacagaggaggagaagagtgacagcagtgctgcgtaa

SEQ ID NO: 34113 - DNA, 174 bp, Escherichia coli
atgttctggagccctgaagtaataacgacgaccggaaaatcgcttcgcatcactcaaattcaatttaacataatatacattatgcgcaccaacataacccaagggagaatccagtcgttggcggtcatgatgtcctgctcattaacaacgaccaaaaccccatatcttacttaa

SEQ ID NO: 34114 - DNA, 423 bp, Escherichia coli
atgaaaacaattgatatgttggctaagtatctaaatgaatggccattaaaatattctcgtatcgttcaggctgaagactgcgttttttatggcgtttttgctggtaatgaaatgcattacgaagtaattcagagtgagggactgaccgggttaactcttagcgaagaccatggtactagcgttacgttccatgactggataacagcacaacgttctgaaatggaaaaaggcgatgtgtttgatatttctcgctctgtttgcgctaaagcaaaaagtgataatgattacatgagcgaacacttatacaacatgaagctacagtgccttgccgaggtgcttggtaaaaaagctattgtcgataaacaaggcgccattagcgaagcaaaggcaataaatgctgcatttgatgaaattattttctag

SEQ ID NO: 34115 - DNA, 420 bp, Escherichia coli
  misc_feature (5)..(14): n is a, c, g, or t
atgcnnnnnnnnnncagtaaagataatgagaggcggctggaaacatttcaaaaatggtatgaaaaaaataaagttttgttagaaagtcataaacaaaaacgaacagagaagattgacgttgccgtacgacttgtagggctgaaagcctatgatctgcatgaagggattccggatagtccaaaacgaaaagttaaagatggcataaatgaagacatcaaagccgataccagtttacgcctgccaaagacaaatataagtgatacgtcgctaaaccgttatcgccgcactgttaaggagattatcaataacgaaatcgacgcattcctgttggaacagaagaaaaaaaataaaagatttccctacagtgaagatagagatgtgattcgacctttatggggaaaatgcctgaccgggcagtag

SEQ ID NO: 34116 - DNA, 180 bp, Escherichia coli
gtggctaacgatgccactccttatcttatggtgctgctacttaataacgatgtctggtgtaagagtcgtgaggtggtggttctcagaaatctaattgagcaggcgtggggaaaagtattggatgaagataactccgttacacatctggttgtgtatcctgaagtgggctttgttgaataa

SEQ ID NO: 34117 - DNA, 2439 bp, Escherichia coli
atggatattaattttacagagttgattattagcaagcaaactattgattatgctaaactagttacaaatatttgttctggaaaggcaatgttgtttttgggggcgggtttctctaaagaagctacgaatattaatgatactaatccttcttcttcaatagagctatctcatatattatgtggtctttgttcaatacctaaaaatgataatctacgcttttcttctgattattacttagcaaaaaactcgtcattaaaattaatagaactattaatttataattattctataaaaacaacatcggagaaccaaaatataatcgcatcgctaccatggaaacgttgttacacaactaattatgaccgatgttttgagatcgcagctgaatcatccggtaataaattcgaaactatagatcttgagcataaaacaaaggaatattataagcgcaagaatttatgtattcatcttaatggttcaattaataatatttctactgaaacgcttgatgattcattcaaactttctgattcatcttattcaagccctgactcttttactgactctgaatggttctattattttaaaagagatttagataggtgtggcgcgatcgtttttatcggttattcaatgtatgatattgaaataaaaaaaatcctttctaccttacctcaattaaaagagaaaacattttttgtaactagtctcaatcctgatatcgaattagaatttactctagaaaaattcggtaccgttttgcctataggtttgagtggttttgccaatagaataagagataatattacttcagtatcagaagagcaggagtataagctacagtcactttttcttcatgatataaccaatgaatcaagttctattagagatgaagaggttgaaaaaatgttgatgtatggtgatttggatgatcatcatattgataattttatacttggtaatactaaggtaccgtttttagtaaaaagaagtgaaattgataaagctgtttcattaattgaacaatcaaaaaatgtaattatttattcggcgcttggaaacggaaaaaccatcttattgaaagagctaaggagtgttttatccgtcggtggttatgatgtttatacagtggccgatatagatggtgattttatatcagatattgactatatagcacaatcatccatgaaaaatatcatattacttgatgggtatgagaagaatcttgaattaatggaacatgtgggcagagctgcttacgaaaatgtactaatacttgctactgcccgtgttgcagatcatgaatatcacagagatgatttggagcgcataaaattcaaatattctgaaataaatattgatatgttagatgaggtagagttaaaagatttttcaaaaataatagataacttaggtctttggggagataatgcagggcttagtgtagagcaaaaggtaagatatttagctaatgagaataacagtcaattctcaattgcattgcttactcttttggagtcgccgcaaataaaaaataagataagtgatttaattaccgggattaaaaagagtaagagtcatgaaaacacaattatttcaatttgtctttgtcaaatacttggcattgaaacgaatcgagggattatatctgatcttgcaggcaatgatttgatttatgatccggattttactaataacagtgcgtttaaggcaatatttaatttccatggcggtaggatcattaacgggtctagtttattttgcatacatctaataaaaaataatttcactcctactgttattatagagcgaatgcttactattgcatcaaggtttaatcaattaaactctaaggattatgaacaggatagaatatttaaagctatgctcaggttttcttttgttgagcagctgcttcctgaaagtatgaaaatatcaacgctacaacgatattatgaaaagttaaaaattgaagttccatggctaaattcaaacccacacttctggttgcaatacgcaatgtgttttattgcttacaaaaattacccaaaagcacaacagtatattgaccaggcatatgcgttagctgaaaagcgagcaaaatatcacacgaacaatattgatacccagcaagcaaaaatatatttgctttcaagcgaaaagataccagatggtaatattgtattctctaatttcgaaaaggcaaacaaccttcttagtaatttggatgtggatatttactctctgaggcagttttcgagatataaagattttcatttgtcaaattacaataagctatcgaagagtaataaagttaaatatatggaagcatgtaaacagtctttaaataaaatatctgaatatgaaggagatggcggcgtaagtcaatcatatgttgctaaagtgattgaaatattaaagcatattacaaaggtataa

SEQ ID NO: 34118 - DNA, 156 bp, Escherichia coli
atgatacgtaagtcagctacaggtgttattgttgcgttagccgtaatctggggtggtggcacatggtacacaggtacgcaaattcagcctggtgtcgaaaagtttattaaagattttaacgatgctaaaaaaaaggtgaacatgcctacgatatga

SEQ ID NO: 34119 - DNA, 2445 bp, Escherichia coli
atgaaaacgaaaatccctgatgcggtattggctgctgaggtgagtcgccgtggtttggtaaaaacgacagcgatcggcggcctggcaatggccagcagcgcattaacattaccttttagtcggattgcgcacgctgttgatagtgcccttccggcaaagtcagacgaaaaggtaatctggagcgcctgtacagttaactgtggtagccgctgcccgctacgtatgcacgttgtggacggtgaaattaaatatgttgaaacggataataccggcgatgacaactatgacggcctgcaccaggtgcgcgcctgtctgcgtgggcgttccatgcgtcgccgtgtctacaatccggaccgcctgaaatatccgatgaaacgagtcggggcgcgcggtgaaggcaaattcgagcgcattagctgggaagaagcctacgacatcatcgcgaccaatatgcagcgcctgatcaaagagtacggcaacgagtctatctatctgaactatggtaccggtacgctgggcggcaccatgacccgctcctggccgccgggaaataccctggtcgctcgcctgatgaactgctgcggcggttatctgaaccattacggtgactactcttccgcgcaaattgcggaaggtttgaactatacctacggcggctgggcagatggtaacagcccgtcggatatcgaaaacagtaaactggtagtgctgtttggtaataaccctggcgaaacgcgaatgagtggcggtggggtgacttactatcttgaacaggcgcgccagaaatctaatgctcgcatgatcatcatcgatccgcgctataccgacaccggtgccgggcgcgaagatgagtggatccctattcgtccgggaacagatgccgcactggttaacggtctggcgtatgtcatgatcaccgaaaacctggtggatcaggcattcctcgataaatattgcgttggctacgacgagaaaacactgccagccagtgcgccgaaaaatggtcactataaagcttatattctgggtgaagggccagatggcgtggctaaaacgccggaatgggcctcgcaaatcactggtgttccggcagacaaaatcatcaaattggctcgtgaaatcggtagtaccaaaccggcgtttatcagccagggatggggcccgcagcgtcacgctaacggtgaaatcgcaacccgtgctatctcgatgctggcgattctgaccggtaacgttggtattaacggaggcaacagcggcgcgcgtgaaggttcatacagcttaccgtttgtccgtatgccgaccctcgaaaacccgatccagaccagcatttcgatgtttatgtggaccgatgccattgaacgtggcccggaaatgacagcgctgcgtgatggtgtgcgcgggaaagataagctggatgtgccgatcaaaatgatctggaactatgccggtaactgcctgattaatcagcattctgaaatcaaccgtacccatgaaatccttcaggatgataagaagtgcgagctgattgtggttatcgactgccacatgacctcatcggcgaaatatgctgacatcctgctgcctgactgcaccgcttcagaacagatggactttgcactggatgcatcctgcgggaatatgtcttacgtgattttcaacgatcaggtgattaaaccgcgctttgaatgtaagaccatctatgaaatgaccagcgaactggcaaaacgtcttggcgttgagcaacaatttactgagggccgtacccaggaagagtggatgcggcatctgtatgcccagtcgcgggaagcgattcctgaactgccaacgtttgaagagttccgtaagcaggggatctttaaaaagcgcgacccacaagggcatcacgttgcttataaagctttccgtgaagatccgcaggcaaatccactgaccacgccatcggggaaaattgagatttattcgcaggcgctggctgacattgccgcgacctgggaattgccagaaggtgatgtgatcgatccactgccgatctacacgccgggctttgaaagttatcaggatccgctgaacaaacagtatccgctgcagcttacgggtttccactataaatctcgcgttcactcaacttacggcaacgttgatgtgctgaaagcagcttgccgtcaggaaatgtggatcaacccgcttgatgcgcaaaaacgcggtatcaacaacggcgataaagtcaggatctttaacgatcgtggtgaggttcatattgaggcgaaagtgacgccacgaatgatgccgggtgtggtcgcactgggtgaaggtgcctggtatgacccggatacaaaacgtgtcgataagggcggttgtatcaacgtactgaccactcaacgtccgtctcctctcgctaaggggaatccgtcacatacaaaccttgttcaggttgaaaaggtgtaa

SEQ ID NO: 34120 - DNA, 537 bp, Escherichia coli
atgccgcagaaaaagaaccctgatgtggcggaaaaaatgcgtggtaaaggtgggagaatgtatggaaatctgatggccatgctgactattatgaaaggcataccgctagcgtataatacagacatgagcgaggataaagagcaggtctatgactcaatggatactctacaggccagcttaagaataatggcacctatgatcgaaaaaatggttatccttgccgaaaatacgcgtgcagcagccgctcgaggattctcgaatgcaacagatatggccgattatctggtccgtaaaggtattcctttcagagaagctcaccatattgttggtagtgcagtaaattactgtattaaacataaaaaaatgttagaagagcttactatggaagaattctccacatttgataataaaatagaaaaagatatttatgaaagtatttctctggaggcttgcattaaggccaggatgtcttatggtggaaccggacctgatgctgtcaaaaaacaaatagagattgcaaaatcacttttaaaatag

SEQ ID NO: 34121 - DNA, 1164 bp, Escherichia coli; identical to SEQ ID NO: 20236

SEQ ID NO: 34122 - DNA, 456 bp, Escherichia coli
gtgagcaaacaacattggaaacagcttaacaacatcaaatattcgctctaccggatggaacaaccatcactatcgcctcgcgcttctgccgctttgagtggtgttctcgtggtcatcgcaacggcgttcattgcgggcaattggggagtttatataacgttcctgatcggggcggccgtgggtatcgcggtctaccagttcgcgccgctatcgaagtcgtgggctgagacactggataaccaattgacggcctatgatccggtagacgtggaggcctatgcagaactgcaagacgtgacccgttcacttggcaggctcgatcttggcgaggtattccactggttggacagagaacgccatgcccttagttacagtcggccaatgccatcacaaggccaaaaatacaaattcatcagcaagcaagtccgccccaaacgtgacaacggtgaggtttga

SEQ ID NO: 34123 - DNA, 207 bp, Escherichia coli
atggagtacaaactttatcaataccgcctagctggtaaataccgatatgacatcactatgaacagcgtttactttttaacggccacgtcgatggaaaatgcagagagacaactacgggaagtgatccacgatagaaatatcatttacgacctccgagagtgtagctttgatgagctgcctgcaattttcgctcaactcccccggtaa

SEQ ID NO: 34124 - DNA, 360 bp, Escherichia coli
atgaaaatgatggtctttcttctggtcgtcatggttgcgtacatggcgttcttccgtgatgacggccgggacgcggcggcagcgacctatgccgcgcagcggatcaacgagcaggacaaaattctggttgagcttcaatcgctcaacgatccccacgtatcggatttcgtccgcgattggcgctactacgcgccaacgccttcgcctgagcagctttctgagcttcggataattcagcagaacatcaagaacgataaaagcgttgccgaaaagtacacgctggaatggcaaaacaagaatggcttctgctcaaaggttgaaggcatgtttggcaagatcgaatgcacgcccggcctctga

SEQ ID NO: 34125 - DNA, 369 bp, Escherichia coli
atgggattagacattggacaattaagcccgtgggtggtcggcgcttacttagtacccttattggcggttctggcgtggatcgtggtcggtgcattcaaggacggcgaactgccgatgatgccggggcttctggccatcatgctgatgggattcggcatgttcgccgtctacgaacccaagcccgacgagtgggaaacgttcaaggccgcacacaactgcaaggtcgtggcgaagcgtgacggccatagcaacaacgggatcggcgtcaccactcgcggcagcgtgggctacatcatcggcgacgatacgcccgatcaggtcgcctaccagtgcgacgacggcgtgacttactggaaaaatgcgaggtag

SEQ ID NO: 34126 - DNA, 399 bp, Escherichia coli
atgaatagtcgagttacttgtacaaagcttgacatctctgtcaatagaaatctagacaaaaatcatacacttacattaaaaaaaattcgtttttataatagcgcaatgatttttattagaaatgcacaattagttattaaagcaaaagatggagatgttattaacatccctcctttttctttatgctatatagaaaagaatcttgtcgttgatgcaacattaaaagtgcttggcagcggtataccttatgatatctatactattgatagctatctattaaatagcgtgtgtaaggttatggagccacttcttttaggccatcaactagtgagtcaaataagaaaaaaatatttttttatatccttgaggaaacagataaagaaatttttaaacgtctga

SEQ ID NO: 34127 - DNA, 147 bp, Escherichia coli
atgcgaaatgaaaaaaatcgcttaaaatgcgattcagagcgttttagggaggttctgttagttctcctgcattgcgcccgtagttcgctgacgctcacacgcgcagtacagcgccccgccatgctgcaatgcaccagggcggggtaa

SEQ ID NO: 34128 - DNA, 318 bp, Escherichia coli
atgagcatagttgatgattcacatcttacagacgaagtggttaacgccgctttcgaaggtaccaatttcgggcgcactgatttccgcaccattctggcagaaacagttatgaagcgtgctgctggctatcactctggctacacggcaacgactatctgtattcgcctgggattgcttggcaaacacgatcgcccgacaaaactcggcctgaccttcgctttccatcactactacaggccatgcgttcgcgaagcgctgatttcgcataacagccttgaagtatgggcaaaacttggagcacaggagtccgccaaatga

SEQ ID NO: 34129 - DNA, 258 bp, Escherichia coli
atggatgaagaaagggtgttttcactcagctatgaacaactgacccggtttgcggaacgacgcatccgggaatgcaatctggacagccagggcgcgatttatctctgcgagtcagccaaagccggagccgtgctgatcttctggcatgaactggccataaatggctatgcctcgatgaatgccataaagagacaggagctcattgacgccgactttcagcgcctcagaaacctcatctggccggaggatgacaggtaa

SEQ ID NO: 34130 - DNA, 279 bp, Escherichia coli
atgcaacttacaagtactcgcaagaaagcgaatgcaattacaagcaacatcctaaatcgaattgctgtacgtggtcagcgaaaggtggccgacgcgttagggattaatgaatcgcaaatttcacgatggaaagacagcttcatcccaaaaatgggaatgcttctggctgttcttgaatggggtgttgaagacgaggagttggcggaactggctaagaaagtagccagaatgctgacaaaagaaaaagccccgaagaacggcgaattcttcgaggcctga

SEQ ID NO: 34131 - DNA, 690 bp, Escherichia coli
atgactctcaataaaaccgatcgcatcgtcattacgctgggtaaacagatcgttcacggcaaatacgtgccaggctcgccgcttccggctgaggcggagctctgtgaggagtttgcaacctcgcgcaacatcatccgtgaggtgttccgttcgctgatggcgaagcggctgattgaaatgaaacgttatcgcggcgcgtttgtggcaccgcgtaaccagtggaattacctcgacactgacgtactgcaatgggtgctggaaaacgactacgacccacgacttatcagtgccatgagcgaagtgcgaaatctggtggaaccggcgattgcccgttgggcggcagagcgcgcgacttccagcgatctggcgcagattgaatcagcgctgaacgagatgattgccaacaatcaggaccgcgaagcgtttaacgaagcggatattcgctaccacgaggcggtgctgcagtcggtacataatccggtgttacagcaacttagcattgcgatcagttcgctgcagcgggcggtatttgaacgaacctggatgggtgatgaggccaacatgccgcaaacgctccaggaacaaaaggcgctgttcgatgcgatacggcatcaggacggcgatgcggcagagcaggcggcgcttaccatgatcgccagctcgacacgaaggttaaaggaaatcacatga

SEQ ID NO: 34132 - DNA, 981 bp, Escherichia coli; identical to SEQ ID NO: 31456

SEQ ID NO: 34133 - DNA, 297 bp, Escherichia coli
atgccagcgcctcagtatggtgcggatgacccgcgccgctgttccggcaattccgtatcggaggtgctggataaattcagaaaaaactacgatcggataatgtcgctaccgcaggaaacgaaagaggaaaaggaatttcgccattgtatatggcttgcagagaaagaagaacgagagcgaatttaccagacatcaatccgaccattccgcaaagccacatatacccaattccctgaatatatcgacccgcgcctgcgtaattaccgctcacgctatggcgctatcagtaatgactga

SEQ ID NO: 34134 - DNA, 174 bp, Escherichia coli; identical to SEQ ID NO: 22511

SEQ ID NO: 34135 - DNA, 282 bp, Escherichia coli
atgaacaactaccagaatctggcaaatattggtcttggcgctcttcaggggcaggcaaacgccgggcaaacatatgccaacaacatgagccagatttcacagcaaagcgcggcactggcggcggcaaacgctaatagaccttccggccttcaatctgcaataggcggggctgcctctggagcaattgctggagcacagcttggcagcattgttcccggtattggtactggtattggtgccgctgttggcggcggtcttggtcttcttggttcactgttttaa

SEQ ID NO: 34136 - DNA, 279 bp, Escherichia coli
atgaacaactaccagaatctggcaaatattggtcttggcgcactgcaaggtcaggcaaacgccgggcaaacatatgccaacaatatgagtcagatttcgcagcaaagtgcggctcttgcagcggcaaatgccaacagaccatcagcaatgcaatctgctattggcggaggtgcgtctggtgctattgctggggccggacttgcgaaattaattggttcatcaactccgtggggggctgcgatcggcggcggtcttggtctgcttggctcgttgttttaa

SEQ ID NO: 34137 - DNA, 1236 bp, Escherichia coli; identical to SEQ ID NO: 6259

SEQ ID NO: 34138 - DNA, 990 bp, Escherichia coli; identical to SEQ ID NO: 6828

SEQ ID NO: 34139 - DNA, 720 bp, Escherichia coli
atgccagaaatacaagggatagcctcaaggatatttcagtctggcgttcttaattattcatcatattttgaaaaattcacagaggtttcttttctcaataacaatagcacaggaatgatatccttggtaggtgagtttagaacaccgccaatatccgtactgaaatccatttatggagaagtagcgactgatatattagacttagcaacaactcttcagcaagaagttgatgataaaaatgacatagagtatgcaattcccttaaatgtaaaacttgtttttgcgacatcagatgatgatgggaataccataaccttagctaaagctgatgagggaatcgaggggcttaagaaggctctaattatagaaaaaccagtagatagatcaagaacacatccgtatttgcagaaggatgccattgagcatataaatgaaaaaatctacgaactttatagtatagaaaagatagaaaagcatttagtattcaaagataacaaaacaggaaagaaagcgataaataaaaattgctttgatgctgttatttgtaagaacggatggagaaaatcaaataataaatatcatcacaaaaacaataatccagaataccactattattcaccagcattagtagatgaatttgtcaagaaagctatgacaaacgaagattatctaatgaatacaaaaaaatggtataatgccagaagaagtaagaaaaagtga

SEQ ID NO: 34140 - DNA, 645 bp, Escherichia coli
atggtaagcttcgtaagctactctgcgaaagttcgtgctgacatccgcgataaactgattcagtaccaggaagaatgctttactgtgctgcatgactactggacgaagggaaaggcagaaaatgcacgtaagaaaacatctgttgatgacaggactccgcttcgtgatgctgtaaatatgctggtcagcaaaaagcatctaatgtacccagaagcttatgcaatgattcatcagcgtttcaatgtggaaagtattgaagagcttgatgcatctcagataccgcaagcagtagagtacatccacagggtagtgcttgaaggtgagttcatcggcaagcaagagaagaaaaccaacgagctttctgcaaaagaagcaaacagccttgtatggttatgggattatgccaaccgttcacaggcattattccgcgaactgtatccggcgctaaaacaaattcaatcgaactattccggcagatgtcatgactgcggttatgagttctcccgtattatcgatatggcgagagacgttttaatcaatcacacacgagatgttgatatcaatgagccagacggaccaacgaatctttccgcatggatgagacttaagaataaagaattacctccttcagtacataactactga

SEQ ID NO: 34141 - DNA, 219 bp, Escherichia coli; identical to SEQ ID NO: 34063

SEQ ID NO: 34142 - DNA, 279 bp, Escherichia coli
atgatctttgcggcggaagaagcattacgcgataccaaaatgcaaatcaagtcgttaaagcgagaagccagactggcgcaatcgatggaagaacaaaagcaaaaccaggaaaagctgaagctactggaacggcagcagaaacgccaacgtatggaaatttttgacattgaagatgagatcgctgacaagcgggatgaactcatcagtgcccttgaagagcggatgaagcaaaaaacggatatcaccgagcttttttccatccgctggaaagttatttaa

SEQ ID NO: 34143 - DNA, 732 bp, Escherichia coli; identical to SEQ ID NO: 7219

SEQ ID NO: 34144 - DNA, 732 bp, Escherichia coli; identical to SEQ ID NO: 7219

SEQ ID NO: 34145 - DNA, 1029 bp, Escherichia coli
atgggattgtttacgacccgccagttactcggttataccgaacaaaaagttaaatttcgtgcgctgtttctggagctgtttttccgccgtacggtgaatttccataccgaagaggtgatgctggacaaaattaccggaaaaacgccggtggcggcctatgtctccccggttgttgaaggaaaagtgctgcgtcatcgtggtggtgaaacccgcgtgttgcgtccgggctacgtcaagccgaaacacgaatttaattaccagcaggcggttgagcgccttcctggtgaagatccatctcaactgaatgatccggcttaccgccgtctgcgtatcattaccgataacctcaaacaggaagagcacgcgattgtccaggtggaagaaatgcaggcggtaaatgctgtgttgtatggcaaatacaccatggaaggagaccagttcgagaaaattgaggtcgattttggcaggtcgacgaagaataacatcactcagggtagtggtaaggagtggtcaaaacaggatcgtgacacgttcgatcctacacatgatattgacctctactgcgaccaggccagcggtcttgtgaatattgccattatggacggtaccgtctggcgtcttctgaatggttttaagctgttccgcgaaaaactggatacccgtcgcggttcaaattctcaactcgaaacggcagtgaaagatctgggcgcagtggtgtccttcaaggggtattacggcgatctggccattgtggtggcgaaaacgtcttatatagcagaagacggtatcgaaaaacgttatcttccagatggcatgctggttctggggaatactgctgcagatgggatccgttgttacggtgccattcaggatgctcaggcgttgtccgaaggtgtggtggcctcttcccgttatccgaaacactggctgacggtaggggatcccgcccgtgaatttaccatgacgcagtccgcgccgctgatggtgttgccggacccggatgagtttgtggtggtacaggtgaaataa

SEQ ID NO: 34146 - DNA, 348 bp, Escherichia coli
atggtgacgaaaaccatcactgaacagcgtgcggaagtacgtatttttgccggtaatgatccggctcataccgccacaggcagcagcgggatttcctcgccaacaccggcactgacgcccctgatgctggatgaagccaccgggaaactggtggtctgggacggacagaaagccggtagtgcggttggcatactggtactgccgcttgaaggcacagagacggtgctgacgtattacaagtcggggacctttgcgacggaggcaatccgctggcctgacagtgtggatgaacacaaaaaggcaaatgcctttgccggcagtgccctgagtcacgcggcgctgccgtaa

SEQ ID NO: 34147 - DNA, 378 bp, Escherichia coli
gtgtcagacacactccccgggacaacgcctcccgacgacaatcacgaccgcctctggtggggactgccctgcaccgtgacgccctgtttcggggcacgtctggtgcagaagggtaaccggttgcattaccttgccgaccgcgccggtatcagaggccggttcagcgatgcagatgcataccacctggaccaggcctttccgctgctgatgaaacaactggagctcatgctcaccagtggtgaactgaatccccgccatcagcataccgtgacactgtatgcgaaagggctgacctgcgaagccgacaccctcggctcctgtggttacgtttatctggctgtttatccgacaccggcagcgcccgcaaccaccgtataa

SEQ ID NO: 34148 - DNA, 477 bp, Escherichia coli
atgcaacaactttcctttctgcccggagagatgacacccggcgagcgcagcctcattcagcgggccctgaaaaccctggaccgccatcttcatgaacccggcgtggccttcacctccacgcatgcggcacgggaatggctgattctgaacatggcgggactggagcgtgaagagttccgggtgctgtatctgaacaaccagaatcagctgattgccggtgaaaccctcttcaccggcaccatcaaccgtacggaagtccatccccgggaagtgattaaacgcgccctgtaccacaatgccgctgccgtggtgctggcgcacaatcacccgtccggtgaagtcccccccagcaaggcagaccgccttatcactgagcgtctggtacaggcactggccctggttgatatccgggtaccggaccatctgatagtcggtggcagccaggttttctcctttgcggaacacggtctgctttaa

SEQ ID NO: 34149 - DNA, 237 bp, Escherichia coli
atgcttaacccacccaatggcgtgcaacttaagctccggatacatggcgttaacttctggcattttcatcaacgcttcaacgatatgtccgccgaatgttgccatgtcttcctgcaacaattcctgtgcgctaataaccatatcaacggtgatgttttcacatgtgtcgaacttaaccatgacagcgttctgtacttcaggggccagcttgtcaaaagtgacgttcatcggatctga

SEQ ID NO: 34150 - DNA, 150 bp, Escherichia coli
atgttccaggaattgccagtgaaattttgcgcgggcgcgacgttcatcaccggcttcaatggcagtggctacagcgactgcaccttcttcctttattgcctgttcgtccggaatggcggcgcaaataaagactttactcatttgttttaa

SEQ ID NO: 34151 - DNA, 312 bp, Escherichia coli
atgagagttgagcagaataatttcagggacatgttctccgtttatctctccggcccgccgcagacgcagcatgtgttttgtgtatccccggcggcccgggtcgcgcacacgggtctggcaggcgaagaacggctgaaagccttcccgctgcagactttccagcacggtgatggtggggatatacgtatagcgttcactgcgggaggtatgccggtcttccccgaaaatccccggcacatagtgcatcagttcttcgtgtgtcagcggacggtcacggcgtatctggttcgcataaccaaaacgactggctag

SEQ ID NO: 34152 - DNA, 414 bp, Escherichia coli
  misc_feature (397)..(406): n is a, c, g, or t
ttgaataaacttgcatactggaacgctaccggttcgggtaaaacactgctattgcatgtcaatattttgcaatatttacattatttccagaacggtaatacccaccattacccggataaaatcatcctgcttacgccggatgaacgcctgtcgaagcaacatttagatgagctggaaaactcaggatttacccaataccagttattcgataagagtaaatctgcgcccttcaaaggcacgattgaagttattgatatcaataaacttgccgatgaaatgggtgacaaaactgttgccgttgaggcatttgaaggcaacaatctggttctgattgatgaagggcataaaggcaccggaagtgctgctggtgcctggatgcgccgtcgtgacaaattannnnnnnnnnacacgtga

SEQ ID NO: 34153 - DNA, 162 bp, Escherichia coli
gtgatactacgtcatcgtactggcccggcattccaggccataaaagacagtctggcagtgggactaaatgcactgacgctgacggatattaccaaaaatgcaacgtatggcgttgagacagaaagtctggtgctggagataaatgcaccggcatcatcataa

SEQ ID NO: 34154 - DNA, 384 bp, Escherichia coli
atgacacgcagaacagctttcaaaggttcatcagcagctcgtcgccgtgaacgtttaaaggcgcaagccattgcacagtgtgttgaagctcgtgaagaggttatcagttcagagaaacttcatcgccctaccctcagtcgggcacagattcaggctaaaggtaaacacgaaacgcctgagcgcatagaagacgctaagccaattaagttcatggcacaggacgtgatctggcaacagaaagaatacagacgcaatctggagagagcggccattgtgtacgcgaatgagtttggacataagcaaccagaaactggtgtatgtcttccagatgtagctctttacgcagcaggataccggaaatcaaaacaactgacggcgagatga

SEQ ID NO: 34155 - DNA, 699 bp, Escherichia coli
atgcaggatatccggcaggaaacactgaatgaatgcacccgtgcggagcagtcggccagcgtggtgctctgggaaatcgacctgacagaggtcggtggagaacgttattttttctgtaatgagcagaacgaaaaaggtgagccggtcacctggcaggggcgacagtatcagccgtatcccattcaggggagtggttttgaactgaatggcaaaggcaccagtacgcgccccacgctgacggtttctaacctgtacggtatggtcaccgggatggcggaagatctgcagagtctggtcggcggaacggtggtccggcgtaaggtttacgcccgttttctggatgcggtgaacttcgtcaacggaaacagcgatgccgatccggagcaggaggtgatcagccgctggcgcatcgagcagtgcagcgaactgagcgcggtcagtgcctcttttgtactgtccacgccgacggaaacggacggcgctgtttttccgggacgtatcatgctggccaacacctgcacctggacctatcgcggtgacgagtgcggttatagcggtcctgctgtcgcggatgaatatgaccagccgacgtccgatatcacgaaggataaatgcagcaaatgcctgagtggctgtaagtttcgcaataatgtcggcaactttggcggcttcctttccattaacaaactttcgcagtaa

SEQ ID NO: 34156 - DNA, 411 bp, Escherichia coli
atggctcaggttgccatttttaaacaaatattcgataaagtgcgaaataatttaaactatcactggttttattctgaactaaaacgtcacaatgtctcacattacatttactatttagccacagagaatattcatcttgttcttgaaaacgataatacggttttaataaaaggacagggtaaggttgtaaatgtaagattttcaaaaaataaatgccttatagaagcctccttaaaaggattcaaatcaggagagttatcattttacgaatacaggaaaaatcttgctacagcaggggttttcagatggattacaaatatccacaaaaacaaaaggtattactatacctttgataattcattactctttactgagaacattcagaacactacacaaatatttccgcactaa

SEQ ID NO: 34157 - DNA, 210 bp, Escherichia coli; identical to SEQ ID NO: 22985

SEQ ID NO: 34158 - DNA, 192 bp, Escherichia coli
gtgactaaacaggaaaaaaccgcccttaacatggcccgctttatcagaagccagacattaacgctgctggagaagctcaacgaactggacgcagatgaacaggccgatatttgtgaatcgcttcacgaccacgccgatgagctttaccgcagctgcctcgctcgcttcggggatgacggtgaaaacctctga

SEQ ID NO: 34159 - DNA, 327 bp, Escherichia coli; identical to SEQ ID NO: 23069

SEQ ID NO: 34160 - DNA, 906 bp, Escherichia coli
atgaaagataaaaattgctctttatgtcattccttaacggaaataaaaagccacctgcatgaattagctattttgacggaatgcttctacggaaatcatagatcaaactttcttgcaatgaatcagtggttaactctatcttcaactcttgataatgtagaaataaatccttatttgcatgatagaagttcattatcaataatgtgccgtccgcattatgaagcattagagtctgataggaaatactttagtgcctataccacagagttaactagacttttcttcgtttgcaatgctttagaagaagtctataggtttgtatcaaccttctttactaatgagctaaatacatccttcaagaatcctgtcagagataacagtatgaaatgtctgattttatttgataaaattgaggaaaggcatttaccaaaacatttcgaacattacaatcaaaacttatgcactttattcgaacgatacacctcgctttataacaaaaaagtgaataataaattaagttaccctaaagaacaccgttgctatgccctcaatattattcgaaatataagaaatgacatcgcacatggggtaatccctataaatcttaacccagagtatggttttacaggtgataactggaaaacattatattttttgattcaacgagcaacaagaaccatccttctgtatattcaggcttttttatcaaagtacggaaatgattttgatatggaagaatattatgaaagagttggctatatatattggcttgaatccaaggatatcagaaatgagtgtacagagtcagtagaagtatcagaacctgctgatttgtcagctttgctctctgagctgcatcttaaatctggtttcggctactaccgattcatcgactcaagttactaa

SEQ ID NO: 34161 - DNA, 1011 bp, Escherichia coli
atgaccgtccgtaaaaatccggctggcggttggatttgtgaactctacccaaacggcacaaaaggcaaacgtatcagaaagaaattcgctactaagggcgaggctctggcgtttgagcagtacaccgttcaaaacccgtggcaggcagaaaaggaagacaggcgcacgttaaaagagctggttgattcatggtatagcgctcatggcattaccctgaaagacggcttgaaacgccagttagccatgcaccatgcttttgagtgtatgggcgaaccactcgcacgcgatttcgatgcgcagatgttttcccgctaccgagaaaaacggttaaaaggtgagtatgctcgttcaaacagagtgaaagaggtatcgcctcgcacacttaatcttgagctggcctacttccgggcggtgttcaatgagctaaaccgtctcggagaatggaagggtgaaaacccactgaaaaatatgcgcccattccgcacagaagaaatggaaatggcctggctaactcacgaccagattgcgcaactgctcggtgagtgtaaacggcatgatcaccctgatttagaaaccgtggtaagaatctgtctcgccactggcgcacggtggtctgaggctgagagtctgagaaaaagccaactcgcgaaatacaaaatcacatacaccaacactaaaggcagaaaaaaccgcaccgtcccaatcagcaaagagctctatgagtctctacctgatgataaaaaaggccggttgtttagtgattgttatggcgcgttccggtctgctctggaaagaacaggcatcgaactaccggcaggacaacttacccatgttttgcgccataccttcgccagccactttatgatgaatggtggtaatattttggtcttgcagcgcgtactcggtcataccgacataaaaatgacaatgcgatatgcgcactttgcccccgaccatctcgaagatgcagtaaaactaaatcctttaagctctttgaatcagggactttag

SEQ ID NO: 34162 - DNA, 579 bp, Escherichia coli
atgagaatagattctttaggatggagcaacgtagatgtacttgaccgcatctgcgaggcgtatggattttcacagaaaattcaattagctaaccacttcgatatcgcatccagttcattgtcaaataggtacacccgaggcgctatctcctatgactttgcggctcactgcgcccttgaaacaggtgctaatcttcggtggttacttaccggagaaggggaagcgtttgtaaataacagagaatctagcgacgctaaaaggattgatggattcacattaagtgaagaaatcctcaaatccgataagcaactgagcattgatgcccaatttttcacaaaaccactcacagatgggatggctatccgttccgaggggaaaatttattttgtggacaagcaagcgtcattgtctgacggcctatggctagtcgacattgagggagcaataagcattcgagagttaacaaaactaccgggcagaaaactacatgttgcaggcgggaaggttcctttcgaatgcggcattgatgatattaaagcgttggggcgtgtggtgggtgtatacagcgaggttaactga

SEQ ID NO: 34163 - DNA, 264 bp, Escherichia coli
atggcttctgaaatcgcaatcatcaaagtgcctgcacctatcgttactctgcagcaattcgcagagcttgagggtgtatctgaacgtaccgcttaccgctggacaaccggcgacaacccttgtgtaccaatcgaaccccgcaccatccgtaaaggctgcaagaaagcaggtggcccgattcgcatttattacgcacgctggaaagaagagcagttgcgtaaagcgttgggtcattcccgttttcaactcgtcatcggcgcttaa

SEQ ID NO: 34164 - DNA, 1320 bp, Escherichia coli
atgagcatggcaacgcaggtcattgcagtctctgatatttcggcaaaagtcagggaaatagaaactgcttatcgcaattatctggatgtttttcgtataccagaagaccacagaattgtagtgaattattcagcaggtaaagacagtactgcaacactggccgtagcgaatgcgctgtttggtcgtcgcgtacaggccgtgatggctgatactgataatgagcatgaattaacgatcgatttcgccaggactatccatgaacagattggatgtcacccggttcaggttgtgaagcgtaactacagcgaggcagattttgcccgccgacgcgcctatatgaaaaagaactggtcgaagaaacaggcaatccggatgggggcttaccggggcgtcatcatgccatcactggcccgtgcagataccgcatttggccgagcttggcagaagacggctaagcgctggggtatcgactttgaaaccgcattagatgcggccctgtcagtgatgtatccaagtggaaatagttttctcgatgcggctctgctccacggcaaattcccgatgctacgcgaccgtttttgtaccgatgagctcaaaatacagattgcctacgatgcggccattcgccctatgctggatgagggcgatgttgtggttcagtggtcaggtgttcgcggtgatgagtcatccaaacgtgctggttatgaccgcttcgcagctgatatgcgcgatgaggggtttctctataacttcctgcccattcatcaatggacggcggcggatgtttttgccctgcatcattatctgggtatcaagccaaatccactttatttgcagggtgcttctcgcgtaggttgcatgaactgtgtgctttgcaataaagaggaaatttcagagacggcggcacgctggccggagcatatcgaaaaacatcacgcgtgggagaagaaagtacgtctggcatctcgctgggttcactggatgagtatcggcacagaaagccagtcatggatgcgtatgcatcttgggagtcgtgatgttatccattgttatgaggatgagttcactggtgaggagattgtacagcgcagaagatacccgataaatctaggtcaggaagtaaaattatatgggttggagcctgacatccagaatattgaatggtcaggattctatgggcctcgtggaaacatgggggctccatcagcgcttgatgttgtggagtgggcaaaaactggtcgcggcggaaaggtctatgacctcgttaaagccagtcttgatacagtcacttgctcctcgcgctacggcctgtgcgaatga

SEQ ID NO: 34165 - DNA, 441 bp, Escherichia coli
gtggatagagagttgagagagcacgtcatgatagagcgtgtcgaaatgattgcgcgtctgacgactgaggggacttgtcaggagcgagaccgagaaattgccttaaatttgattgcggaaattgcaagaggcaacttaatgaaaaataataatttttctgttgttttttccgctccgcctgttggtgaaatctttgcaaaggagggcaaagtgaaagtaaatatcacgttggataaagaccaaaaaatcggccagccggtaattgatgcttttcagtgcgaattgaccaggcgaatacagtccgttttcccgtcaacgcgcgttacggttaaaaagggatccatgaccggggtcgagttgatggggttcgataaagattcagaccgcgaagcgctggatagtatccttcaggaagtgtgggaagatgagagctggcggtag

SEQ ID NO: 34166 - DNA, 732 bp, Escherichia coli
atggataccgtaatagcatttttatctctggctctttttattgcttttatcatcggtcttatcaagccatcgctggttaggatgccaaatcgaaagcgctcaagtgcggtttatctcggtggctgtctggcgctgggcgttattggctcaattttatggccgactgaaaagggtcagcctgtagagaaaaatgatgtaccgacggttaaagcggaaccggttacgccaacgtttgagtacgcagataaaaccatcaaagaatatcgcaacgagccaaaaaacactcgacatgaaatcgttaaagactatgttggcttcaaaggtgtaacgaccagctctgctgatgccttttatgcctgtatgagtgagtacacttttactaaggatgatgcgttaaaactcagtgatgtgttggggtggtgtttcaacgacttcgagaaggatccacaatctctaaataataaaatcaaccttgacgtattccaggggaattttagcggttgggatggctcttatcgtccgttagagaagctgataaaagccagcatgaatgatgattcctcttataaacatgtttcaacggtctaccatcttattttgaataaagatccgcatgccgttgtcaaaaccacgtttcgcggcactaatgcttatggtggcgtggtcaaacagaccgtagcggcgcgtgttgacatacgtacggggaaaatagtctcaatgctgaataattaa

SEQ ID NO: 34167 - DNA, 732 bp, Escherichia coli
atgggaaggaaaagtagattgaagaaagagaggaagtttttaaaatgcacgggaaggggagagttaaaattttctgaaggtgtattaaacatgactcataaaggtaaagggccggtttataaattctttaaagaggaggctcatgcggaggcattatgtaagggatatgtatggttaagcacgcttgaaacatgcagggcttatgaaaataagcaacggggcgatcctggtgaggctattcatacatgttattatgattatttgactggaggtagttcagatgctgattttgtgagtgctgcatccagaatgggaataaagattgacgatgggtgtcataatttaaccttcgaaaatccgagtcgtgaagtcatactgccagatgcatttgttttatgcacaaccaatgaatttattcctgctgaattgagcgaggattttggggattactgtgtagaaatatctaatccaaatgaatttttcaaaagagtgtcgttggcactacatgatgatatcggaacgcaacgcggtgcaatgggtccagtacaatacatgagtcgtgattaccatggggcagatgagactccgagaccaattggtttcattaaaccagaaagctattcagcacagaaggaatttagatttctctggataccgcaggatgaaaacaacatcaagccaaggggccttcgctgtccagaaatcaccgagttatgcaagcgaatcacatag

SEQ ID NO: 34168 - DNA, 204 bp, Escherichia coli
atgaatgtctacgcgatgcagggcgacaccctcgacgcgctttgcgcccggtattacgggcgcactgagagcgtggtcgagacggtgctgcaggctaatcccggtctgtctgagctgggcgtcattctgccgcatggcacagcgattgacttgcccgatgttgaaacatcacccacggcggagaccctgaacctatgggactga

SEQ ID NO: 34169 - DNA, 222 bp, Escherichia coli
atgggactgagtatggaaaaaattaccacgtttatcgcctactggctggccgtggggctggcgtatttcggggcaatgtcgcccgaaaaactggcgctgtatgtgggtagtctgtgcgccatttttacggcggcggtgaatttctggtaccggcgcaaaacctttcgttacctgaccgaaatgggaatcgacaaaggggtgacccgtgagctcaatcgttaa

SEQ ID NO: 34170 - DNA, 510 bp, Escherichia coli
gtgagctcaatcgttaaacgttgcagtgtggccgcagtgctggcgctggcggcactgatgcctgattttcgtctgctgaatacctcgcctgatggtctggagctgattgccgacctcgaagggtgtcgcctgacaccttaccagtgcagcgcgggcgtgtggacatcaggcatcggccacactgccggggtggtaccgaaacgcgatatcaccgagcgcgaagcggcggcaaatctggtcgccgacgtgctgaacaccgagcgccgtctcgcggtctgcgtgccggtcaccatgccgcagccggtttatgacgctctggtcagtttctcttttaacgtcggcaccggcgcggcctgtcgctcgacgctggtctcatatctcaagcgccagcagtggtggcgggcatgcgaccagcttacccgctgggtgtacgtcaacggggcgcgcagtaccggcctcgaaaatcgccgtcagcgtgagcgcgcttactgcctgcagggggtgaaatga

SEQ ID NO: 34171 - DNA, 456 bp, Escherichia coli
atgtctttgttcgagcagtggggtattgaaatgaatttcttatggtctgccagtaataattcgttttttccagagccgatggtaaaggactacgagtctgtggggtgggatttaagtgatgctattcctgctgatgcagaaatttatgcagagtttacaaaatattatccggacaaggtgcgtattgcgggaagtgacgggatgccagcctgggaatatttacctccaccaactcgcgccgagcagatggccagtgccgaagcggtgaggcagaatagtattgagtccgcgaatggatatatgaacggcaagcaatggcctggtaaggctgcattagggcgattgaaaggcgaagagttaaatcaatataacttgtggcttgattatcttgatgcactaaatgcggtcgacatttccactgcaccagatatcgagtggccggttagccctgagtga

SEQ ID NO: 34172 - DNA, 2442 bp, Escherichia coli
atgagtaataacctgaggcttgaggtattgctgaaagcggtcgaccaggcgacccgaccgcttaaatccatccagaccgcgagtaaagccctgtcgggtgatattcgtgacacacaaaaggggctgcgtgacctgaacggtcaggcggctaaaattgatggctttcgtaaaacaagtgcgcaattggcagtgaccggtcaggcacttgaaaaggcaaagcaggaagcggcagagctggccgcacagttcaaaaacacagagcgcccaacagcggcgcaggcacgagtgctggaatcagcaaagcgttcggcggaagggttgcagttaaaatacaacagcctcacgcagtcggtaaaacgtcagcaaacagaattaggtaaggccggaataaatacccgcaatctggcaaatgatgaaagccgattaaaagggaaaatcaacgagacaaccttacaactcaaccgccagcgcgaagcactggcgaaggtcagcgcacagcaggcacacctaaatcgggtgaaagagcgatataaatcaggcaaggagcttgccggtaacatggccgctgcaggtgctgccggggtcggtatcgcgacagcgggaacgatggccggggttaaattactgatgcccggttatgactttgcgcagaaaaattccgagctgcaggccgtgctcggggtcgaaaagcagtcgccagaaatgcaggctctacgcaaacaggcgcgccagctcggcgacaataccgccgcctctgccgatgatgcagccagtgcgcagattattatcgcaaaaggtggtggtgacgctgctgctattgaggcaacaacgccagttacgctgaatatggcgcttgctaaccgccgcacaatggaagaaaacgccgcgttactgatggggatgcgctctgcgtttcagctttccaatgacaaggtttcgcatattggcgatgtgctgtcgacggtgatgaacaaaaccgccgccgactttgacggcctcagcgatgcgatgacctatgccgcgccggtggcaaaaaatgccggtgtcagcattgaagaaactgccgcgatggtgggcgctctgcatgatgcaaaaattactggttcgatggccggtaccgggagccgtgcagtattaagtcgcctgcaggctccgaccggtaaagcatgggatgctctcaaagagctgggcgtcaaaacctcagacagcaaggggaatacgcgcccgatatttaccatcctgaaagaaatgcaggccagctttaagcgcaacaagctcggcaccggtcagcaagctgaatacatgaaaacgatattcggcgaggaagccagctcatcagctaatgtgctgatggctgcagcggcaagcggtaagctcgacaagctaaccgccgcgctgaaagcgtcagacggcaaaaccgaggaactggttaaggttatgcaggataacctcggcggcgactttaaagagttccagtctgcttatgaggcggtcggtaccgacctttttgaccagcaagagggctcactgcgtaagctcacccaaaccgccacacagtacgtgttaaagctcgacggctggacccaaaaaaacaaaggtctggcgacaactatcggcattattgccggtggtgcactcgctctgattggtatcatcggcggcattggtctcgttgcgtggccggttgtgatggggattaactccattatcgccgctgctggcgtgctgggtacggtttttactgtcgccggtagtgccattgtgaccgcgcttggtgcgattacctggccgattgtggccgtcggtgcggcgattgtggccggggcgctactcatccgcaaatattgggagcccatcagcgcatttttctcaggggtgattgagggcatcatgagtgcctttgcaccggtcggggaaatgttcgctccattagcaccaatctttgacggactcggcgagaagctgcgcggcgtctggcaatggtttaaagacctgattgcaccagtcaaggccacgcaggagacgctcgatagctgtaaaaatgtcggcgtcatatttggtcaggcactggcctctgccttgatggctccactcaatgtttttaacaagctgcgcagcggtgtcgactggcttctcgaaaaactcggcatcatcaacaaagaatcggacagcctcgaccagactgccgccaaaaccaacgccgccacgcagggcaattcctatatccctgcaaccagcacatatggcggctatcaggcttaccagccagttaacgtaccggcgggacgctcttacattgaccagagtaaaagcgaatacaacatcactctaccgggaggtgttgcaccggggcatcagcttgacagacagctacgcgacacgctcgaacagattgagcgtgaaaagcgtgcgcgtcagcgtgccagtatgggtcatgactga

SEQ ID NO: 34173 - DNA, 960 bp, Escherichia coli
atggactatgaccggattctggcaggctcccgcagccatcagaccggtgtaaacggtgaaaataacagcgcccgtctcagcattcagggcggccatctcggtcacgataacaacggcggtattgcccgtggggccacgccggaaagcagcggcagctatggcttcgtccgtctggagggtgacctgctgagaacagaggttgccggtatgtcactgacgacaggagtgtatggtgctgcaggccattcttccgttgatgttaaggatgatgacggctcccgcgccggcacggtccgggatgatgccggcagcctgggcggatatatgaacctgacacacacctcctccggcctgtgggctgacatagtggcacagggaacccgccacagtatgaaagcgtcatcgggcaataacgacttccgcgcacggggccggggctggctgggctcactggaaaccggtctgcccttcagtatcactgacaacctgatgctggagccacggctgcagtacacctggcaggggctttcgctggatgacggtaaggacaacgccggttatgtgaagttcgggcatggcagtgcacaacatgtgcgtgccggtttccgtctgggcagccacaacgatatgacctttggtgaaggcacctcatcccgtgcccccctgcgtgacagtgcaaaacacagtgtgcgtgaactgccggtgaactggtgggtacagccttccgttatccgcaccttcagctcccggggtgatatgcgtgtggggacctccaccgcaggcagcgggatgacgttctcaccctcacagaatggcacttcactggttctgcaggcaggactggaagcccgtgtccgggaaaatatcaccctgggcgttcaggccggttatgcccacagcatcaacggcagcagcgctgaaagttataacagtcaggccacgctgaatgtgaccttctga

SEQ ID NO: 34174 - DNA, 183 bp, Escherichia coli
atgttgcgcctcaccggcgcaggtattgccgaagaacggatgatcgccccgcaactgccaaagtgcattcttcatgaacttaccgagcgcccgcacccgttcccgctcggcatcgacctgatcctgacctgcggcgagcgcctgctggctattccgcgaaccactcatgtggaggtgtgctga

SEQ ID NO: 34175 - DNA, 285 bp, Escherichia coli
atgaaacgcaaaattattgtcgcttgcggaggcgcggtagcgacctctacgatggcggcggaagaaattaaagagttgtgtcagagtcataatattcctgttgaattaatccagtgtcgggttaatgaaatagaaacctatatggatggcgtgcatttgatatgtactaccgccaaagttgaacgcagttttggcgatattccgttagttcacggcatgccttttgtttctggtgtcggtatcgaagcattacaaaataaaattctgactatcttacaggggtga

SEQ ID NO: 34176 - DNA, 552 bp, Escherichia coli
atgaaactcaaaccaatgggtacacctggtgtggctccggcacatgtaaaaccatggacacagcaggaggatgaacttttagccacgttataccactcccacacagcgccggagctgacaaaacaccttcagagaaccgagtcagcaatacgaagtcgcatccgtcttttgctctctcagggggttattcacgccaaacgcccccacctgagcacaaaagaactcagcatgctcatcaggaatcgccacacaaaaactatccgggaactcgcgaatgagctggggcgctcgccatccacggtggaactgaacctgagaaaaagagggtatcggttcaggaaatacggggaactccaccacagaaccagatacagcgatcacctggtggagttggtaactgaactgcgtgatgagaaggggatgacattcagcgaaatcaggaagcacatccgggacacagccgggatatcccttaaaagatgggttcccgcccggctttacgcacgatataccgccgctgacaccgtgctttgcgaactgctaccggactga

SEQ ID NO: 34177 - DNA, 1020 bp, Escherichia coli
gtgactgaaaggcacaatccgcaacactggagtcagttatctcccgaagaccagatccgtttctgggaagagtacgaagctggcaggagggcgtctttcctgattgagccggaaagaaagcctactctgcgtcgtcgtggcgaacattccaccaaacctaaatgcgaaaatccgtcctggtttcgtcctgcacgctataaggctctgggcggtcaactgggatatgcctataatcgtctggtgaaaaaagatccggttaccgggcaatacagcctgcgtatgcgcatgtccctgcatccgttctatgtacagaagcgcgaatttgccggtcgtaaatatgctttccgaccagaaagacggcgtctgctcgataccatctggccagtgctggtcagtttcagcgatgccggtacgcataccgtggggatgtgtgtgtcccgtctggccagagaaattagccccaaagacagcaaaggaaacgtcattcctgaactcgaggtaacggtatcccgtctttcacgcctgctggccgaacaagtccggtttggtgtgctgggtgtgtcagaggaaagcatgtgggatcgtgaaactcgccagcgcctgccgcgctatgtctggatcacacccgccggctggcagatgctgggcgtcgacatggtgaaactccatgaacagcagctgaagcggttgcgtgaaagtgaaatccgccagcagcttatccgggaaggtgtgctgaacgaagatgaagatatctccgtacatgccgccagaaaacgctggtatctgcagcgtactcaggacgcactgaaacaccggcgtgagaaagcggccgcgcgtaagcgtgctaaccgcctgaagacgttgccagccgacagccagatttatgagatgtcacggcacatcctgaaacgcatgccggcagatgaagcgtactggtgcacaccagagcagcttcaacagttagccatcagggagttgtaccagcttgaactgacgctggcagctgcgcctcctcactag

SEQ ID NO: 34178 - DNA, 249 bp, Escherichia coli
atgtcgcagatcgaaaatgcagtaacttcctcatcgaaagtaaagcgtcagtatcgaaaaggtaatccgctttctgcgtcagaacgtcaacagcaggctctagcccgtaaaaaagcaactcacaaagagattcgggtttttgtaaaagatgttttcaaaagccagcttcagcttctttgtgagaaagaaggtattacccaggctgagatgattgaaaagctgatagcgatggcgtctgcgaaaaagtag

SEQ ID NO: 34179 - DNA, 564 bp, Escherichia coli
atgcaaataattcataaaaaacatatgacccgatggcttctgcctggcttgttcgctctggttctgtgtgcgccagcaccgaatacttacgcagccaccattgaggcaggattttcaccagaaggggcggccctgcaactggttcttaagacaattgataccgcacagcaggaaattcgtctgatgggttattccttcacctctccggatgtggccagcgctcttgtcagagcaaaacgccggggagtggatgtaaaagtggtgctggactggaaagccaataccggaaagagtaacaacgccagcaaagcggcgatgaacctgctgactggtgccggcatcccggtacgtaccatcagtgcttacaaaatcctgcacgataaagtgatcgtcgctgaccgccgcaacacccaggtcggctcattcaactacacccgtgctgcagaccgttcgaattcggagaatgtgcttgtggtatgggatgacacggtcgttgcgcagaaatacctgagccactgggcatcacgctgggcacagggaacggactggaaacagacatactaa

SEQ ID NO: 34180 - DNA, 558 bp, Escherichia coli
atgaggaaatcagtgttagagcaggatgttagctctttgattgagaaaataaaagaaagtgattatgaaataccaaaaaactctgatgtaatgaaaattatattaaaaagaatgcaagtggtaataattattcagttggtaatgattttatgtcacttcatcatctacagatacgatcatgaggcattaattggtataagcattttgtctgcaggtggaattttgtttttctcagccgtgtttgtcccttctttatatcaacctgtcagcataatgttgtcgattaatgaggtggataaaggtgattccctaattgtaaaattgttaatgagaaagcttaaacagtactggaaatttcttgtggttataaacctgattataggtgtaggtttactactctctggtgaaggggttatttcggggcttggtttttcatggtttgttacatatctcatctgcatgatgtcgtttcaaatgtcgttatccagatatatgaccccagcagtggtcagtagtttatcgaaaattaaagagcttatttcggcatccccgaaataa

SEQ ID NO: 34181 - DNA, 240 bp, Escherichia coli
atgctcgtgagtaaaaaaaagtatgactttctgctcgcccgctacgaacaggccgcctcccgtgctgacctgctggagcgtctggcgtttgtggacagatggataagcggtctgcttccggtactgagacggcagatgtcagtacgggaacgacgcatgtgggaggagatgctggacattcgttctgcggatcgcgcctacggtatggcacaccgcccgtcacaggaggaaacgcgatga

SEQ ID NO: 34182 - DNA, 168 bp, Escherichia coli
atgactaaaaacatacccctcaaacctcgccctgctggtaagtttattcgggtatatgtggatgggatcgtttatgaagagttgagaaaaatagccaagaaggattccagaaatatacccaagactgctgcgcttaaaattgaagaggctttgggaatgaaggagtaa

SEQ ID NO: 34183 - DNA, 282 bp, Escherichia coli
atggctatcatcgatcctatccgtatggaaattttacgcaaggtttttcctgaaattaatgatatcaagatcgaggttttcacactttttgcttttggtatgactatcagggagatttctgtttacaggaatacaactcatcaggcggtgtataaaacgctaaaagagttatgtgatcaatacaattccccctcaaatgaggcacttaaaactttgtacattacaaggctggccttacattcctttcttgaactaagaattgaactcacccctgaacagtaa

SEQ ID NO: 34184 - DNA, 387 bp, Escherichia coli
atgccacgtatacaaacttttgtcagcaatcaggttcgtgaagaaattgagaatctggtaactgaaaggaggcaggagggggctacggaaaatgatgctacggtatcatctgttacttcaatgcttatagagcttggcctcagagtatacagaattcagagagaaaaaaaggaaagtggatttaatcagatggagtacaacaaactcatgctggataatatatcaagagtgagatttatgtgtagtgaaattatgaacatgagcatgctcaatcaggagtctgttgccagcggttatttcacgattgaaaagattaagcccgctatggaaaaattcgttaatgagcaggtgggtattttttttcatgacgatgaggagacaggctga

SEQ ID NO: 34185 - DNA, 471 bp, Escherichia coli
atggaatttttaaaaatgaagaacgttcttcttgttggattactcacgctttcctgtccagtcattgctcaggactgttttgaaatggctggaagagattacaaaatagagccggatctattacgcgcaatttcgttcagggagtcatcatggcgcgataatgctctaaacattgtctcacagaatgaatacgcggtcggtaagatgcaaatacactcacaaaacttttcgcatctggcacagttcggcattactccccgtcagctttatactgacagttgccttaacatttacacaggtgcttattaccttgctattgcttttaagcgttggggatactcatggagggctgtaggagcttataatgcgggatttcgcgaaacggaagtacaggagaaaaaacgacagaagtatgcaaaagaaattcaggcgatttatatagacatcaagaaaaatacgctaccaaaatga

SEQ ID NO: 34186 - DNA, 279 bp, Escherichia coli
atgaaatataaaacacttagtcaggtacatactgaagcgatgcatgatcctgaatatcgtgcagcgtatgaggctgaagaagcctcagagcagcttcgggagacattagcttcctggcgaaaggaagcagggttgacgtctgcgcaggttgcagagcgcatgggtattaaagcgcctaccatttcacgcatggaaaagaacgcatcacgtatgagtattgatacactggtacgctatgccagagcctgtggtgtaaacttcaaaattcagcaagtttga

SEQ ID NO: 34187 - DNA, 321 bp, Escherichia coli
atgtttaccgtaatttttcatgatgaagctgaaaaagaattcgttgctctgcctgttaacgttcgtgccaagatgtcgcgcatactcgcgaagctggaggccaacccacgtcagcttcgtgagcctgataccaaacccctgggtaacgggttgtttgaaatccggacaatgggcaccgatatcgcacgaggattgtgggtatatcagagcggtgagcgcatttttttgttgagaattttcattaaaaaatcgcctaaaactccaccggcagagatagagctggcatttcgtagacttgaggagatgcataatgaaatataa

SEQ ID NO: 34188 - DNA, 240 bp, Escherichia coli
atgaaatggcgttactcgctgcgctggacattgccccggacaccgtgtcccggaccgcaggaactggtgtctgaagtggtggaggcagggcagcccgctcctgaatcggtgatggcccgctgggtggcgcgagcagggtatgcgggacttcatgaggggattatccgacgcggcttaaacattcaggagggcaggggaaattcttgtcctccgacaggatgtataacacataaatgttag

SEQ ID NO: 34189 - DNA, 729 bp, Escherichia coli
atgatccccgctcatctttcgctggttccgttcaaccccgagcgacgcgccgtgatggaggccattgcagaggttgaatgcaggcagtcacgcggcgcggtgtttacgtcgtacccgtatgccagtgcgtttttccgtattctgaacggcagcaaacgcgtcaccgcaaaagacatcgcctggttctctccggggctgaccgcagaggctttgcggggaaaaaaacaggagtggctggcggcaatcgacaggctgattgagagccgtggcacatgttgctggttgcccctgtcgctgtctgatggctggcgactgttcccggaaacgaagtttcagctctcagaacgacgccgccggcaaagtgaactgaatgatgaaaaatactcccgccagcgtcgcagggaggcctgtcagcgcgaaatggcgtatcaggcactggcggggcaggcggaaattgagctggcttttcatacacccgaaacggtcagcagctggagatcacgctggtcggccacggaactgcgccagtacgaccttgaggatatgttctggcgctggagcgagcgtttcccgtcactggagccaatggagcgctggatgatggcaaaccagcatttctggagtgtgatggtcgaatctgatgccctcgcaaaagaaagcccggaatctgtccggcaactggagcgctggatggtacccaacaagctgacgcaccggagccgggtatga

SEQ ID NO: 34190 - DNA, 432 bp, Escherichia coli
atgcgaaacgtgattactcccgacgttctgaacaccatgatcccgcaggaattcgaagactggcgtgaggcgggtgaagacttgcgacgcgaactgacccatgccgtcatgcgtgagctgagttgtccagaaaactgggacatgaacggagaataccggagtgagttcggcggtttttttccggtacaggtccgcttcacgccatctcacggcaacttccatatcgctgtatgcagtcccggcgatatcacccagtcctggatggtggtgtttattcctgccagcggtcgcccgttctccgtcattcgcaccctcaaaagctatcaaccggaactgatcagccataccttaagtctgacggcgcgtctcgatgcagacggttacagccaggccagcatcatcagcattatgataacggagggtgcagtatga

SEQ ID NO: 34191 - DNA, 1998 bp, Escherichia coli
atgtcagtaaccgagtctaaagcaaaagccccccaaaaaaccagtcccagaaaaatcacgaaggcgcaggagcaaaccctgaaggctgcacttgaggccgctgtcattgagtatgttccgctgtccgggctcgttaaatcgccgctgaacgtgcgcaccatcccttattcggaggacagcgtccgtggtctggctgattccattgagtcgctcggactgcttcagaacctgatcgttcacacccttgcagacgggaaatctggtgtagctgcaggtggccgccgactgaccgctctgcaactgctcgcgcaggagagccgccttgcaggtgaccacagcgtgatggtgaagcgcgtctctgacgacatcgcggcactggcctcggttgccgagaacgagcagcgcgccgccatgcaccccgccgagcagattgcaggtttccgcacgctggcagagcagggcaaaacacccgcgcagattggcgacgcgcttgggttcagttcccgacacgtccggcgcatgctgaagctggcaaatcttgccccgtccctgatggaaaagctcgcgcaggacgacctgactgttgagcagtgtcaggcgctgtgtcttgaagatgatcatgcccgtcaggtcggggtgtacgagagcgtgaaggccagctggtcggacgcgcccgcccaccttattaaacgtgccattaccgaaaccgaaatgcgcaccgacagtccgaaattccgctttatcgggcgagagttgtatgagtctgcaggtggcgaggtacgtgaggatttattcagcgccctggagggggacggtacggcggacagcgtgctggttgagcgtctggtgcaggagaaactggagtccgccgcgctggcaatcgaactgcaggaagggtggtcatggtcgctggcacgggagggggcagtcagaaactacggtgacgaccgcgaacattatctgctgttaccagagccggagacacagtacaccactgacgagcagcagcgtctcgatgaactgtacgccacccaggaggcctctgaaacatatgacgacgaagccgcaattcagctgctgatagacgagattgaacatgcggcatcaatccgggcgtggacacaggagcagaaagcggcctgtggcgtggtggtcagcctgtatgacggtgagctttacgtccagcgtggggtgcagaagaagcctcagaacgaggagaccggagagcagggggagaatagcagtaacgtccccctccatgtggtcagtcgtcagtcggatgtggcggaagggatcagcgcaccattactcaaaaagatgtcttcagaaagaacgctggcagtgcaggccgccctggtacagcagcctgaaaaagcggtggctctgatggtctggcggctgtgcagttgtgttttcgattactgcaacactacccctcacccgtttgtgatgcgtcttgaggtacatcacagcggactgaccagcgaagccccgagtggaaagagtggccatgcatggctgagtctgatgcaggagaaagcccgtctggaagcgctgttgccagagggctggaagaaggattacaccactttctttacgctcgacggacagaccctgatgagcctgatggcgttctgcacggcctgttcggtggacggtgtccaggctcgcgacaacggacacacctcgcgtagcccactcgatacggttgaggcagcaatcggattccacctgcgcgactggtggcagccaacggcgaaaaacttcctcgggctgctcagtaagaaacagattgtggaagcgctgaaagaggccggactgtcaggtgctgcgtcagatgccgggaacatgaagaaaggggatgctgccagccatgctgaacagtggctatcaggtacgcgctgggttcctggatggatgcggtcaccagatgtgctacctgacgtcgctgatggtgatgagacaaattctgatgaacatacggcacacgccgcctga

SEQ ID NO: 34192 - DNA, 237 bp, Escherichia coli
gtggcaaagacagtatcccccctgaagtccctgtccgatggttcatttacccgtgaacaggcggaagcagtggcggcacagtatcagaatgtgacgattgaagacgatcaggggacgcattttcgtctggtcgtgcgtcagaacggtgaaatggtctggcgtacctggaattttgagccggacggcgcgtactggctcaaccgttatatcgcggactacggtatccgcaagcagtaa

SEQ ID NO: 34193 - DNA, 255 bp, Escherichia coli
atgtccggatttaatctcgcggcaacatcgaaagaagaccaggataaggtggccattgacctcgttgcttcaggtgtggcgtataaagaaaggctggctatgccggttgtcgctgaactggtagccagagaacagcctgaacatttgagagagtatttctgggggcggctggagcattatcgtcaggtcagtgcgcagctcccggacaaaaatgccacggaatatgcaaaaaaagaggatgaggttaaaagatag

SEQ ID NO: 34194 - DNA, 192 bp, Escherichia coli
atgaaacttgccccggaaacccgcgaaatcctgcgacaatacaaggcggtgattaatgcccgccgccgtgagaatggccagtcggccctcagaacggaacaggtgatcgacgaaatctgttattacatgagctgccagaacgcagttttcctttgcggccagtttatccggcaggacggatacgaccagtaa

SEQ ID NO: 34195 - DNA, 507 bp, Escherichia coli
atgagcactacgaccaccacaccggctgtctacgtgggcacatatcacaaatacaactgcggcagtatctacggcaaatggtttgacctgacggaatttgacggcagagaagatttttacgaggcctgtcaggcgctgcatgccgatgaatgggatgccgagtttatgttccaggactgggaaggtatcccgtcacagttcatctctgaatgcgccatcgactgggattttgtcgccgcctacaaacaggctgaagaagagggcagggaggctgctttcatctcctgggcggagtataccggcgagtgtgactatgacgcgtttgacgatgcgtaccgtggcgaggcggaaagcgaggaagattatgcgcgggagctggctgaggattgcggcctgttaaatgaggtgccggagccgctgcgcagctatttcgattttgaagcttatgcgcgggacctgttcagcagcggctatgtgttccatgacggctatgtcttcagcaactga

SEQ ID NO: 34196 - DNA, 426 bp, Escherichia coli
atgcactatgcgaaatctgtcaccctgaacgttgaagaatccgatcgcctgtcctttctaccgtatctcttcggaaatgatttcatgattgccgagatgcaggtctacgcgctggcacgaaaaatgatgcccgaatacgacgggggattctggcatttcatccgcctgcctgacggtggtggttacatcatgccggacggcgaccgttttcatatgattaacagtgaaaactggtttgatcgcaccgtcagtgccgatgctgccggaatcatcctgacctctctggccattaatcgccgctgctgggttcatcatgactgcggggatgctgccctgactcgcctgtttatgctgcgtgatacccagctctggaatcacatcgcctttcaccccgaatgcaacgctatttacgccgcgcttgactga

SEQ ID NO: 34197 - DNA, 783 bp, Escherichia coli
atgcaggaaaaaaccacgttaaacgcccttgtgatgcgccgtgcgcgcgatctgatcgctgattacggatggcccgaccataccgatgttgaccagcgcgatccgataaacaagccgggatggataagcatttatgtccgtctggatgcgacaaatattgtaaatctgctgcctttactttgtaccggagaagtacccgcagagctgcaaagtgccatgacaaaattaaccggaacgccagcgcagattattttatccggcagccgctatgccgacgtgccgcagcttccggaagacggaacacagatgacttttcccagggtcggggaatggctgacagagccggaaattcgggcggtaacggattgtctgtcacgcgccgtccgggatatttcccggcaggtatgggaggattcgcgccggatacaggctgcactgactacgcacggggcaaccctgttttgccgccagacccgaaatttccgtctggttgtgaaggaaaacgatatgccctgctggctggacgacgatgacgacaatttaccgtttgtcctcgatgccatcctgaacaaaggggcgcgctacagtgccgttgagttctttgtcatcagcgacaaagtggatcagatcctcgcgtgtgggcagatgtgcgatgtgctacgtatcccgggagagccaccgcgtcgatggatggatatgaccctgttgcgtgaggtgatggccgaagcccgcacagagattaaacatgttcgcgacgccctggcatcaatccggccagtgtag

SEQ ID NO: 34198 - DNA, 420 bp, Escherichia coli
atgtacggaacctgtgaagccctctgccggctgctgagtgagcaatatcccgcagaaacccacctgaatatcattgtctggtctcctgcggatattgaagcactggctgacgggatggagcacgctgtttctgaacaggacatcagggcggtactggagtgcatggatgccataccggaagaacagcggattgagtccggggtgtctgccggtgcggtgatggcgttgatagaacaggtgaaagaagcatcccccggtgtgatggtgccggctgacctgcttgaaaccctgctgacgactgcggaacaggcgttatggcacagggaatgggccgcccgggatgataacaagccggtgccggaaagcgtggcccgccgtctttctgatgcagcgaaagtgcgcgcattactgaaaaactga

SEQ ID NO: 34199 - DNA, 222 bp, Escherichia coli
atgaactatgcaggacacgagcagcttcgcgctgaggtggcggcctttgcgaacaatatgtgtgacctgcgggccacgctgaatgagctggagcaccgctaccgctttgattcagacgttctggctgaacgtctgatgcggcagacactctttcgtattaactcgttgtttatggcggcgtacaacgaaattcttgagctggatgcgtgttttaaggactga

SEQ ID NO: 34200 - DNA, 123 bp, Escherichia coli
atgtgtacaaaaggtgagtcactaccgttaagtgtgaagttaaaaaatcggagagtcgctaccgttaagtgcgaagttaaaaaaatcaaaaaagcctcgctcatgcggggctttttgctataa

SEQ ID NO: 34201 - DNA, 597 bp, Escherichia coli
gtgaaattttatgttattgctgattcatacatcaatcatttggtcgcatgtgaccaacatgtttacaaaaataaaggcacacggccatatattggcgttgtccttgaggttaatggtgtggagttcctggctccgttaacgtcctacaaggaaaaacaagataaaattccaaatagctctccacttattttcaaaatgtatgaattaggaaatgaagaaaacaagcttgggatggttcagataaacaacatggttccggtcttaagttccgaggttgaactattagatctatctatcctagacgctaagtatcaaaatcttttaaatatgcagcagcaattcctacgtaaacaccaagaagaactacagaaaaaagcctcgaaattgtacaagttagtatcaaaaggagttgcaacgggcattgttaatatgtgttgtgattttaaggctcttgaggatgcaatgaaaacgtatgttcctcctgttgcacaagaatctgctgtggtgcccactgtgactcaagaatcttcttctgagtcccagtcagactttcaagataaacttagtgccttgtgcggtaagtattcaaagagataa

SEQ ID NO: 34202 - DNA, 774 bp, Escherichia coli
atggaactggatactgaatttcgctacccgaatgttatcgatttctggggtactacactttatcatctttgccattttacctctttagaccttgataaatacgcagcatataataactatgctgaaaataatattgagaatagtaataaaaggctttgtgaagaaatcgaacagctaataaagggaaatgataataaataccatgaggatattatcgatagctaccatcaggagatgcaggagtttggagatatttatccccctatgcatcgaaaggcaatggttatcactttatataacttcttcgaacatcaaattaaaacgttgtgcatcgaaataaacaagctgcttccgaaagatatgagtgaagcatattcttttagtaaagcatgcattaaggactatcgaagatttctgcggcacgaagctagttttgatatgcatctaggtggggaattgtggaaacgctgggaggatatgctgaaagtggagcaaatcaggcatgttctggttcactccgaaggtgagatagataaacacagggcggagcggcttgctgatataaaaaactattgtaataggaaagaaaatatcagactgaacatacacaaaattatcattgatgagggctatgtggcagggcttatcaccgaacttatctcactgtttgagctactggacaggcaggtgaacgccttcatccgtagatacgaaagcgagcatggtagctacgaagttccgcttccgttaggagcatcacgaacaccactgtga

SEQ ID NO: 34203 - DNA, 285 bp, Escherichia coli
gtgaagaaaaataaaagtgaaaaaatacaaattggtttgccgaatatttgtgcggcgcttctggctctgggacatgaaaaactctggatcaaagattctggtccacaaaagcaggtcatcacatgggatggatttgttgctgctcaactaaacttcgcttcccaaagctgggagattttgtcaggagctaatgcaacattcagtaatcctgaagacaaaaaaccagctgatgccactgaactgactgaagaatggatacatcagttaacaactgttcacccatag

SEQ ID NO: 34204 - DNA, 207 bp, Escherichia coli
atgtctacattcataactgctgtatttgctgtcatctataccctaatcgccatcggtcagttcatctgggcaatcgtggtcacttaccgtggtctaacctggtttttgaccaattttgacgaccttccacatatctggaaacgaaacgggcgatactatcgccgtttcatactccgacgcatctggaagcgtatcttcagtcattga

SEQ ID NO: 34205 - DNA, 294 bp, Escherichia coli
atgagcaatcaagcacacctgacgctgatccactcgctggtcaaaaccaatgcttttaacctttacaccctggccagcacagagagctggcagaggccttcggtccgggacattgccgtggtccgggggctgatccccctgaccgacgtagagctggcccaccggctggatgtggacgaacgcaccatccgtaagtggaaatccggccagacacggatggtgtacaccacctggtgctgtctgtgctggctggccgggctggggatgccgttcgatcacattatcaatgactga

SEQ ID NO: 34206 - DNA, 1134 bp, Escherichia coli
atgcacttttatgtggatgaaaccggtcataccggtccgaatctctttgaccgcacccagccggtactttcttatggagtcctgtcttcacccgatgacctggacaaggttgcagaaacagaactggccagtttgcgaaaaaaactgggtgtacaacgtcttcatgccgctgaactgggcatgtaccgccttgatgatgtggtcgatacgctgcttgttctgcagaagaaacaccggatacggtttgatatctggcaggtggttaaacgggatcacgccattatttcattcttcgatcaggtatttgaccaggggctgaatccggttgtgccctggactgcctactggaccccgctgcgctatcccttgctgctgaatctggccattctttttgatgaagagttggctgaaaaagcatggcgtgcccgtcttgaggcacatgatgaacgttcttcctgcttattcagtgaggtctgtggtaagctgcttcagcgcgttcacattctgagtgatgcccgttcagttgaactcattacagatgccctgtcctgggcgatggtcaacttcgatgagctagggtacaactgcaaaaccaacaaggaaaagctgcagatcatgcccaacatgatcggattccagtccgttctgcatgggatctgcgcccgtctggggtcaccgaaccggaaagctaatatcattgttgaccagcagtcgcagttcaataccacccagcgggagctgaacgagttttactaccagatacgcgaacagccgtgggaacttggtccgggtttacccgtcatggacatgaagaacatgccggcaaaaccgctggtcttccagtcgggcacgaaaagcgcggggctggagctggtcgatatttatctctggatcttcaaacgctacatggaacagaaggaactgaccagaccccttactcgccttctctacaccaatcttaataccgccagaactgacagtgtttccctgcagtctgtcgctaaacggtttaaggagttttttgaaacactgcctgaacccactgcagaaatgatgcaaaaagggtgcgaataccgggagcaggaagaagcccgtcgcctgcagcaccggattcctggcctcagtggctcctga

SEQ ID NO: 34207 - DNA, 774 bp, Escherichia coli
atgttgattctcgattgctcctcacgatctcaggcgttgcatacattatctgccgggtttggctgtccccctgaaaagctgaaaaaagtgctgctttcgctcgatcttgaaagtatctacgagcttaatcctcgccagttggttgatgcacctcagtatctgagagagtacgtctgtgcggaactggacgaaccgggaccattcacccgagcgctgtggtttcatggtacccgaactttcgccggtaatacttttcccgcggggttactggcgctaaatcagtcagaatccctcgccatgaaaatactgctcgacctggctccgaatgagatggtccgtaaacacctgcaggaatgggacgttccggggggcgtcccggatgagatgtttcagctcagaaccggcgataaaatccactggggaccttttggccatttagtccgggaattacattttaacgccagtgaaaatggactgcatgattacctcaggctgccggagctggtagaggatgtctgtaacgcctaccaggagaaatacggccacgatcttaaaccgcattatctcagcgtgcttcatccctgtattgtctggttcgaggcggatattgtttatgaaaaaggggttcttgaaacggctctggcatatgcctatacatcagtccgtgacctcccgccggacggaaacgcaactttaggcatagactgtgaagggaaatctgtgtccaggtcggtcattgccagaattgagtttctgcagcccgggcaggtgtaa

SEQ ID NO: 34208 - DNA, 1005 bp, Escherichia coli
atgcatctggaagactacatttcacccgaacgtctgaaagtatatacggacgtgcttaagcttaaacccgaagaggcgctgggtggctataactggaataaggccctttcagcagccatgcagccgctgctacactgcctggaagtaacgctgcgtaatgccattgattatgccattcgccataatccgccgccgggcgcagccgggctatggcggactgacgcttactggatctacgatctgccgcgcttcatcggtgataaaacttacatccgccagggtaagcgtttcaaaacagacaagcggggaaatcccctgacgttcaaggatggcagcccagtatatcacttcaccgcctgggaagaggactgcgttcgcaaggtctcaaagcgcatccgcgcagccggaaagtccccaacgcctgagagggtgatctccggactggacttcggtttctggactcatcttctcacggcagagtacgaggagcccagaaaactctcgttgctgtggcctcacctgacagcagaggtcttcccgtcaagaccggcgcaaatacgtcggcatcatctggaaaacaagttcacccgcatccgtgatctgcgcaaccggctggcgcatcacgaggctgtgtggaaatttcaggagctggacgcaaatggtaaacctgattatagccgccctgtttacggcctgaacgcctcgctgcacctgcttcgccgcgcctgggatgacatgctggaagcgctttactggatcagcccggtgaggcacgctgcctttatgtcagaaggacatcacgtgcggtttgaaacgctggccacacttgagggactgaagtgttatacagaatgtgacaacgttacgcttactctgaacatacgacccagccgcgaggcccgcaagctcatcaggtcattgcaacagggaaaaactgtccgtgttactgatcgcagtcgcctgctggccgtgataggtccggactggaaccgtctgaaaaaatag

SEQ ID NO: 34209 - DNA, 2229 bp, Escherichia coli
gtggttattctggctacaaccggtatcaaatataatgctatctgggagaagctgtttaagctctgttttatccgtggaagcaaatgggaaaaaacaaattttttaaacttcaccagaggtttttatggagaggtttatgatgctctggatgagcgaaatctgggggcgtttgaggaagctgcagatcggcttgtttcgacttttattacgttgaaaagatgttttcagtatgatgatgaaaattatatggataatgtatctgtttcattttttccgcaaagcttcagtcagtctttccataatgatttttaccgtcttgcagaagatgtagtgaaaacactggatactacacccacatatttccggaagataatgcatcttccacagtccttttaccaatataggggagaagacaggaccgaagaactgagacaggctcttcagtcccagagcaatatctggcagatactgctggactggaatgcgggaaacagggaattatcagtgaaccagaagcaacgttatgttgctatgctgcaaaactttataggtgagtgggaaagctggcatatgtggttgcgtctggcatttaagaataatgctgatatgacaggctatgctgaggctcttgaattacatttattccgttctctggaaatgattattacagcagtaacatctgatgatattgatgccactgatctaagtactgatatgttcacattgtggcttaatcagggacagttccataatcattatcacgaagaatatctgtggcacagccattttcttacgccggattttttactgctacatttttccagttgcagtcagtcctgcatgttgagggggaaggcatataacgaaaaagccgcattatccctgacaatgcgtaatgtgataactgatctccgcttgttcctgtcagcttatatggtgaggtatcttggacaacaaaaaaatgtcaatttgctcactgtcatcaaacggttactgtctcctgcactggtctcgccaactggtgcgtataatacacttcctccagctatagtctgtcagactgatgttatagatagcatactacgtctcacttgctgtcatgcaggagaaagcagcaactggctttcacgtctgtctcatatggtggaaaaactcaccagaagcaacaaaggacctgttatttctgggcggatttacatgggcagggttgatgatttaaagacactataccctgcatttgctgatatagcggtaatgctgtctgtatctgaacaaagtgtcagcaaaaaagtgattactgcaatcagcgaagggattttttcattttctgataaaaaaaatattgtccatattttgaaatctctgaaaaaaaacacaacagaagtagctgacaactttttgatgacatctgaggagtacgctacgcgagttgtattttttaatagaacgctggacatgtacatatccacttttgaagaaagtattaagtcagatatcataaaggtagaagaagatatcgatcttttcagaaggattgatatgaacatgtctcaaaatgtcattgatgacattaagaaagatcatcttctttctctgtttgagtttacacctgattctgaaatttcagaacgttgggaaaaacaatggattaatattggtattgataaggaaaatgtggcaaagaaacttggatgtacaattgatccgtcattttttccctcaacaacaatttcagactgcatacttaatgaaatccaccggaaactctatattaaccgtggtcagttgagtgaggatataagcgatctggatgaactttttcataaagtaacaattttcatggaaaaggatgatgattgtaccctcattgtgtatggtaattgtttttccatggagttatacgaacttgaatatcgtactgataaacataatgaacttggcataaaaagggtaagtaaaccagaaaagggataccagccacatgttcttccatatatgattagcaactgtacaatatatttcgttacgaactgtcaggataattactcattactggtgcggaattcatcttttggtcgtttacgtctgttccgttatcctgatgatacgatgttctgcacattctgccgggaaaatgctgatgacccgcttaaaagtattattacccatctctgggagcaggatgcagaagtgacagatcctgtcatagctatgtttaatcacgtctga

SEQ ID NO: 34210 - DNA, 195 bp, Escherichia coli; identical to SEQ ID NO: 30825

SEQ ID NO: 34211 - DNA, 690 bp, Escherichia coli; identical to SEQ ID NO: 30451

SEQ ID NO: 34212 - DNA, 246 bp, Escherichia coli; identical to SEQ ID NO: 13490

SEQ ID NO: 34213 - DNA, 141 bp, Escherichia coli
atgctgaaaggcggaatttcaggtcgcagtgcaaaaggaaaacgtatccacacccgtgccattcacagcatcgacaccgatattaagctcaaccgcgcattgtgggtaatggcagaaacgctgctggagagcctgcgctga

SEQ ID NO: 34214 - DNA, 141 bp, Escherichia coli
atgctgaaaggcgggatttccggtcgcaatgccagaggaaaacgtatccatacccgtaccattcacagcatcgacaccgacattaagctcaaccgggcgttgtgggtgatggcagaaacactgctggagagcatgcgctga

SEQ ID NO: 34215 - DNA, 219 bp, Escherichia coli; identical to SEQ ID NO: 34063

SEQ ID NO: 34216 - DNA, 273 bp, Escherichia coli; identical to SEQ ID NO: 13363

SEQ ID NO: 34217 - DNA, 234 bp, Escherichia coli; identical to SEQ ID NO: 21482

SEQ ID NO: 34218 - DNA, 645 bp, Escherichia coli; identical to SEQ ID NO: 34075

SEQ ID NO: 34219 - DNA, 189 bp, Escherichia coli
atggcatttaaacactatgatgttgtcagggcggcgccgccgtcagatcttgcggaaaagctgacacataaactgaaagagggctggcagccgtttggtagtccggtggccataaccccttataccctgatgcaggcgattgcagcagaaggtgatgtggtggtcagcggtgcaactgagccggagtga

SEQ ID NO: 34220 - DNA, 162 bp, Escherichia coli; identical to SEQ ID NO: 34153

SEQ ID NO: 34221 - DNA, 312 bp, Escherichia coli
atgcttaacccacccaatggcgtgcaacttaagctccggatacatggcgttaacttctggcattttcatcaacgcttcaacgatatgtccgtcgaatgttgccatgtcttcctgcaacaattcctgtgcgctaataaccatatcaacggtgatgttttcacatgtgtcgaacttaaccatgacagcgttctgtacttcaggggccagcttgtcaaaagcgacgttcatcggatcggattcagtctcaaccgggacaaaagaagtagccccctcatcccagcggttttcctgcatatattcagcatcccatga

SEQ ID NO: 34222 - DNA, 528 bp, Escherichia coli
atgactatcaaatcaaatacgccagcacacgacaaggactgctggcaaacgccgctttggctttttgatgcactggatattgagtttggattctggctggattcggcagcgagcgacaaaaatgctctgtgcgctcactggctaactgaggacgacgacgcgctcaattctgagtgggtaagccacggtgcaatctggaataacccaccgtacagcaatatcaggccgtgggtggaaaaagccgctgagcagtgcatgcaacagcgacagacggtagttatgcttgtgccagaggatatgtcagtcggatggttcagcaaggctctggagagtgtcgacgaagttcgcattatcactgatggacggattaattttatcgaaccatcgacagggctggagaagaatggaaacagcaaaggttccatgctgctgatttggcgaccgttcatcagtcctcgacggatgtttactaccgtatccaaagcggcattgatggcgatcgggcagggcgtcaggagggcggcatga

SEQ ID NO: 34223 - DNA, 192 bp, Escherichia coli; identical to SEQ ID NO: 34158

SEQ ID NO: 34224 - DNA, 600 bp, Escherichia coli
atgcgtaaattatgtgcagccattttgtccgcagccatctgtctgtccgtatccggtgcgcctgcatgggcgtctgaacatcagtccacactgagcgcggggtatcttcatgcccgtacgaacgctcccggcagcgataatctgaacgggattaacgtgaaataccgttatgagtttacggacgcgctggggctgattacgtccttcagttatgccaatgctgaggatgagcaaaaaacgcactacagcgatacccgctggcatgaagattcagtgcgtaaccgctggttcagcatgatggcggggccatctgtacgcgtgaatgaatggttcagtgcttatgcgatggcaggtgtggcttacagccgtgtttcgacgttctccggggattatctccgcgtaactgacaacaaggggaaaacgcacgatgtgctgaccggaagtgatgacgatcgccacagcaacacgtctctggcgtggggagctggcgtgcagtttaacccgaccgaatccgtggccattgatattgcttatgaaggctccggcagtggcgactggcgcactgacggtttcatcgtgggtgtcggttataagttctga

SEQ ID NO: 34225 - DNA, 420 bp, Escherichia coli
atgggcgtcgttaagttagctgattacaggcataaccctgtacaacatcaggaggcatccagtatggggtatgtctctatacaccgccagtttatggacagcaggctctataaggactctcaggcagtacatctttggcttcacttaatcctcaaggctaatcacgaatctactgtcgtcaatacggatatcggtccgataactgttgatcgcggtcagatgataactggacgcccgtcgctggtcagagaaacattcatccccgacaacaaagttcggagcttattacggacttttgagtcgaaaggtatgcttaatatttgctcgatggggaagaaatttagcctgtttacaatcgttaaatatgacgattttcaggcaaaaaattgtccaacggttgtccaacgcaaacaccagtaa

SEQ ID NO: 34226 - DNA, 264 bp, Escherichia coli; identical to SEQ ID NO: 16624

SEQ ID NO: 34227 - DNA, 402 bp, Escherichia coli
gtgaaactgaaaatgcaggatttgaggctgtttaatattgtgttcgagagcgatcctggctggatactggatttctctaaccgcaccttgtctgcttttttcgatgaagaattgaacattgatattgatgatgaacgttatcagaaagaggggacgtcaaaagccaaacgagttagatgcttgctgaaacaggttgatcgtgagaccgctctgcgggttcttggtgcgctctggcagtataaaacggaatccatgcctgaacaggctgaacaaagccgtaatgactatcttgcactgatttcccgcttagaaaacgctgacaccgatgaagccaaaggcgttaagcctgtccaggcatggcatggcatggtgttgactggcattcacttatcgctgaaatga

SEQ ID NO: 34228 - DNA, 627 bp, Escherichia coli; identical to SEQ ID NO: 24059

SEQ ID NO: 34229 - DNA, 987 bp, Escherichia coli
atgaacaacagcgcttttactttccagacactacacccggataccatcatggacgctctgtttgagcatgggattcgggtggattccggtcttaccccgcttaacagctatgaaaaccgtgtctatcaatttcaggacgaagatcgtcgacgttttgtcgtcaaattttatcgccctgaacgttggacagccgatcaaatcctcgaagaacatcaatttgcgttgcagctggttaacgatgaagttccggtcgcagcacctgtggcctttaatggtcagactttattgaaccatcagggattttatttcgctgtttttccaagcgtcggtggtcgccagttcgaagctgataatatcgatcagatggaagcggttgggcgttatttagggcgtatgcaccagacggggcgcaaacagctttttatccatcgcccgaccatcggtttgaatgaatatctcattgagccacgcaagctgtttgaggacgctacactaataccttccgggttgaaagcggcattcctgaaagcgacagatgagctgattgccgccgttacagcacactggcgggaagatttcaccgttctgcggctacatggagactgccacgccgggaatattctctggcgcgatggtccaatgtttgttgatctggatgatgcacgtaatggtccagccgttcaggatttgtggatgttgctcaatggtgataaagccgagcagcggatgcaactggaaactattattgaggcttatgaagaatttagcgagttcgacaccgctgaaatcggactgattgaacctttacgcgccatgcgtttggtttattatcttgcctggctaatgcggcgttgggctgatcccgcgttcccgaaaaatttcccgtggttaaccggggaagattactggctacgacagacggcgacttttatagaacaggcaaaagttctacaagaaccccctttgcaattaacacctatgtattaa

SEQ ID NO: 34230 - DNA, 270 bp, Escherichia coli
atgaaatgtaaacgtctgaatgaagttattgaactcctccagccagcctggcaaaaagagccagaccttaacctgctgcaattcttgcagaaactggcgaaagagtcaggttttgacggcgaactggcggatttgacggatgacattctgatctatcacctgaaaatgcgtgattccgcgaaagatgcggtgatcccgggtttgcagaaagattatgaagaagatttcaaaacggcgctattacgcgcacgtggtgtaattaaagagtaa

SEQ ID NO: 34231 - DNA, 585 bp, Escherichia coli
gtgaatctgatgacgacgataacaggcgttgtgctggcgggcggtaaagccagacgaatgggcggcgtagataaaggattgcttgaattaaacggcaaaccattatggcagcatgtcgctgacgcgcttatgacgcagctttctcacgtcgtggttaatgctaatcgtcatcaggaaatctatcaggtaagcggtctgaaagtgattgaagattcactggcggattaccctggtcctctggcaggaatgctttcagtaatgcagcaggaagcgggtgagtggtttttgttttgcccgtgcgatacgccttacattccccatgatttagccgcccggcttaatcatcagcgcaaagatgcgcctgtcgtgtgggtccatgacggtgaacgcgatcacccgactattgctctggtaaaccgcgctattgagcctttattactggaatatctgcaagcaggagaacgccgggtaatggcatttatgcgtctggctggcggtcatgcggttgatttcagcgatcgtaaagaggcatttataaacgtgaatacgccagaggagcttgcccgatggcaggaaaaacgatga

SEQ ID NO: 34232 - DNA, 528 bp, Escherichia coli
atggcaggaaaaacgatgataccgttactcgcctttgctgcatggagtggcaccggaaaaacaacgctgctgaaaaaattgatcccggcattatgcgccagagggatccgtccggggctgattaagcatacgcaccatgatatggatgttgataaaccgggcaaagatagttatgagctgcgcaaggctggcgcggcgcaaaccatcgttgccagccaacagcgatgggccttgatgacggaaacaccagacgaagaagagctggatctacattttctcgcaagtcgaatggatacctcaaagctggatttgattctggtcgaagggtttaagcatgaagagatcgcaaagattgtgctgtttcgcgatggagccggacatcgaccggaagaattagtgatagacaggcatgttattgctgtagccagtgatgtgccgcttaatcttgatgtcgcgttactggatattaatgatgttgaggggctggctgattttgtggtggagtggatgcaaaagcagaacggataa

SEQ ID NO: 34233 - DNA, 570 bp, Escherichia coli
gtgtgtggcatacgtgccccggggaaaggatttttgctcatcaatcgccgggaatatttccagtgccgtagcatcacgcccgtcctgtggagccggcagggcactcaccgcatccagaaccgccttctgcagaacttccggatcgtagtcacgaccgtcgcgcggaacggggatatgactcacggcatccgtcaccatctgctcgagcatcggacgcacatcatccggtgtgatactttttccatctgccggtaccggtattttcgcgaccgcgtcattcaccgccctcagcagcacctccggatcataatcacgaccatcgcgcggagcagggatatgactcactgcgtccttcaccatctgctcgatcatcgggcgtacatcatccgcagtgacacttttaccgtccgccggtaccggtattttcgcgaccgcatcattcaccgcctgctgcagcacctccggatcataatcacgaccatcgcgcggtaccggaatggcccccacggcgtcattcatcatcgcctgcagaacagggcgcacctcatccaccgtcacatgcttctgtaa

SEQ ID NO: 34234 - DNA, 1365 bp, Escherichia coli
atgtggaaccttttgtggcgaacccgaaaaaaccagaaatcaggacgtgatgtaaaagaggtgggctggaccagcctgtttcaggcggtggctgagccttttgccggtgcctggcagcagggtgtgaaagccgatccggaaaccgttttgtcctttcacgcggtgttttcttgcatttcgctgatatcccaggatatcgccaaaatgcggctgcgcctgatgcagaccgatacacaggggatccgccgtgaaaaacggcagggggatattgcccgtctctgtcgtcgtcccaatgcacagcagaatcgtatccagttttttgaactgtggctgaacgccaaactgcgtcacggcaatacggtggtgctgaaaatccgtaactcccgggggcagatcaaagaactgcgtattctggactggagccgggttgaacctctggtggcggatgacggcgaggtgttctatcgcattacaccggaccggaactgcgggatcactgaggcggtgacggtgcctgccagggaagtgatccacgaccggtttaactgtttttttcatccgcttgtggggctgccgccggtgtatgctgccgggctggcggccacgcaggggcatcatattcaggcaaattcaacgtcttttttcagaaatggcggcaggccgtccggggtgattgagatccccggcagtattacggaagaaaatgcgaaaaaactgaagagcaactgggacagcgggtatacaggcgaaaatgcggggaaaacggccattctgagcaacggggcaaaatacaaccccacgacgttttcaccggtggatgcgcagacggtggaacaactgaagatgactgctgaaattgtctgttcggtgttccgtgtcccggcctacaagattggcgtgggacaaccgccttccagtgacaacgtggaggcgctggagcagcagtattattcccagtgcctgcagacgctgattgagtccattgaactgttactggatgaggcgctggaaacgggggaaaacgagagtacagaatttgatgtcaccacgctgctgagaatggacagtgagcggcgcatgaaaacgctgggggatgcggtgaaaaatacgcttctcacgcccaatgaggcccgtaaacgggagaacctgccgcctctggccggcggtgatgcactgtatcttcagcagcagaactacagtctggaggcgctgtcccgtcgtgatgcccgtgaggatccgttcgcgtcgaccgggaaaacagtttcatcacagctgcctgacggcgcatctgacggtaataaggccataagcgaaacagagcgtgatgcggtgaaggcgatgttcagggggatactgcgaaaatga

SEQ ID NO: 34235 - DNA, 489 bp, Escherichia coli; identical to SEQ ID NO: 21044

SEQ ID NO: 34236 - DNA, 291 bp, Escherichia coli
atggcaactgactcacaactaaccatagaaacggccctgaatgtcggcctggcgctccttggttatttttacatcgtgttctgcagcggacggtggctgtcgctgttgttcctgaaaaaatggaataaacgccgtaagcaggatgaacgccagaaggcattagaagcgttctatgacgcatttgagcttagccgcattgaaccaggtacaacagccaggatagcgacaaaaggcgacctgatgatagtgatgttccgacaggagagagcagagaaaggggaatcagcatga

SEQ ID NO: 34237 - DNA, 594 bp, Escherichia coli
atgaaacctgtttttgatgaaaatgggctggctacagtgccgggcgatatgcgttgtttttattataatgcagtaacgtatgaatataccggctggtctgatgaatatattaatactggagtaagtatgcccgcctgttccactggtattgacccgagcgaaaacattccgggaaaagtggcagtatttacgggtaagggatggagccatgaagaagaccatcgcaatgagaccgtttactcaactgaaaatggcgcagctgttacagtggattatatcggtgccatcaaagacggttatgtcacgctttcaccgttaacgccatacgataaatgggatggtgagaaatgggtgacggataccgaggcacagcatagcgccgcagtagaagcggcagaagcacggcgccagtcgctgattgatgctgcaatggcttccatcagtctgattcaactgaaattacaggccgggcggaagctgacgcagccagaaaacacccgacttaacgctgtgctggattatattgacgcggtgacggcaacagatacgagcacagcgccggacgtcatctggcctgaactgccggaggcgtag

SEQ ID NO: 34238 - DNA, 345 bp, Escherichia coli; identical to SEQ ID NO: 13686

SEQ ID NO: 34239 - DNA, 309 bp, Escherichia coli
gtgctgacgcacttccgccaggaacttaaagcccttaccggacggaaactgcaccttaaacgcatacaacgagtcattgtcataggcatcacgcagggcgttctgggcctgattcagataaaaattacccgacatggaaatctcagacgacgcccccagaccgttgatgttctcctgctctgtggagcagagcgtggtcacatcaatatcctgtttctgaccggcggtgaactggacttccttgatggtgcaatccaggcgcagatattccgccttatccatagtttcagcagtcgccggggcagatga

SEQ ID NO: 34240 - DNA, 621 bp, Escherichia coli
atgtcgcaggttaaaagtgctgccacgcagacctttgatggtattgcgcagaatatggcggcgatgctgaccggcagtgaacagaactggcgcagcttcacccgctccgtgctgtccatgatgacggaaattctgcttaagcaggcaatggtggggattgtcgggagtatcggcagcgccattggcggggctgttggtggcggcgcatcagcgtcagacggtacagccattcaggctgctgcggcgaaattccattttgcgacagggggatttacgggaaccggcggcaaatatgagccagcggggattgttcaccgtggtgaatttgtcttcacgaaggaggcaaccagccggattggcgtggggaatctctaccggctgatgcgcggctatgccaccggtggttatgtcggtggcaccggaagtccggcgcaaatgcggcgttcagagggtatcagatttgagcagaataaccatgtggtgattaataacgacggcacgaatggtctgccaggtccacagatgctgaaggcagtgtatgacatggcccgcaagggtgcccgtgatgaaattcaggcacagatgcgtgatggtggtctgttctccggaggtggacgatga

SEQ ID NO: 34241 - DNA, 366 bp, Escherichia coli; identical to SEQ ID NO: 17626

SEQ ID NO: 34242 - DNA, 222 bp, Escherichia coli
atgaaaatcatcacccgtggtgaagccatgcgtattcaccgtcagcatcctgcatcccatctttttccgttctgtaccggcaaataccgctggcatggcagcactgaagcgtataccggtcgtgaagtgcaggatattcccggtgttctggccgtgtttgctgaacgccgtaaggacagttttggcccgtatgtccggctgatgaacgtcactctgaactga

SEQ ID NO: 34243 - DNA, 372 bp, Escherichia coli
gtgcgtcagcacacctggtcatccggtaccaacggcgtggtggctgcaacgttctcactgcgtctgaaaggcaaaccggtgtcctttgtggtaccgctggcgtttgtgaaaaatctggataaaacacttaccgtgaataccggtgcgctgctgacaatgtcagtcagtgccaacgggggaacgccgccgtataaatacgcctggaagaaggatggtcagccggttgacgggcagacgacagacaccttcagtaagccaggtgcgcagtccgctgatgcggggaaatatacctgcgtggtgaccgattcggcagagaaagcacagagtgtgacgtcttttgaatgcaccgtgacagtgagcgcagccgcctga

SEQ ID NO: 34244 - DNA, 372 bp, Escherichia coli
gtgcgtcagcacacctggtcatccggtaccaacggcgtggtggcagcaacgttttcactgcgtctgaaaggcaaaccggtgtcctatgtggtaccgctggcgtttgttaaaaagccggaggcgaagcttaccgtgaataccggtgcgctgctgacaatgtcagtcagtgtcaacgggggaacgccgccttataaatacgcctggaagaaggatggtcagccggtcgagggacagactactgacactttcagtaaagccaatacgcagtcaggtgataagggggcttatacctgcatggtaacggattctgcagaacagccgcagagaattacctctgacgcgtgcacggtaacggtaaatggcgcaggttga

SEQ ID NO: 34245 - DNA, 345 bp, Escherichia coli
atgcaatttggactcatttgggatggagattctgtcgaaacctgtagtggtgcctttggcgactatttaaagtttaataaccctcataagacatctctttatctttcaatggaacttccagtatttatatgggataaagccgcccttgcggatttcattgtagataatagaataggatatgcagtgggatcaatcaaagaaatgcaagagattgttgactccatgacaatagaaacttataagcaaattagtgagaatacaaaaattatttctcagaaaattcgaacaggaagttacttcagggatgttcttgaagatgtgaacgatgatcttaaaactcgctaa

SEQ ID NO: 34246 - DNA, 177 bp, Escherichia coli
atggcctggtgtgtcggcaatgcccgggtggagcctaaaggtaacgccatccttattaccaaacaggccagcggacggggaaaaattgacccgctgatggcgctcttcaatgcggtgtccctgatgtccctgaatccggaaccgaaaaagaaagcgtatgaggtttttttcatataa

SEQ ID NO: 34247 - DNA, 222 bp, Escherichia coli
  misc_feature (168)..(177): n is a, c, g, or t
atgagaaactttcctgttccgtactcgaatgagctgatttatagcactattgcacgggcaggcgtttatcaagggattgttagtcctaagcagctgttggatgaggtgtatggcaaccgcaaggtggtcgctaccttaggtctgccctcgcatttaggtgtgatagcnnnnnnnnnnataaccgctttagatactgccctgattgcgttgctcttcagctaa

SEQ ID NO: 34248 - DNA, 441 bp, Escherichia coli
atgcaaggcattaaaatatatacaattctagcctcttctcttatatctggtagtgtttttgctcaaacggaaatttcgactgcaaattcgtctacagttaatgcaagttatgttgaaccttcagcggaaaaaataatatcgccaagcgataaactcaataacctttttgaaagaaatatgtctcagccttatattttacaaaaaattggcgagagaacttattatgttcaacgctatttttattccactacgttttatgtcggagataaaggggttttgctgtttgatgctccggagggtcgcggtaaatatttattacaggcaattcgtgatgtgactccattacccgtaacagcgctggtttattctcattaccatgtggatcacattggcgatagtccattttggaacgatgaggcggtaatgactccaacttattga

SEQ ID NO: 34249 - DNA, 876 bp, Escherichia coli
atgtcagatttcgaaattaaaattgatttgaatgtgctaaatcacctagggatgagtctctattccaatactcccgcggtactaactgagattatatcaaatgcatgggatgcagatgctcaaaatgtagaaattacacttgatgttgagaaaggagaggtcatcattaaagatgatggtcatggcatgtctaaagatgacattattaataagttcctaaaagtcggttatgctcgcagggaacatggaagagccaaaagcgatcatctaaaacgtcaagttatgggcagaaaaggtattggtaagcttgccatgttttcacttgccaataaaatccaagtttattcgtacaaaaagggggaacagcctcaggcctttgaggtagatgtcaaagatttacagcaaagtatcaaagaatcaaaaaactatattgctgactcccttgaaatacccgaaaatcttgcttacggcactacaattaaattatttgaactaaaaaaagccattgataggactcaaacttacctcagaaagcgaatagctcgtcgatttagcattattggccccaaccataactttacagttaaaattaatgggaccgatattacaccggcagatagagatttcctttcagatctcgagttcatttgggaatttggcgaatccgaccctgaaaggataaaatcctgcacaaacatcacacaaaaaaacatattaccaaatactattacctttgaaggaaaagatgtaaaagttagtgggtacattggcagtgtagttaagccatcacagttaaagaaagaccctgaaatatctaacaacagcattactgtaatctctcacggacgtgtttttgaggaggacatattattataa

SEQ ID NO: 34250 - DNA, 237 bp, Escherichia coli; identical to SEQ ID NO: 31674

SEQ ID NO: 34251 - DNA, 438 bp, Escherichia coli; identical to SEQ ID NO: 31671

SEQ ID NO: 34252 - DNA, 429 bp, Escherichia coli
atgaatataaagacgcttaacgtcagccttttgtctatttctattattacagcattgtttccgttgaacgcgatggcaacaaaattaaccatagagcagcgccttgaattgcttgaaaatgaattgtcgcaaaataaacaagagctgaaagcaacacagaatgaactgggagtatataaattccgactttcgacattacaaaaaagcatcacagaaaataaatatcaatcggcctcgcttgccgaaatatcagcgacatctcccgttgctgataacatcaaaaatgaaaacggtgaacagaactcgtctgccgcagcacatactataaatggatcgcagcaaattgccgttattgaaagtaaaggcgataaaaccactcatctcgttaccaaaacgtcccagagaacccgctgcataagtttgtggtga

SEQ ID NO: 34253 - DNA, 438 bp, Escherichia coli
gtgacggttatttccatcgccaacctttctggtcgtctggtgctgggcattctgtctgacaaaatcgcccgtatccgtgttatcaccattggtcaggtgattgcgctggtgggtatggcggccctgctgtttgcaccattgaatgcagtgacgttctttgcagcgattgcctgtgtggcatttaactttggtggcacgattacggtgttcccgtcactggtcagtgagttcttcggcctcaataacctggcgaaaaactacggcgtcatttacctcggtttcggtatcggcagcatttgtggttcgattatcgcttcactgtttggcggattctatgtgactttctacgtgattttcgccctgctgattctgtcactggcgctttctacgaccattcgccagccagagcagaaaatgttgcgtgaagcacatatttag

SEQ ID NO: 34254 - DNA, 528 bp, Escherichia coli
  misc_feature (511)..(520): n is a, c, g, or t
atggactttacggaatatcaagaagaaataatcgaagatgttaaatcttgccttgaaaacttacaagtccaacccattttattcatgggtgcaggtatttcacaacgatatataaaagcgcctgactgggaaggtctattaaagcaactagcggaaatatgccccttgatcaaacgcccttatggttactacagccaaacaaagggtgataacaaacctttgattgctagcgatttttgtgacttctatgctgaatgggcttgggatgatggcaaggatcgctatccagagacatactttgaaggaacgactccaaaagatatttatattaagcatgaaattgcatccattctgaatgaattatcaaactccgttgatttctcgaacatggaatatacagaggaagttcagaaattaaggaaagtaaaacctcatgcaataatcacaacaaattatgacgacacattagaaaaaatatttgacaattatcaggcaatagttggtcataacnnnnnnnnnnggtcataa

SEQ ID NO: 34255 - DNA, 276 bp, Escherichia coli
atgagttcagcaatcaataagcccaaagcctcatacttaatgggaataacctgcgacgagtatgaaactgcagcaaaaatctacacacttagcgtcaatgccgacaatctggcaaaggcaataagagagatgcaggccgcgcttgagcgggtagagaaaacgccgcgaatgccccctgaagataagctgaaaggaatactcattggtcagataaaattaaccatttcccccaatcccaatagccatgcgaacttgctatcaggctcctgttgttga

SEQ ID NO: 34256 - DNA, 573 bp, Escherichia coli
atggcgggtattcaggttattgcaggaaattttcccaagggatgggcaagttttggctttggcactattgtcttcggtaaaaaacctaaacaaggcttccctgatgctattgtgctgaacccgaaggaagagctgctatcaattgaaattgcagacagtgaggtggaaagccgcataggtaaggccgcaggcacaggtatccttggtgggctaatatttggtggcgcgggtttggtcattggaggcttgcttggcgcagcagataagacaaagaagaccataacatttaaagcggcattcacggggaataggcagcttctagctaaaacggatgcaaaaacctttttaaagctgcagtcaatcgctttcgataacgcaaataatttgcctgtaaccgataaggtccatgttgaaaatttggatgctccagctgaaaatccatcgactaaagagccagatttatccccttctgttgctgtagccaagatgacatctaaagataagcttgagcttgcggttggcttggtcgtcatcaccttagttatctgggcagtgattcacttctttttttag

SEQ ID NO: 34257 - DNA, 366 bp, Escherichia coli
atgtccattattttagaagaacttcacgatcgtctagttgaggaattaaaacgcatcggccctcaaactgttgctaagttaacgggcatatctcgtgcgacgatttacaactggatggaaaagggcaatacgcccttagataaattggctcttttggatgcagcgggcatagatgttacttacatacttactggtcagtgtgctccagggtctattgtagagagaccttccttaacaacccggcaggcggcgttgttggataactatgagcacttaaatgattcagacaaaaaggctttagagcgtacagcctttgcgttggcggaacagggaaaggtgagcaaaaaaacaaaaacagcatcatga

SEQ ID NO: 34258 - DNA, 189 bp, Escherichia coli
atgactgcagaccaagtcaaaacgctcttccgccagcggggaattacattcacccagtgggcagaagaaaacggctacagccgttacgaggtctaccgcgttctcaacggtcagaccaaggctcggtacggtaaatcccatgaaatcgctgtgaagcttggacttaaatcagcagcccaagccgcctga

SEQ ID NO: 34259 - DNA, 930 bp, Escherichia coli
atggctcgcacaaaatcacaacatgctgaacttgcacctgacgtggagctaaatcccgaactgaaagcgactcaaaatctgatggcgacagttaccagccaactcagtgatgaacgtgatctgctgaatcagcttcttggtcaggcacagatggctgatgcatttgagcaattttcccgaacggttcggacttctaaactggcatttgttaaagaaaacaagctatatcgcaatctaaagggcaagaaaacaccgaacggttcggagttttcgggcacatgggatgagttttgtaatgttctcggaatctccgttgataaagcagatttggatattgccaaccttaccgccttcggtgaagaagccttagattccatgtcccgcatggggattggttatcgcgaactgcgccagttccgccgcctgccggacgaccagaaaagcgccctcattgaagtagccaaagaaggcgacaaaacggccctgctggagctggccgaggaaatgatcgccaagcacaccaaagagaaagaagatctcaaaaccgacctcgaaatcagccgccagacgctggccgaaaagaaagatgagatcaacgttctcaaggatcaggctgatgaactcaaggcgaaactgacgcgtcgtgcaactacagagacgcctgatgaagaaggtcaggcgcttgaaacggaagccactggctttaaaagcggtgtactcagcgctcttatcaacctcaaatgcggctttgaggcactggccgaacacgcagaacgtaccggcatcagccacacccatatcatggcaggactgcttgatgatatcgaagcccgtgtagtcgacatgcgtcaacagtttgacctgcctgacttccgcgagattgacagcatgccggactgggtgaaagaagcacaggaagaggatgaataa

SEQ ID NO: 34260 - DNA, 345 bp, Escherichia coli
atggtcgcttcacatctgacaccaccagtaagagaacgggaaccgcaggaaagcctttacatggatagcccggaagttcttggacacgcgctatgcactcttgtaccagacatgatggcgggattctgcatcctgaccagtactggagaaatcaggatttcagcacccgatgcgcatgcatttgccaccgcaatggaaacgttacttctggaaaaaattcactatatccaaaacgaacgctgtcgctgttctgccaacaaacgggctgttgagattgcggagaaacttcacgagaacagtgagaaatggaagcaatggcaacaaaaagcgaaggctgaatcatga

SEQ ID NO: 34261 - DNA, 1794 bp, Escherichia coli
atgaatccagcgctgacgcaacggcttgtcagcatagccgccgccgctgacgcagccggacacggtgaaaaagaggcggtataccgggcagcgtgtgaagaattacagatgtcacgcgccaccctgctgaaaaagcttaagggggtacggatgagccgaccacgcaaacagcgctcagatgccggtaaaacgacgctgacccacgatgagatgctgaccatctccggggcgtggctggcgtctccccgtcccggcaacggtaagaaaggctacagtctggaggatattgtggacggattacgcgataacggtctgattattgctggccgcaccgatactgagaccggggagtttttcccgctctcaattgacgctatcagtcgcgccctccgccagcatcgtatgcaccccgaccagttacgggcaccatctcctgccctggagctggccagtctgcatccaaaccacgtctggcaactggatgcgtccatctgcgtgctgtattacctcaaaaatccggccaaaagggcaaaaggggacaccggtctgcgcgtcatgagcgcggcagagttcaacaaaaacaaaccccgcaaccttgaccgtatcgtcaatgaccgggtgtggtcatttgaaatcaccgaccacacaacaggctggatttacgtcgagtaccgctttggtggggagagtgccgtcaactttctggaggtgatgattaacgccatgcaggaacgtggcagtgccgacgtactgcatggggtgccgaaaattctgtttaccgaccccggctctgcgctggtctcggcctcgctgctcaatatgtgccgggcgatgggcatccgcaccattcagcataaggctcacaacgcccgcgccaccggttcggtggaaaaggctcgtgacattatcgaacgcaagttcgagggcggcctgcgctttctcagggtggatgatattgatgaactgaaccggctggcgcgtctctggcgtatgaagtttaaccgcaccgcaatccacagccgccacagcatgtcgcgtaccgatgcctggctgagaatcaccgaagagcagctggtaaaagccccgccccccgaaatctgcagggaactggccatctctgcacctgaagaacgcaccgttaccggcaagctgcgagtacccttcagaggcaaggaatacgatgtgtctgacgctcctggtgtgttcgtcggtgacaaggtactggttgcacgcaatccgtggtcagacgaggaagcgcgggtcgttatcgtcaatgatgaaggctttgagaccttccacgttattcacgcgatacagaaagatgaactctggcagtacagcaccagcgccccggtcattggtgaagaatatcgacagctgccagaaaccgttacccaggcaaaccgcgatcaagtggaacagcatacctacggcacctccagccaggaagaaaccaaggcggcgaagaaagacaaagccctgccgttcggtggtcgcttcaacccttatctggacattgagcgcgatgaccacccggcctacatgcctaaacgcggtcaggcttcagatgtgcgcgggccgcgtattgagcagcgtccgctgacccatgtggaggccgcgaaagccctgcgcgagaagttcagcgcgaacggccatacctggacgccggaacattaccgccagttaacggcgcagtacccggttggcgtaccggaagccgcgctggatgaggtgatggtcaccctgaccgctccggcccgcagcagcgttatcagcatcgttaacggtaactga

SEQ ID NO: 34262 - DNA, 492 bp, Escherichia coli
atgccgcagaataagaacttaacagatgagcgtctggctcaaatacataaaagccttaaacgctgggctgaccacgataacactttaaatagttacatcagcggaacaaagatagacccgatatttcatgactgtgttgtagcgctggcggaacttcaggaacgccgcaaggcagatggctctgtcccaattgcttggaccgatgcagaagaactgcgagacctagagcgagatggttatgcggcaatgctatccatagaaaataaggacaaaaatacagatccacgtcgccagatatttctatacacagtcccacaattagcgccgaatttactggatgctattgacgaaattgttgatgagatactggccgtagacacaatcgcatctactgctgcactcaaaactattttccgtatgaagaccgggaaaatgcgcctcgacctcgcttgccaacagcgctgtaacaagcagcaactgggggctaaatga

SEQ ID NO: 34263 - DNA, 231 bp, Escherichia coli
atgattatgttattacgcaagaagaaatcactgaaaccttgccgtacaactgccaaatatatttttgcccgtgctttttttaagaatgtcagaccgggcattcaaattggggttattgccggacgtgaacaggttaaaaactacatgtcaggtgcctggtggaataacgaccctgttattgcggcccgcaatattcatattaactggggaggaattcatcatgatggctga

SEQ ID NO: 34264 - DNA, 450 bp, Escherichia coli
  misc_feature (433)..(442): n is a, c, g, or t
atggagcttatcgaagcgggtaacccacagctaaaaggtgtgctgccgaaagtctacgctcgccagaacctcgacgcaactgtgctgggtgaactgatagatctgattggcaacattgcactgggagatgccaaagcgcgttctgctgatgtattaggccacgtattcgaatacttccttggtgaatttgcactggcagaaggcaaacagggcggtcagttctatacgccaaaatccatcgtaagcctgctggttaacatgctggaaccctataaaggccgagtctttgacccttgctgcggttccggtggtatgttcgttcagtcagaaaaatttgttgaagcgcatcagggaaatattgacgatatttcgatttacggtcaggaatccaaccagaccacctggcgtctggcaaaaatgaacctggctatcnnnnnnnnnnttccttaa

SEQ ID NO: 34265 - DNA, 600 bp, Escherichia coli
atgtcgaaagcagaattgaatcaagagctgatcgcaacgattgccggtgatatcactgtgtttaactacgatggagagacccgtgaatatctgtgttcatccgttgagtatctcgccgtgggggtcggtattcctgcaaattcctgcgttgaggctccgggagagagtaaaaccggctttgccatttgccgtacagcagacctttcatcatgggaatatatcaccgaccacagaggccaaaccgtttatagcacagagacgatgcaacaagttgaagtgacggcactgggggattatcccgaaggtgcaacgcccaatgcccctgcatcaccgtacgataaatgggacggagaaaaatgggtcatggattctgccgcaaaacatgaaggtgatattgctgatgcagaacaatatcgacaagcactcctcgatcaggtagatgaactaacctccgactggcgagtggagctgatgctcggtgatatcagcgaaggaaacaaaaataaactgtcgtcgtggatggcttataaaactgcggttaaagccgtcgatatttcgacggctcctgatattaactggcctgctcaaccggaggcgtag

SEQ ID NO: 34266 - DNA, 609 bp, Escherichia coli
atgattaaggctgaattaaaccaggacatgatcgccacggtggacggtgatgtaaccgtctataactatgatggtgaaactcgcgagtatctgtcatcttccgttgagtatctggccgtgggggtaggcattcctgctaactcctgcatggatgcgccgggtgaaagtaaagcgggttttgctatatgccgtacagcagattttacctcctgggaatatgtcgccgatcatcgtggtaaaacgatatacagcactgaaacaggcgaatcggagattgtttctttgcttggcgattacccggaagataccaccacgctggcacctgccacaccttatgacacgtggagcggtagcaagtgggtgacggatgccgaaaagcagcacattgcagacgtggaagcagcggaacagcaaaaatcagctttgttagttgaagcgcaggcgactatcagcctgtggcaaacggaactacagttaggcatcatcaatgatgaagataaggccagcctgatactctggctgacctacataaaaaaattgcaggccgtaactcctgacactgcaccaaatatcaaatggcctacgcctccggttgagcaggccagttaa

SEQ ID NO: 34267 - DNA, 279 bp, Escherichia coli
atggcgccgttgttcctccggcagcgcgctgaaatctgcattgccggtcatcacaacaaaaaaatgaacaatcgggatatagcctttgttcgtaaaacggtctaccagacgcttgagttttttgtccagcatgaattttttgctacgagtcacgcttactggcgagcgccccatgttcttatcacctttaaaccaagtatctccgcgtgcggttacaggctgatggttccagtctttcagttcaacaatgatcacgttgcagtgtgttacaataactaa

SEQ ID NO: 34268 - DNA, 999 bp, Escherichia coli
  misc_feature (970)..(979): n is a, c, g, or t
atgataccactagaattagtaatcttgctaacgacccgaaacagttttgttctttttttttgtgagtacataaaaagagatgatattagtatagatatcgccttggatgtgctgagaatatcttccatctattataatagattttcagttcagactgaagttgagtataacaatacattcaaaaaatgtattaatgagctagtaaactcatttcctgataacattgaactaatctctgagttcgagagtcaatgtaaaattatgcatgatataaataattctttctttgcggctacaaaatgtgctggtatttggcgtaaaaatacaaaaaaatcacatgcattaatacttaatctcatcatgttttgtgagatgtttttatcatcattatcatccttggttgtggtcaatgatcctaaaaaaatgaagaggatttttccattatttatcgtttctgaaaatattaatattcatgctgaacctgatatcgaatattttcgagttatcgatagggcatttgatgaggtagccaattacaccggaagaatattttcttatttacggactcatgggccattgaaactaacttcttgtgtgaataaacaaaccttgctttcaatgggagagtaccttaatgagtggaatgtttttgactcattaagcagagtaagagactttttcagactaagtagtgcagtatttacaaaattggataataacatttactctcttgaggttgatagtttttgtttataccgagattatgagattgcaagaaatagactaatgatgagagcgtcacatctatatagcgaagttcatgaatttagtaacaaacattttcatctaaatagttgggtaaaggatcatatgccatcttacttaaattctgatggcgtttttagctcatttcatctaagcgagttggaaaatatgtctcctgatgaccttcatgaagaatatgggaatnnnnnnnnnngggaatatatcattatttaa

SEQ ID NO: 34269 - DNA, 1098 bp, Escherichia coli
  misc_feature (27)..(36): n is a, c, g, or t
atgaccttcatgaagaatatgggaatnnnnnnnnnngggaatatatcattatttaattgggtgcacgcttatcaatgtttagtcgagttatctaaagaagaaatgagcaaaagattttcatcgacaaaacctatacccctacagttggatcgctggctgatcataaaaagccgtgagagttggttatcattctttcaacgtaaggggattgcagcagatgcagcaaaaaaactgatagattattttaccttcaattcaaaatcacatgatcttaatgattgcccatttattccctgtatggacggtttatgcttaatgcctgcattaatagcaaatacctcagtgactcgctctctaatgtcattatttggttccaaaaaaatttctcaagcaagtaaagggcgatttcatgagcaacaatttataaaacgagttcgtgatgcggggattaaagcttctccaattgatgctcatgctaattatcagtgtgattgcgtgattctcctggatgattgtttgatttttacagaactaaaatcaaatggtcaaccaatatattatggtaagtactatcagcaagtgtgtaacatcgttggagatagctcattaatacatgatcataataataaatttatgcgttcttattttcaacaaataaatcgaatttctgaacattatcttaatcatcttgatgtgatcattaaagaattcgaactaccatcaacatggcaacccaaaggtgtgtataagcttattgttactacaactatgctcggtgggaaatatcatgtggatgatacatatgtagcggataaatatgcattatctagtttttttcaacgaatacctggagtgatatatcaaacaaatgaaaatggaaaaatggcgaaaaatatcattgatgggtttgagtgttgcgaaggggaaatcactatcgataagtttatagattatctttcctctttgcccagtattaatgctgtacgtaaaaatataaaaaaattaacttatagtgttcgatttaatgaaaaattagtccatcacccttattatgattcttgggcttttggtccatatattcgtaagggaaatgattag

SEQ ID NO: 34270 - DNA, 237 bp, Escherichia coli; identical to SEQ ID NO: 31674

SEQ ID NO: 34271 - DNA, 927 bp, Escherichia coli
gtggaaagcacttttagaacactacaagccgagtttaagtcctttgcacctggcattgtagagggcagtcggatcaaaagccatggtgaaacagactataggttagatgcatctctgtcggtatttgagttcacacaaattattttgcgtacgatcttattcagaaataaccatctggtgatggataaatacgatcgagatgctgattttcctacagatttaccgtctattcctgtccagctatggcaatggggtatgcagcatcgtacaggtagtttaagggctgtggagcaagagcagttgcgagtagcgttactgcctcgccgaaaggtctctatttcttcatttggcgttaatttgtggggtttgtattactcggggtcagagattctgcgtgagggttggttgcagcggagcactgatatagctagacctcaacatttagaagcggcttatgacccagtgctggttgatacgatttatttgtttccgcaagttggcagccgtgtattttggcgctgtaatctgacggaacgtagtcggcagtttaaaggtctctcattttgggaggtttgggatatacaagcacaagaaaaacacaataaagccaatgcgaagcaggatgagttaactaaacgcagggagcttgaggcgtttattcagcaaaccattcagaaagcgaataagttaacgcccagtactactgagcccaaatcaacacgcattaagcagattaaaactaataaaaaagaagccgtgacctcggagcgtaaaaaacgtgcggagcatttgaagccaagctcttcaggtgatgaggctaaagttattcctttcaacgcagtggaagcggatgatcaagaagattacagcctacccacatacgtgcctgaattatttcaggatccaccagaaaaggatgagtcatga

SEQ ID NO: 34272 - DNA, 615 bp, Escherichia coli
  misc_feature (549)..(558): n is a, c, g, or t
atgcttgataagggcgagcttacgccttttcagcaagatgttcatactctgggccttgtcgcctggcacttatttagcggtatgcgcatgtcgccaaagagtctggagaaagtacaggacaacatgctaaacagccagcactggtattcatctgtattacgggatgccgttgccgcaaaattcacttctgcaacagaattctttgatgccctgaaacaagccgaacctgctggcaaggatattccaacatttgatgatactgagcttgacccttaccgacatgctatcaatcacgctcgtcaatacccggaagacgatggctttcagtttcaggtcgaaacagtcgacaaagaagtctatatctcgaaaggaaggctcgtgaaggcttggctgaatgttgggggacagggatacgatccgtcaattaatttccaggttctgaagtttttaaagcaggttgagcggctttcttcagttaaaacaacgtatctacctcaaattcgtgaattcggtatcgcatcaaaatcatcaagcctatatatggtcacnnnnnnnnnncttacatggtctgggtgtttctcacggggacatccaccctggcaatgtgatatttga

SEQ ID NO: 34273 - DNA, 489 bp, Escherichia coli
  misc_feature (467)..(476): n is a, c, g, or t
atgagtaggtggagaaatttttgtataactgaattagcagatttttgcaacgcacaaagaattcctttgagtgctatggaacgagcccataagaaaggaaattttccatattatggagcgtcaggaattgtcgattatatcgacaattatatttttgatggcagctacatccttatttctgaagatggagaaaacttaaattccagaaaaacacctatagcatttgaagctactggaaaattttgggttaataatcacgctcatgtccttaaagctaaaaagccccatttaacggcattgataatccaatatttttcacaacttgatctatctccttatttaacaggtgctgctcaaccaaaattaaataaagcatcgctaaatttgattcctctttacttaccaattgatgaatctgaacaaaaagccatcgcctctattttgtcctctcttaaagataaaatagnnnnnnnnnnaaagacaaaatag

SEQ ID NO: 34274 - DNA, 561 bp, Escherichia coli
atggcaaagatgaccgaatccgatattgaagtaatggcaattgagcacctgcaagggctgggctatgagtatgtttacggcccggacattgaacccagtggaatcaatccgttacgtagctatcagcaggttatccttgaagataaggtgcgtattgctctacaacgcctgaatccgcaccttagtgaacagaagtgtgaggaagccctgaaacaggtgatgcagatcagcacacctgatctaatggcaaacaatctggcctttcatcgcctgttgaccgaagggatcaatatcgaagtcagtaaggatggtaatacacaaggagagctggcctgcctgatcgactttaacgatcccactaataatgaatttctggtcattaatcagctcaccatcaaagaaggcaatcatacccgccgacctgatcttattttattcatcaacggcctgccattagtcgttatcgaacttaaaaatgccgctgacgaaaatgctacggtaacaggtgcctataatcagattaaatccccggtctgtttaactacaatgcttttaatgtga

SEQ ID NO: 34275 - DNA, 633 bp, Escherichia coli
  misc_feature (571)..(580): n is a, c, g, or t
atgagtttgtgcgtattaatatttctggcattggtaaataaagttagtgaaaacacaaaacagcgaaatttgttttccaaaaaagtgactttgtgcataactttgttttttgttcttgggggggcgatagttgctcacatattttctagccattatgagagctacgatttacacattgccgagttaaccaatgaaaatggtcaggtggtttggaaagcctcatatgttaccataatgattttcatgtggttaaccttgctttcggttaatctatactttaatggtttacgctgtgatatctggaacggtgtgtcggtgattgctttttgtgccgtgctgtacaatatctctctgttatttatgagcaggtatagcgtgtccatttggtatattagtcgcactattgaagtagtcagtaagttaaccgttttggtaatttttatgtgccatatattcagtgcgctacgagtaacaaaggacattgcacatcgcgatcccttaaccaatatatttaacagaaattatttttttaatgaactgacggttcaatcagcatcggccaaaaaaacannnnnnnnnnccacttcaaaaaagtcaacgacacctggggacatccggttggcgatcaagtga

SEQ ID NO: 34276 - DNA, 360 bp, Escherichia coli; identical to SEQ ID NO: 33365

SEQ ID NO: 34277 - DNA, 624 bp, Escherichia coli
atgctctatttcaacagttgggaacgtccaactgatgatgtagttgatgaatcaacgcatggttttatggagggctttaataaactttttaccgatcttttctcaacctttaagctaaaaaccttcagaacccatcttggtatgtatctatttggtttcggcgctgaatggctatttacagcgacatttacctatttcattgttttcaaccttgaacaaccgagaacatttgtttctgagatgaactcattaagcagtatttgtcagttcttctctacagcattctttatgatgtggtgtgccaaacgaggatttaaacgcccatttatcattgctatcttaattgttgtatcttcagtgattggttatgttggtgtgtactatcttaatattccccatctgacctggctcattattggcatcactatctggtttggtctggggacggggggggtatattacattccgtggagtgtatatgtattccttgccgatgttgatgaggtcttaactggtcgtcgtcgtgaaggtctttatgctggtgcaatggttatggccggtaagttaatgagagccactgtagtattttgtctgggggttgtcctcaatcagccagtgcagtaa

SEQ ID NO: 34278 - DNA, 246 bp, Escherichia coli
atgatatttggtgtggctggtatggcgttaataggtatctatttctctgtaaaaatgaaattagataaagcatctcacgccgaaataactaaagaattagagcgtctgaaaaaaggtggcagaaaagaagatgctacaccggaaattcgtaagcttgttaagcaactgactggttatgaatatgaccagtgcttcggtaataacaatgttggctttaaatttgaaaacaaagcaggggcattctag

SEQ ID NO: 34279 - DNA, 468 bp, Escherichia coli
atgataaaactttcgaatatcaccaaagtgttccaccagggcacccgcaccatccaggcgttgaacaacgtcagcctgcatgtgccagctggacaaatttatggcgttatcggtgcctcaggcgcgggtaagagtacgcttatacgttgtgtaaacctgctggagcgcccaaccgagggtagcgtgctggtcgatggccaggaattgaccacgctgtcagaatccgagttgaccaaagctcgtcgccagattggtatgattttccagcattttaacctgctctcttcgcgtactgtttttggcaacgtggctctgccgctggagctggacaacacaccgaaagacgagatcaaacgtcgcgtgacggaattgctgtcattggttggtcttggcgataagcatgatatagctacccgtcgaatctttccggtgggcagaaacaacgtgtggcgattgcccgtgcattag

SEQ ID NO: 34280 - DNA, 525 bp, Escherichia coli; identical to SEQ ID NO: 9224

SEQ ID NO: 34281 - DNA, 1419 bp, Escherichia coli
atgcctgttgttcctactacatccggacgccaggtgcaaagtcgtggtgtgcaaaccggtggttttcagaccttcgatgttcctcaagcaggtcaggtgctggcgaatgtcgcagatcagtatgcggtggcatatggtgaagccaggcagaaagcgaatgttgctatggcccaggaggcgttactgcaatttaaccaatttgcagatgaccagattaacaaccctgaaaatggtctgatttctaaacagggtaaaaacgctcttggtcagagtgacgctgttatgaaaaatatgcaggaaagggctcaggcattattaggctcaattcctgaaagtgaggaaaggaataaattatcctttcaactccagcagtctatgcagtcttattacaatcaggcacgtcgatatgaagttgggcagtttcagcaattccaagatcaaacgtatttgtcaggaaatgcattggctgtcactcagtctgcggggctatatagcgataaccaagcatttgtcgatttagccaagcagcgatttgaatctattgatcaatacgctgatgcgcatgggcttcctgatgagtggcgtgttcagcagaaaactcagctcaaggaacaaatggggcagcaagcatggataggaaatatcgctcaaaaatacaacgagtttcttcaggttaatggagagccaggggatcttgatggtgtgagtcgtgcaatatcacatggtaattcattggatgctcgtggtttacgtaataataaccctggtaatattgaagcgagcaaatctaacccgtgggaaggtcagatcggtagcgatggacgttttgcaacgtttgctacccctgagcatggaatccgcgcgttgggtaaaaatatgttgtcttaccagcgtcaaggctatgacaccgttagcgagattgttaatcgctatgctccggctagtgatggtaataatactgatgcttatattagggcattgtgtagtgagcttggtgttggggagaatgatcagcttgatatctctaacccaaagacactagctgctttatgtgctgggattattaaacacgaaaatggcagtatgccttatagcaccgaacagcttgaaactggtatctcggcagcccttggtctaactaaccttgattcacctaagcgttatacgggcaatgcggcatttgacgctatgagccctcaaatgcaaatacaggcattgaggcaggctaatgagctgagaaatcagtaccgccagcagtatgcggaccagcttagcaccgtagttaaagatgcatattcagcccttgatgaaggattgaaacctgagaggttaccttctgaggacgattttatccgggccaatggtccgcgcattggcgctatgaagtggaaggatatgcaggcgcagatacaatattga

SEQ ID NO: 34282 - DNA, 333 bp, Escherichia coli; identical to SEQ ID NO: 27625

SEQ ID NO: 34283 - DNA, 264 bp, Escherichia coli
gtgtatgttctgaacaactattgttttttaagcggtaaagaaatgagacggattgatgttattcacaaggagctggagcggctgacgtatgggctggaactgtctgatttagcgaaggagaaagcatttactgctgaggcgattggttttaaccttgggctggcacgcaactcggttagtaaagatcttaatcaattatggaatgaaggcatggtggtaaaagtcagggacgtcctgttttttttctacatcgtcacgcactag

SEQ ID NO: 34284 - DNA, 597 bp, Escherichia coli
atgatgcgggaaaaagcccgacgtccgtcgccgctgcagcggcgggtgctgattgtgctggctgcccttgatgaaaaacggccaggacccgtgctgacgcgggacatagaacgggggctggagcgaagcggggaagccccggtctacgggccaaacctacgcgcctcctgccgtcgtctggaggatgccggctggctgcgtaccctgcgcgctccgaacctgcagctggcagtggagctgacggacgctggccgggccgtggcacagcctctgctgctggcagaacaggaccgcctccgggcagaacagcgtgcggcagaagtcgtcgtactgccgctggtcccggcagcaggtctgcccgcagacggcacttctgccactgatctggcggtgcagctgaacggcataacgtatcaggcctgccgtggggattttgtggtgcgtctcgacggcagcacctgtctgcagttatggaataaagaaggcagggtggtacgcctggagggcgatccgctggaagtggcgcagtggctgcaggcctgtcacgatgccggaatggaggttcgtgtacaggttaatgaaagcgtcaccccgtaa

SEQ ID NO: 34285 - DNA, 1302 bp, Escherichia coli
atgaaaaaaattgaatgcgcttgcaattttctgatggataaagatgcgcaggggtatatcgacctgtctgatttggatttaacaagttgtcattttaaaggtgacgttatatcgaaggtgtcttttttatcatcaaatctacaacatgtaacattcgaatgtaaagaaattggggattgcaattttactactgcaatagttgataatgtcatatttagatgtcgacgtttacacaatgtgatttttatcaaagcgagtggtgaatgtgtcgatttcagcaaaaatattcttgatacagttgacttctcgcagagtcaacttggtcatagtaattttcgcgaatgtcagattagaaattcaaacttcgataattgttatctttacgcttcgcacttcaccagagcagagtttctgtctgccaaagaaatatcatttattaaatcgaatttgacagctgttatgtttgattatgtgcgaatgtcgacagggaattttaaagattgcattacagaacaattggaattaactattgattattcagatatattttggaatgaagatctcgatggttatatcaataacattataaaaatgattgatacattgccagataatgcaatgatattgaaatccgttctggccgtaaaactggtgatgcaattaaaaatacttaatattgttaataaaaactttattgagaatatgaagaaaatatttagccattgtccttatataaaagatcccattatacgcagttatatccattctgatgaagataacaagttcgatgattttatgcgtcaacatcgattcagtgaggtgaatttcgatacccaacagatgatcgattttattaacagatttaatacgaataaatggctaattgataaaaataacaatttttttatccaacttatcgatcaggccttacgatcaacggatgatatgatcaaagcaaatgtttggcatctttataaagagtggattcgtagtgatgatgtttcacctatatttatagaaactgaagataatttaagaacctttaacacgaatgaattaacacgaaacgataatatctttatcctgttctcctcagtcgatgatgggccagttatggtggtaagtggatttgcccctatatttccagacacctgttatcacttaacccattactggcttgctgccgtagatattcccgtggcgagcgataacccagtgcactatgcggatgccattcgttataatgctcgaacgcctctgcaaggttctttgctgccgttaacccgtctggtttgggcatga

SEQ ID NO: 34286 - DNA, 948 bp, Escherichia coli
atggatattatgcagcttgaaaaaaaattatgtgaaaaattcaaccttacccctttgaagctttctatcctctcatccaaagctccaaaaaaatatcgcgtatattatatacccaagagaacttctggtcttagggcgattgctcagccgactaaagagttgaagcaaattcaacgttttttggtttcggagttgaagcctcttttgccaattcattcatcagcaatggcttacagatgtggcataagcattaaggataatgctgaacgtcacaagaacaatccatttatattaaaaatggattttcagaatttttttaataaaattaaaccggaaattttttttgataagttcaaaaaaatggatgttcaacacaacgccagagatgaaatacttctgcacaattttttgttttggaagccagggcaaaaaagaagtattacacatatattgagcgtaggagcaccgagttctccattcattagtaattttgtcatgtttgattttgattcagctatcagtgagtggtgtgctgattttggtattgtttatactcgttatgcggatgatataacattttcaaccgctagaaaaaatattttattcagtgttcctaaaatagttaaaaacatgcttgctgagcacgcatcaggtattaccattaatgaagccaagaccatttttacatctaaggctcacaataggcatgttacaggtgtaactattactactgatggtgaattatctatagggcgaaagagaaaaaaatatcttttctctcttgtttttaaatatagcaatgggaacttgacaagtgaagaaattttatatgctaaaggactgatgtcttattgcatgcatattgaaagaaatataataataagaatgaaaaataagtatggtgcggaagttatcaataaatttcttaaggaaggttgtgatgaatga

SEQ ID NO: 34287 - DNA, 1614 bp, Escherichia coli
atgaatgattctaaaaaaagagtggataatgttttttcggagtttattggtctgattaatgatggcgtgcctgaggataaattaaaatattcacctgtattgaatttgctaaatgaatctttaaataaagacaacttataccttaagaaaatatcaattgtagacttcaaaagattaagggatgttattgtaaatcttgaagatgatctcacagtttttgttgctgacaacggctatggtaaaacaactttgcttgatgcgatcgcaatttctttaagttggcttcgttctaatatacagaaaaaagataaacctgggtcgtatataagggaagtggatataaataactcaaaagatgccttgtatgcatctattgctgcaacatttaaagtacaagagctgaatactaatgttttaatcacaaatgcaaaagatggtgtgtcttttaaacgcagtaacgatttacaagaaattaagctgctagcaacaatgtaccgctatgttaatacgttcttagataattcaagtctacctgtgatggcttattattcaattgttaggtctgtcgttggtggtggtattgataatagaagaagaagcggtaagaataaagtttcttggtccaaatttgatgtgtatgacgatttcatgtttgatagaaatgattttggcgaatttttaaattggctcatgtttttatcgaataaatccgctcatgagaatccagtggtcactgataacccagagttactcagaaaggaaatagaaagtatcaataacacaattgaacaactaagtattgtttctaacatcgattttagtattattaatcagctaaagagtagtcttgaagagaaaaaaaaccaattaaataagtttagtagtgaagggtttttaagttcatctgtcttatataggaatgtaataaatgctatattgagatttttgcctgaattcgaaagcattaatctggtttatagtgagactgatgttaagcttgttcttatcaagaatggtattcaattagatgcgcaacaactctcacaaggtgagaaaaccatacttactctggtaggtgatttagctcgccgactttcccttttgaatccagagctacaaaatccatttgaaggtcaaggcatagtattaattgatgaggttgatttgcaccttcatccaacttggcagcagaaaattatagagcggctattaacaacctttcctaatgttcagtttgttctttctacacacagccctcaagtcatatctactgttcctgccaggagcataaggattttagaggaggtggaagatgaatttggtgatatttcgataaaagctgttaggccccgctttcaaactaaaggggtgatgaatagtgatgcattactttatggaatgggagcagaccctgcgcctcctgtagaagaagtaaaatggttggaagagtacaaaaaatttattgaattggatcagtttgatagcgattcagcgcttaaactacgccagaatataataagtcactttggggaagatcatcctttagttgtagaactcgatcagatgacttcactcatggagtttaaaagaaaaattagaaataaaaaacaatga

SEQ ID NO: 34288 - DNA, 669 bp, Escherichia coli
atgaaatttcttcgaaggatatatcctggccctaacgtgctaagtagttatgattttaatactcaaacttgggatgatgtatcatcatctgacaaaaaagatatttgggtagatttagttaaaatgcaaggcaaagtatgcgcttattgtgaaaggaaaataaacctaacaaaagagggggataagcatattgagcatttcaagcgaaaaggtattcatcgcgaattaacgtttaactgggagaatctgtttggttcgtgtggggaaaaacaaagatgcggattctacaaagacaaacaagaatataatgagggtgacctgttaaaagctgatgaaatggatcctgaagatttttttgtttttatctatagtggtgatgttattgtaaaacctgagataaatgaacgaaataaagtaatagctgaggttaccctgagggtattcaatcttaatcccgagaacggtggtgttaaagccgagagaagaaatgtcctcgagaaaggcttaggcactataaaggggtatgttaagattgctcaagacttaattgatagtggtgaggatgcagaagaagttcggcaatatgttcgggatgagtattatgaaaaaatttcacaaatggattttaaaactgcaaggaaacatgtttttgaagcatttctaccttga

SEQ ID NO: 34289 - DNA, 342 bp, Escherichia coli
gtgcgcccagttacggcctggccctacacccagagcgtcgccgaacggtgtatctggttccagttttgcctgttgtcctgcatgggcaaggtcaacgttaacgcaaactgcacctgcatccagcgcgccgagcagtgcatcgcgtttcggatcgaggatcttcgtcagatcccatacatctacaacgcgaccagatttatcgacttcgaggatatggtcacgaatggtggtgacgtgtacgccgtcatcgcgacgatagttactcttacctacgcgcaacagtaccgtgccatttggcgtctcaatggactcatgagtggcgtcagcaaatccgcgcggtag

SEQ ID NO: 34290 - DNA, 4233 bp, Escherichia coli; identical to SEQ ID NO: 11436

SEQ ID NO: 34291 - DNA, 462 bp, Escherichia coli
atggcacaggaacttgctgataaatctaaaggtaagaaaatcagcaatgtgaatgaagctctagctgcttttgagaaatacaaggatgtattaaataagaaattcagcaaagcagaccgtgatgcaattttcaatgcactggaggcggttaagtatgaagactgggctaagcatttagatcagtttgccaagtacttgaagattacgggacatgtttcttttggatatgatgtggtatctgatatcctaaaaattaaggatacaggtgactggaagccgctatttcttacattagagaagaaagctgtagatgctggagttagttatgttgttgttttactttttagtgtgcttgctggaactacattaggtatctgggggattgctattgttacaggcattctatgtgcctttattgataagaataaacttaatactataaatgaggtgttgggtatttaa

SEQ ID NO: 34292 - DNA, 1047 bp, Escherichia coli
gtggaacagcccgtgatacctgtccgtaatatctattacatgcttacctatgcatggggttatttacaggaaattaagcaggccgaccttgaagccattcccggtaacaatcttcttgatatcctggggtatgtattaaataaaggggttttacagctttcacgccgagggcttgagcttgattacaatcctaataccgagatcattcctggcatcaaagggcgaatagagtttgctaaaacaatacgcggcttccatcttaatcatgggaaaaccgtcagtacttttgatctgcttaatgaagatacgctggctaaccgaattataaaaagcacattagccatgttaattaagcatgaaaagttaaactcaaccatcagagatgaagctcgttcactttatagaaaattaccgggcattagcactcttcatttaactccgcagcatttcagctatctgaatggcggaaagaacacgcgttattataaatttgttatcagcgtctgtaagttcatcgtcaataattctatcccaggtcaaaacaaaggacactaccgtttctatgattttgaaagaaacgaaaaagagatgtcattactttatcaaaagtttctttttgaattttgccgccgtgaattaacgtctgcaaatacaacccgctcttatttaaaatgggatgcatcgagcatatcggatcagtcacttaatttgttacctcgaatggaaactgacatcaccattcgctcatcagaaaaaatacttatcgttgacgccaaatactataagagcattttttcacgacgaatgggctcagaaaaatttcactctcaaaatctttatcaactgatgaattacttatggtcgttaaaacctgaaaatggcgaaaacatagggggtttattaatatacccccacgtagacaccgcagtgaaacatcgttataaaattaatggcttcgatattggcctgtgtaccgtcaatttaggtcaggaatggccgtgtatacatcaagaattactcgccattttcgatgaatatctcaaataa

SEQ ID NO: 34293 - DNA, 1047 bp, Escherichia coli; identical to SEQ ID NO: 11409

SEQ ID NO: 34294 - DNA, 387 bp, Escherichia coli
atgaacaatgtaaaattactgattgccggaagtgccttttttgccatgtcagcgcaagccgctgatagagtatcaattgacgttaaggtgactctggaagctgcagcttgtactccaatactaagcaacggcggagttgttaacttcggtagtcattcagtcaatagactttcaacgcagcactacacacagattggaacacgtaatattaatatgactataacttgcgaatccgctaccggcattgcgattaccgctcgtgatacacgaatggatagtatgaccaccggaaaagatagtgggggtcagagtggtgtaaaatataccttaaatggcggaggttatattagccagacaacgggtaatggtgccaacttactgatttag

SEQ ID NO: 34295 - DNA, 546 bp, Escherichia coli; identical to SEQ ID NO: 11402

SEQ ID NO: 34296 - DNA, 582 bp, Escherichia coli
gtgaacacggcagcggaagccattcgcgccctgtcgatgcagatgccgggctttcgccgtcagatgaacgaaggctggtaccagatacgtattgccggttatgacacggcaccggaggcggtgtacgcccgtcttcacgaacagctgggtgagggaacggtcatccacattgtgccgcgactggccggggccggaaagggtggactgcagattgtgctgggggcggcagccatcgtgggctctttcttcacggccggtgcctcgatggcgttatggggtacagccctgagtgccggcggtttttctgccaccacgatgctgttttcactgggggccagcatgatactgggcggtgtggcccagatgctggccccgaaggcaaaaacaccggattaccgcgcaacggataacggcagacagaacacgtacttttcctcgctggataacatgattgcccaggggaacccgatgccggtgccttacggggaaatgctggttggctcccgccgtatatcccaggacatcagcacccgtgatgaaggcgggggcggaaaggtcgtggttatcgggcggcaggggtaa

SEQ ID NO: 34297 - DNA, 699 bp, Escherichia coli
atgcaggatattcgcgaagaaagtctgaacgagtcggttaagtcagagcagtcaccgcgggtggtactctgggaaatcgacctgacggtacagggtggtgagcggtattttttctgtaatgagctgaatgaaaaaggggagccggtcacctggcaggggcgtaagtatgaggcatacccgattgacggcagcggctttgagatgaacggccggggcagcagtgccagaccgtcgctgacggtgtccaatctgttcggtctggtcaccgggatggcggaagacctgcagagtctggtgggggccacggtggtccgccgccgggtgtatgcccgttttctggatgcggtgaatttcgttgcgggcaatccggaggcggacccggagcaggagctgagtgaccgctgggtggtggagcagatgtcgcagctgacagccatgacggcctcgtttgtgctggccacaccgaccgagacggacggggcgctgtttcccggtcgcatcatgctggcgaacacctgtatgtgggattaccggggagatgaatgcgggtataacggtcctgcggtggcggatgagttcgacaaccccaccacggatatccgtaaggacagatgcagcaagtgcatgcgcgggtgtgaactgcgcggaatgtcggctaattttggcggtttcctttccattaataaactttcgcagtaa

SEQ ID NO: 34298 - DNA, 939 bp, Escherichia coli; identical to SEQ ID NO: 11339

SEQ ID NO: 34299 - DNA, 795 bp, Escherichia coli; identical to SEQ ID NO: 11221

SEQ ID NO: 34300 - DNA, 312 bp, Escherichia coli; identical to SEQ ID NO: 9190

SEQ ID NO: 34301 - DNA, 657 bp, Escherichia coli; identical to SEQ ID NO: 8826

SEQ ID NO: 34302 - DNA, 201 bp, Escherichia coli; identical to SEQ ID NO: 9147

SEQ ID NO: 34303 - DNA, 381 bp, Escherichia coli
atgcaggacgaccggctattttcaggatcaattcgtgaaaatatctgtgggtttgcagaagaaacagacgacgaatggatgacagaatgtgccagagcaagtcatattcatgatgtgataatgaaaatgccaatggggtatgaaacgttaataggtgaactgggggaaggtctttccggcggtcaaaaacagcgtatattcattgcccgagctttataccggaaacctggaatattatttatggatgaggctacaagttctcttgatacagaaagtgaacgtttcgttaatgctgccataaaaaaaatgaatatcacccgggtgattattgcacacagagaaactacgttgagaactgttgacaggattatttctatttaa

SEQ ID NO: 34304 - DNA, 1479 bp, Escherichia coli
  misc_feature (1394)..(1403): n is a, c, g, or t
atgatcacccgggctctttcactggagctggatgaacttggtgccctcaaaatgccgtgtattctccactgggatttcagtcacttcgtcgtgctggtcagcgtaaagcgtaaccgttatgtactgcatgatccggccagaggaagaagatatctcggtcgggaggaaatgagccggtattttacgggcattgcacttgaggtctggcccggaggtgaattccggacggaaacccagcaaacccgcataagtctccgttcactgattaacagtatttacggtattaaaagaacactggcgaaaattttctgtctgtcagctgtaattgaagcaatcaatctggtaatgccggtgggaactcagctggttatggatcatgcgattccggcgggggaccgagggctgctgacgcttatttctgctggcctgatgttctttatattgctcagggccgcggtgagtatgctgcgtgcatggtcctcactggttatgagcacgctcatcaatatacagtggcagtcgggtctgtttaaccaccttctcagactgccgctggcattttttgaacgccgtaaattaggtgatatccagtcgcgttttggctcccttgacactttgagggccacctttaccacctgtgtggttggggcaatcatggacagtattatggttgtgggtgtttttgtgatgatgctgttatatggaggatatcttacctggatagttctcggttttaccatggtttacgttcttattcgtctggtgacatacggctattaccggcaaatatcggaagaaactcttgtcaggggggcccgggccagctcctattttatggaaagcctgtatggtattgccacggtaaaaatccagggtatggtcgggatccggggaacacactggcttaacctgaaaatagatgcgatcaattcaggtattaagttaaccaggatggatttgctcttcgggggaataaatacttttgttgccgcctgtgatcaggtggcgattttatggctgggtgcaagccttgtgatcgataatcagatgacaatagggatgtttgtggcatttggttcttttcgtgggcagttttcggatcgggttgcttcgctgaccagttttcttcttcaactgagaataatgagtctgcataatgagcgcattgcagatattgcactacatgaaaaggaagaaaagaaaccggaaattgaaatcgttgctgacatgagcccggtttcactggaaaccactgatttaagctaccggtatgacagccagtcagcacaggtattcagtggtctgaatttgtctgtggctccgggagaaagtgtggctataactggtgcctccggtgccggaaaaaccacattaatgaaagtattatgtctgtnnnnnnnnnngtattatgtggactgtttgaaccagatagtggaaaagtactggttaatggcacggatatacgtcaacttggaataa

SEQ ID NO: 34305 - DNA, 165 bp, Escherichia coli; identical to SEQ ID NO: 29975

SEQ ID NO: 34306 - DNA, 450 bp, Escherichia coli
atgatttcaactgacgataattttaatcataagttcagaacgatatcgaggtatcgcgattttgtaaactccccatcagtactgaatataattgcaactattattgcctataacgaatgtgagggatggttaaagtcattaaaggcacatattgcctctaacattcaattcacccagcagtatctgaatgaaaatattccagaattgatcgtaaggccagctgatggttgctatttttcctggatagattgttctgctattggttatccttttgatgaattctacagtcgattaattcatgaaggcaaagtgggcattatggcggggcatgtctatggaacggagggggagggctaccttcgtctgaacctggcctgcggtcgagaaaaattatatatggggcttacgcgtcttgtgagtgtaattaaaaatattaatcagggagaataa

SEQ ID NO: 34307 - DNA, 687 bp, Escherichia coli
atgaccaaaattaactatcaggcactgcgtgaggcggcagaacgtgcaattccggcaatggaacgcctgttaatgttgccagttgatgatgatctgataagcgaacaggaacttaaagattacggtgtggatattgatgcgctcaacgccttcaaatttctggccggaccagaaaccgtgctggcactgctggatgaacgggaaagaaaccagcaatacataaaacgccgcgaccaggagaacgaggatattgcgctaacggtagggaggcttcgcgttgagctggaaggcaaagacagcaaaatagccaatcttaccgccgaacgcgatgctcttcgtgaaggtgagatgggcgacgctaggcatagcaacacacgggccgcagctgatatctacttccaactggtcgaggagtgcgaaattcctgctggcggatctctggtcgagtacgttgacgatatgcgcgagaagctggaagccgcagagaagcgcattgcagagttagaaagtggttctcaggcacaaaagttagttgaagcaatcattgttgcgatagaaaacgaacaggaaaggctttttgatgaagattacctaatggattcgaaagaatgcattgacgtaattcgtgaagaagtaaagcgatggaatgattcccgtgccgctggcattcgcatcaaaggagagtga

SEQ ID NO: 34308 - DNA, 1362 bp, Escherichia coli; identical to SEQ ID NO: 14646

SEQ ID NO: 34309 - DNA, 231 bp, Escherichia coli
atgacctccattcatgcaggatcagcgaaagaagctatagatgggtttattacccgttgctatgaaaatccacagtgcgcccagctcccctatacatttatgttacgtaaggttctggatagcctggacgtgattgtgagcattgatttagacggaaatgttcgccgtatgaatgacatctatttccgtccaattcatcgaaaccagtattttgaggaaatgaaagcatga

SEQ ID NO: 34310 - DNA, 222 bp, Escherichia coli
atgatatcattaaaagctccgcacaataatttgatgccatatacgcaacaaagcatacttaatacagtaaaaaacaatcagttaccagaggatatcaaaagctccctggtctcctgtgtcgatatattcaaggttttgattaaacaatattatgattatccttatgattgtcgtgatgatttagggaaggtgcgaataagcggggaaattcttctcggctga

SEQ ID NO: 34311 - DNA, 705 bp, Escherichia coli; identical to SEQ ID NO: 5348

SEQ ID NO: 34312 - DNA, 705 bp, Escherichia coli; identical to SEQ ID NO: 8686

SEQ ID NO: 34313 - DNA, 1914 bp, Escherichia coli
atgagcaaagtaaaaatcggtgaattaataaactcacttgttagcgatgttgagtcaatagataactctgaccgtcctcaaggggagaaaacaaaaaaaataaaggctgttgcattaaaatttaaaaatgcattatttaatgacaagcgaaagtttagggggaaaggattagaaaaaagaattacagccaacacattcaatgcctatatgagcagggccagaaaacggtttgatgataaacttcatcatagctttgaaaaaaatatacatcgcctatctgaaaagtatcctttatataatgaggagctattgtcatggctttctctacctgctgccgatattcgccagagaatgtcagctttacaggcaaaattaaaattaattctccctctatcagaagatttatctaatatcagaattggcgataacaaaagtcataacaagttattgaaattatcaaataaatataaagagtggcaattcgccatttctgatttaactagcgataactggaaagataagcgcgattatttatataaattactacagcaaggatctgccttacttgaggagttgaatcagctaaaagttaaccatgagattctctatcatcttcaactaagccctgccgaacgtgcatctatccagcaacgatgggcggacgttctgcacaataaaaaacgtaacgtggtggtcattgattaccctaaatatatgcaagctatttacgatattataaatagccctgctacattaaataatctaaacactcgttcaggtatggctcctttggcatttgcacttgctgcattgtcaggaagacgaatgattgagattatgtatcaaggtacatttactgtttctggtaagtataccgttgattttttaggccaagctaaaaaaagaacttctgatgatataaccagaaaaatatatacattatgcgaagcaaaaacatttgtttatttaataaatgtacttcgctcatgcccagcagcatctgattttgatgatgtcgttaaaggttatggagataacgacacacgctctgaaaacggacgtattaatgccatattagcaaaggcttttaacccgtgggttaaatcatttttcaaagatgaccgccgtgtttataaagatagtcgtgctatttatgcccgtattgcgtatgaaatgtttttccgcgtagatcctcgttggaaaaacgtagatgaagatgttttctttatggaaattttaggccatgacgatgaaaacactcaattacactataagcaattcaagctggccaacttctcaaagacatggaggccaaatactggaaacgaaaataccaggctggaagcattgcagcagcttgatgacgaaatgcctggattcgccagaggagatgccggggttcgtctgcataacacagttaagcagctggtagagcaggacccctctataaaaatcacgaacagcactctaagagcgttcaaatttagcccaacaatgattagtcgatacctagaatttgctgctgatgctctggggcaatttgttggcgaaaacggacaatggcaactgaaaatagatactccagaaatcgttatgcctgacgaagaagaactggaagcaatacctgaactggcggatgaattatcagaggatgacgatctggatgacgacgaaattgagatagaggaagaggaggaggaagaggaagaggaagaggaagagagcgtagaagaacagcaaccgcctgcaccttcttcgcctgtatctaagccggtatttaagccggtgagaaatattggtgatggctcatacgttgttgagtttcattataatggccagaattatgcgtggtccggcagtgcaaacagccccatgtcagcaatgcagttagcatggctgacatatttcggttaa

SEQ ID NO: 34314 - DNA, 774 bp, Escherichia coli
atgagcgcgttagcagtcttttcctttcaggaagagcatcaggtacgtgtagtgatgattaacggcgatccgtggtttgtggcgaatgatatttgcaatgctttaagcatccagaatgtcacacaagctatcgctcgattagatgaagatgagcgatctatgtttaacataggccgtcaaggtcaagccaatatcatcagtgaatcaggtctttacacgctcattctccgctgccgtgacgcggtgaagcaaggcacaacagcttggcggtttcgcaaatgggtaacgaacgaagtcttgccctctattcgcaaaaatggagagtacgtttacatcgagcctgagccaatgcgagcagcggagccgttgaactggaggcagaaagagtatctgcgagggctgattaacgatatagcacaaagttttcagtaccgaaatgcctggattagcggtgtatggttagctttgcgtcgggcgtgtcgtaatccatccccgaaccccataacggttgatgatttgccagcaattacggcagaactgcgccggattttgacggctgctgagtcggcattggggaacatgcgcacgtatgaacgagagttgttgcgtgatgttgttcgtgggggtaggcggagtatgtcgtgtggtgatttacccatcaccgatattaactctgatctggaaaaggcgttacccgcgcattttgaactggcagttcaaaaacttgaacagttatccgcgcagctaaagccagcagaaatcaccaataaatag

SEQ ID NO: 34315 - DNA, 288 bp, Escherichia coli; identical to SEQ ID NO: 20519

SEQ ID NO: 34316 - DNA, 396 bp, Escherichia coli
atggctgttcaatcatacaaatacgaatcccctttggataagggatacattcgtatcaagttaagtcgttctcagcataaggctatttttaaggtaaggaaaattcgcatattggatgcgtatgcgtattactacaacggtgaaaatgttgttgttgaacactttcttgcacgatggtttgtagctctgatttttgtccctctcctgttaattggtacttttgtggatggttttcctagtacatggcgggagataaagaaaggcctattcccgcgtaagtacggcagattttcgcaagatagctggcgagttatacctggtaaacattctgtggatgagcagccgattgttgattactggttgaagcgtatggctgatgctaaaaaagttgattga

SEQ ID NO: 34317 - DNA, 192 bp, Escherichia coli
atgggtaatcagtggatattatctttgtgtctcttgctttgtgtgttccagcaatggttttggttcatagatcgaaagtctcacaaggaaaacatgaaggccaggaaggcgatgtttcgtggtgaacaactcgcgcagacttatcgtatgtggaaacgtttctatcgtgatttttcggtgaacggggagtaa

SEQ ID NO: 34318 - DNA, 711 bp, Escherichia coli
gtggagcttgagtatatacgcagctgcgtctctacggcattggctgatgttcattatcgccagggtggcattctggaggtccagcttgagcagatgcgtctcggtaggtcaggacggtttaactataaaccagtccggtcaatcagtgtgggggatgataactcatacgaagtgtccgttcctgctgagccggttagattccatcaggggaaaacatttaaacaatcatcaatgttgctcactgatattgattttcagagcgccagctggcgcagggctattggtcagttgaataacgaggaatcagcctggctttattattgctacggatgcaagcctgattacaacaatgatgtgattgtttgtcagtggttatggcttgattttctggttgctcattcggggggcggctttaaaaaaatgaaggcctccacgaaaaaagccatgcggaaattgatttattacgcggcacagcaggttaaatcagaacttacgtgtgctgaggcagttgatgagagagaacaggacaggcatctgagttttctactgaatatatctattgatagctggagacaagattataaagaacgctggcttttaattaagtcgcgatgtctgagcttaaatcgaactgcattattaaatgcggcggagaagcgcagtgaaatcatcaaacgccatcgggcaggaagtgccattctgcctttgtaa

SEQ ID NO: 34319 - DNA, 423 bp, Escherichia coli
atggcaaaggcttttacaccagaacagagggaagaactgaataaacaaattgtggaactcgtgcgcctgaatggacgaggaacggttaggcaacttgcggatgaaactggtattagccggtgtgctgttagtcgtttatcaagagagcttgctgccagtggtgatttgtatatctctggctccgggatatttctgtctgcacaagcacgcaaggactggcaaaacgcccgtaaaaaactatcaagagtaaagccgaagaaatcggtagtggttgatccagaccttatctggtcattacctgacggagaaatacgtcgttacgacaggcgcttgaacatgatttgtcacgattgccggaaaagtgaagttatgcagcgtgtgctggctttttatcagggaaatcttcaggaggtagtactgtga

SEQ ID NO: 34320 - DNA, 714 bp, Escherichia coli
gtgagtgaaatcaattatcaggtactgcgtgaagcagctgagagcgccagtaaaattaactggacaggccttgaagatgatttgaacgctgatggatatatgcgcacactgacgcggtatatccaatgccattcaccgattattacgctatctctgttggatgagcgaaatgcattgaacgaacgcatagccgaactggaggctaatttagcggcgatgactgaagaccaccagagagcgattgagtcaattaagcaggctgatgcggctgttaagttggcacatgagaagttttcggcgctggcagcggagaatgcggggcttaaggccttcaaaaccgccgtttatcagcagatgggcgtcggatgtgatgctcctgaattctccattacgacaggtttgagtaacttacgtcgttttgctgacacactccacgccattgaacgtgagttctttaccaaagagctacctgatgaagagcacgaaggcgaaacattcaatgaatgtccacttagctggggaatgagcgtcgaacagtacgtttccgagtttcgcaaatgcctggctgaagtgcgggcgcagggattggagatgtttgcacagaaatgtaactcaaaattcgaacagtcgcttgcatctgatatacgcgataactggaaactactcggtgagcatgcgactgactttgccgcagagcttcgcaaaggagagtga

SEQ ID NO: 34321 - DNA, 450 bp, Escherichia coli
atgaccactattaccagagaaagctcgaagattaaatcattcatcaatggcttcctgagcgacccggcgcacgataatcaatctttagacagtctgcttgctgatgtgtttcgtatcgcactggcatcgttggaagcagagccagttgcgtggcgatatcgctacgtgaaaaaaggcgttacggactctcagggggagtcgtgggttggtgactggaaatatgtaccgacaaaagaggattgcaacgacagaccgaactatgaaattcaggcgttattcacggctcagcctgtgccactgacacaagaaggattgattaaagcagtgcgtttctatgaacaggtaaagcgcgagaatccgccagtcgaaaccggagcatggaaagacgctgttgactgggtgctcaaagaggcttgccaggctgtaaacgttggtactaaaggagattga

SEQ ID NO: 34322 - DNA, 429 bp, Escherichia coli
atgagcacttttaccgacaaagaactgattaaagaaatcaaagagcgcataggcagcttggacgtgcgagacaatattgagcgccgggcttatgaaatagcgttagcctcgctggaagcagaaccggtggtttacatgtgggatagcgaaagaaaagatattgatgcccctgggtattatcggactgagcatttagtgttcgctgagagtagtgttaagcaatggggagggcgagttgttccactttacaccgccccgccagcgacggtagtgccggatgataatcgtattcagttttctgtttcacttcctgcagcgtttggtggagataaatattttattgatggtgtatttcaacctttgagatatgagcgtgactgtgaaagggcggttgtggccgctggcggtgtagttaattgggttaagtaa

SEQ ID NO: 34323 - DNA, 327 bp, Escherichia coli; identical to SEQ ID NO: 14494

SEQ ID NO: 34324 - DNA, 243 bp, Escherichia coli
atggataaaaaggcattgctttttgaaatgatacgaaaacggagcgaaaagagcttttctgatggtggtgatgggtttgttttcgcttcgatgcttgcttttgatgttgggttaaatagcagaattgttaaaaggatgcttgattctgctgtccgtactggacttcttgagaaagttgatcgtggcatagggagagagcataagtatcgggccacacagcagtttacgcagttaattcattga

SEQ ID NO: 34325 - DNA, 204 bp, Escherichia coli
atgtctgaagcagccgtatcaactcttgaacaactcgattcaaatttaagagatattgacgccattctggatctggttagcgtcactctggcttctccagaagccagcctacatattggtgaggtttcacgactcatcaacatgtcgcgagagattgcccagcattgtcagaaaactatcgctgttgagcgttcacatcattga

SEQ ID NO: 34326 - DNA, 288 bp, Escherichia coli
atgaaagcgaaaggcatcccgtttaacgaagtaaaagaaaaactcctcaacactccagaagccgtcaaaggatatgaagaggccgacaaagagctggagatggtcgaaatgttatacgaaatgagggaaagagcaggtttaacgaaatcagctctggctgaacgaatggggttacgaccgtcagccatcagccgcctggaaagcaatcctttaggggcaagtatgaaaactttggctaaatatgctcatgcctgcggcgcagccatcgatattcgcgctgtttattaa

SEQ ID NO: 34327 - DNA, 312 bp, Escherichia coli
atgtttaacgtgataacccaccctgcagcactggatgaactgcttgaactaccagatgatttgcgaggtcgcatggccagattaattgagcgactggagaaagaaggcaacaaactgaagatgccccatagccgtgtaataggtggagggctttttgaactacgagtaggggataaaaacatcgcaagaacgctgtacgcctacgcgactggtaacgaaatttatctattgcatgcatttgtaaaaaagacacagaaaacaccggtgaaggctatcgaaatcgccagaactcgcctgaaggagatgaactga

SEQ ID NO: 34328 - DNA, 222 bp, Escherichia coli
atgaattatcaaggtaacgaaaaaatgcgcggcgacgttgcggagatagctaacgaactgtatgagttgtggcagaaggttgaacgtttcgaaaaggaatatggtttcaacagtaccaacctaacagaccgactggctggtcgcttagttgggactatggggccaaaactggctgagttgaaccgctttatggctgatgttgatttccagtttcaagattga

SEQ ID NO: 34329 - DNA, 1122 bp, Escherichia coli; identical to SEQ ID NO: 14487

SEQ ID NO: 34330 - DNA, 273 bp, Escherichia coli
atgaagatggatgaacgatacagcagtgcatcttatggtagcgccggtcttgctgcgttctttgccagcctgtcattgcaggattggggcttcattatcggtgtcgcgttcagcattatcctcggtgtgcttacataccggctcaataaacgcgagcagatgaagcgcacgaagatattgcaggagatattggataaaactaataccaataatctttctgctacagcgatggttattggagagctggggaagagagcaccgaaggaaatatga

SEQ ID NO: 34331 - DNA, 498 bp, Escherichia coli
atgcagtcatcattacgcaaagctgtcacagctgctattggtggcggggctattgccatagcgtctatgctcatcactggcccaagtggtaacgatggtctggaaggtgtcagttacataccatacaaagatattgttggcgtatggactgtatgttacggacacactggaaaagacatcatgctaggtaaaacgtataccgaagcagaatgcaaagctctcctgaataaagaccttgccactgtcgccagacaaattaacccgtacatcaaagtcgatataccggaaacaacgcgcggcgctctttactcgttcgtttacaacgtgggcgctggtaatttcagaacatcgacgcttcttcgcaaaataaaccagggcgatatcaaaggcgcatgtgatcagctacgtcgctggatatctgctggcggtaagcaatggaaaggcctgatgactcgtcgtgagattgagcgtgaagtctgtttgtggggtcaacaatga

SEQ ID NO: 34332 - DNA, 468 bp, Escherichia coli; identical to SEQ ID NO: 20547

SEQ ID NO: 34333 - DNA, 312 bp, Escherichia coli; identical to SEQ ID NO: 21462

SEQ ID NO: 34334 - DNA, 315 bp, Escherichia coli
atgaaagagttgcaaaaaattaattcaataatggaaagattaagtgctcttgagcgtaagctggacgattgtggaaagctgtgtgttgaaaagcaaaatgagctttaccgggaattttttacaatcgtaagtgagctgatgccaattgttaataactgcctgatgacatccagattttttaatgtcgatgctactacatccagaaaattttctgtgaaaattcaagaaagagtttctggtagtgtgacaagagagatggctgaacagttggtggcaatgagcaataaaacaaaaagaaaaaagcattgcttgtaa

SEQ ID NO: 34335 - DNA, 615 bp, Escherichia coli; identical to SEQ ID NO: 29596

SEQ ID NO: 34336 - DNA, 501 bp, Escherichia coli; identical to SEQ ID NO: 31969

SEQ ID NO: 34337 - DNA, 966 bp, Escherichia coli
atgaaacagcgctctcttctaaaaaatgctccagatattaatcgcattatgagtaataatcatcatgcccctgaacatcagcccgtatcacctatggttggtgatttaaaacgtcaactgagttcattaaccggtaacagcataactttgccagtatgcggacgtaatgttaactttaagttagagacaattcccgcagataaagttgaaatggcaacaatggtatggctaggtaatgaacgcgatcaagatttattaaatgaatcctctctagccgatttaatcccatcttttctaacgtctggacaacaaaatccagctttcgccagaaaagtgtctggagtcgttgaagtcgctgacggctcacgtagaagaaaagcagcgatattaacaggatgtgactatcgcgtcttaataggtgatctcgacgatgaacagatgcattggttatcccaaattggtaacgattataggcctattagtgcatacgaaagaggaaagagatacttacgcaagctaaatgactttgatggtaacgttaaagcattagccgaggctgaaaatatagacagaaatattatcactcgctgtattaatacagctggtctaccaaaagatatattagctatcttcaatcatccaggagaactgtcagctcgtgctggagattctttgtttaaggtctacaaaaaaaacatgactgccatgagcaatgctgctcatcatcttctggcaattaaaaaaaacggcgaggatttagaagcttcacggattatacaaatattatctgactctgttctagttggcgacgaggaaaaaacaaaagacgagaaaaaatatggggaagggatcacggctagatataaaggtaattttgtaactataaaaattgatagccgaaaaatatctaaagaaatactaagcagaattgagttgttactagaggaacaatctactgataattaa

SEQ ID NO: 34338 - DNA, 1167 bp, Escherichia coli; identical to SEQ ID NO: 14593

SEQ ID NO: 34339 - DNA, 966 bp, Escherichia coli; identical to SEQ ID NO: 34337

SEQ ID NO: 34340 - DNA, 207 bp, Escherichia coli; identical to SEQ ID NO: 7021

SEQ ID NO: 34341 - DNA, 135 bp, Escherichia coli; identical to SEQ ID NO: 25140

SEQ ID NO: 34342 - DNA, 282 bp, Escherichia coli
atgaaagatttaacactcaaatttgtcgacagggccgacttttcggcctttatggagagcattggctattatgatgacgagtcgatgcaggatgatattcttattgacgtgataggtaatgtgtacaaagaaaccggagaacttactgaagatggcgagccggcatgtgttaaggaggacggatattttgtaagcgtgcgcatcattaatgatgcaaaaaaatcgtcaatattcgataaatacgcgattgttgttgagcatcaacttcgtggctggatgtga

SEQ ID NO: 34343 - DNA, 1425 bp, Escherichia coli
gtgagcgaaacagcggctgcgaactcagcgaaagcatcggcagcaagccagacggcagctaaagcaagcgaagatgcagccagagagtacgcaagccaggcagcagagccgtataaatatgtcttacagccactgcctgatgtgtggataccgtttaacgattcactggatatgattacgggcttttcgccgtcatataaaaagattgttattggtgatgatgaaataacgatgcctggcgataaggttgtaaagtttaaacgcgcatcaaaagcaacttacattaataaatctggtgtgctgacagaggctaccattgacgagccacgatttgaacgtgatggcctgcttattgaggggcaaagaacgaacttcttcccgaacagtacagacccttcgaagtggaataagtcaacttcactggacgttacagaaacaggcacagatagtttcggttttaattatggccggtttgtcgtacaggattcgattgttggtacaagtaaagcgcataccattatcggactgtattcgagtaccggaggggttgatacttcaggggacgaaaagtatgtaactatatcctgtcgggtaaaaagtgaagttgataatatcgacgttcgtattttatttgaacattatgatggggaggtaaggacatcaataggaacagcaagcctgaaccttaccacccgcataattagcaagacaggtcagacaagccgtgttacagcaaggtctgttaaggatgatgcaactggctggatattttttgaggctacattaaaagcagatacaacagaaaatacggttggtggtttcgtccagtattctccggatacaggtcagatggtggcatcaggggattgtctcgatgtaaccactccccagattgaggctggtacaggcgcatcatcttttattgttacgggggctgcaccggtaacgcgggcaagcgatatagttacagtcccaattaagaataatctttataatctaccttttacggttctttgtgaggtacataagaactggtataaaacgccaaatgcagcaccgcgtgtttttgataccggcggttatcaaaccggagcggctattattcttggcttcggtcgttcaacagattacgacggatttccttattgcgatattggtggggctaacaggcggataaacgaaaatgcatcgcttgaaaaaatggttatggggatgcgtgtaaagtcagatcagtctacatgcgcagtaagtaacgggcgtatatccagcgaaacaaaaaccacatggtcctgtattcagaactccgcaattatccgtattggaggccagactacagccggtttacgccatttatttggtcatgtcaggaatttcagaatatggcacaaagcattgactgatgctcaggtgggggagttaatctaa

SEQ ID NO: 34344 - DNA, 792 bp, Escherichia coli; identical to SEQ ID NO: 17658

SEQ ID NO: 34345 - DNA, 282 bp, Escherichia coli; identical to SEQ ID NO: 34342

SEQ ID NO: 34346 - DNA, 1425 bp, Escherichia coli
gtgagcgaaacagcggctgcgaactcagcgaaagcatcggcagcaagccagacggcagctaaagcaagcgaagatgcagccagagagtacgcaagccaggcagcagagccgtataaatatgtcttacagccactgcctgatgtgtggataccgtttaacgattcactggatatgattacgggcttttcgccgtcatataaaaagattgttattggtgacgacgaaataacgatgcctggtgacaaggtggttaagtttaaacgcgcatcaaaagcaacttacattaataaatctggtgtgctgacagaggctaccattgacgagccacgatttgaacgtgatggcctgcttattgaggggcaaagaacgaacttcttcccgaacagtacagacccttcgaagtggaataagtcaacttcactggacgttacagaaacaggcacagatagtttcggttttaattatggccggtttgtcgtacaggattcgattgttggtacaagtaaagcgcataccattatcggactgtattcgagtaccggaggggttgatacttcaggggacgaaaagtatgtaactatatcctgtcgggtaaaaagtgaagttgataatatcgacgttcgtattttatttgaacattatgatggggaggtaaggacatcaataggaacagcaagcctgaaccttaccacccgcataattagcaagacaggtcagacaagccgtgttacagcaaggtctgttaaggatgatgcaactggctggatattttttgaggctacattaaaagcagatacaacagaaaatacggttggtggtttcgtccagtattctccggatacaggtcagatggtggcatcaggggattgtctcgatgtaaccactccccagattgaggctggtacaggcgcatcatcttttattgttacgggggctgcaccggtaacgcgggcaagcgatatagttacagtcccaattaagaataatctttataatctaccttttacggttctttgtgaggtacataagaactggtataaaacgccaaatgcagcaccgcgtgtttttgataccggcggttatcaaaccggagcggctattattcttggcttcggtcgttcaacagattacgacggatttccttattgcgatattggtggggctaacaggcggataaacgaaaatgcatcgcttgaaaaaatggttatggggatgcgtgtaaagtcagatcagtctacatgcgcagtaagtaacgggcgtatatccagcgaaacaaaaaccacatggtcctgtattcagaactccgcaattatccgtattggaggccagactacagccggtttacgccatttatttggtcatgtcaggaatttcagaatatggcacaaagcattgactgatgctcaggtgggggagttaatctaa

SEQ ID NO: 34347 - DNA, 546 bp, Escherichia coli
atggaagtcaacaaaaagcagctggctgacattttcggtgcgagtatccgtaccattcagaactggcaggaacagggaatgcccgttctgcgaggcggtggcaagggtaatgaggtgctttatgactctgccgccgttataaaatggtatgccgaaagggatgctgaaattgagaacgaaaagctgcgccgggaagttgaagaactgcggcaggccagcgagacagatctccagccagggactattgagtacgaacgccaccgacttacgcgtgcacaggccgacgcacaggagctgaaaaatgccagagactccgctgaagtggtggaaaccgcattctgtactttcgtgctgtcgcggatagcaagggaaatatccagtattctcgacggtattcctctgtcggtgcagcgacgttttcctgagctggaaaaccgacatgttgatttcctgaaacgggatatcatcaaagccatgaacaaagcagccgcgctggatgaactgataccggggttgctgagtgaatatatcgaacagtcaggttga

SEQ ID NO: 34348 - DNA, 546 bp, Escherichia coli
atggaagtcaacaaaaagcagctggctgacattttcggtgcgagtatccgtaccattcagaactggcaggaacagggaatgcccgttctgcgaggcggtggcaagggtaatgaggtgctttatgactctgccgccgtcataaaatggtatgccgaaagggatgctgaaattgagaacgaaaagctgcgccgggaagttgaagaactgcggcaggccagcgagacagatctccagccagggactattgagtacgaacgccatcgacttacgcgtgcgcaggccgacgcacaggagctgaaaaatgccagagactccgctgaagtggtggaaaccgcattctgtactttcgtgctgtcgcgtatagcaagggaaatatccagtattctcgacggtattcctctgtcggtgcagcggcgttttccggaactggaaaaccgacatgttgatttcctgaaacgggatatcatcaaagccatgaacaaagcagccgcgctggatgaactgataccggggttgctgagtgaatatatcgaacagtcaggttga

SEQ ID NO: 34349 - DNA, 189 bp, Escherichia coli
atgaggcgcttcgcaggcgcatgtcgtttcgttttcaatcgtgctctggcgcttcagaatgagaatcatgaggccggtaataaatacatcccttacgggaaaatggcttcctggctggttgagtggaaaactcactggaactgcaatggcttaaagattcgccctcacagccattgcaacagtcactga

SEQ ID NO: 34350 - DNA, 1026 bp, Escherichia coli
atgtctgtatatacaactgcagaattactggcatcgacccagcatcactttaagttcgatccgctgtttctgcgcctgtttttccgtgaaacctatcctttcaccacggaaaaagtctatctctcacaaattccgggactggtaaacatggcgctgtacgtttcgccgattgtttccggtgaggttatccgatcccgtggcggctccacctctgaatttacgccgggttatgtcaaacccaagcatgaggtgaatccgcagatgaccctgcgtcgcctgccggatgaagatccgcagaacctggctgacccggcttaccgtcgtcgccgtattattcggcagaatatgctggatgaaaatctggcgattgcccaggtcgaagagatgcaggcagtttctgccgtgcttaagggcaaatacaccatgaccggtgaagccttcgatccggttgaggtggatatgggccgcagtgcggcgaataacatcacgcagtccggcggcacggagtggagcaagcgtgacaagtccacgtatgacccgaccgacgatatcgaagcctacgcgctgaacgccagcggtgtggtgaatatcatcgtgtttgatccgaaaggctgggcgctgttccgttccttcaaggccgtcagggagaagctggatacccgtcgcggctctcattccgagctggagacagcggtaaaagacctgggcaaagcggtgtcttataagggaatgtatggcgatgtggccatcgtcgtgtattccggacagtacgtggaaaacggcgtcaaaaagaacttcctgccggacaacacgatggtgctggggaacactcaggcacgcggtctgcgcacctatggttgcattcaggatgcggacgcacagcgcgaaggcattaacgcctctgcccgttacccgaaaaactgggtgaccaccggcgacccggcgcgtgagttcaccatgattcagtcagcaccgctgatgctgctggctgaccctgatgagttcgtgtctgtacaactggcgtaa

SEQ ID NO: 34351 - DNA, 699 bp, Escherichia coli
atgcaggatatccggcaggaaacactgaatgaatgcacccgtgcggagcagtcggccagcgtggtgctctgggaaatcgacctgacagaggtcggtggagaacgttattttttctgtaatgagcagaacgaaaaaggtgagccggtcacctggcaggggcgacagtatcagccgtatcccattcaggggagtggttttgaactgaatggcaaaggcaccagtacgcgccccacgctgacggtttctaacctgtacggtatggtcaccgggatggtggaagatctgcagagtctggtcggcggaacggtggtcaggcgtaaggtttacgcccgttttctggatgcggtgaatttcgtcaacggaaacagcgatgccgatccggagcaggaggtgatcagccgctggcgcgtcgagcagtgcagcgaactgagcgcggtcagtgcctcctttgtgttgtccacgccgacggaaacggatggtgctgtttttccggggcgcatcatgctggccaacacctgcacctggacctatcgcggtgatgagtgcggttatagcggtccggcggtcgcggatgaatatgaccagccgacgtccgatatcacgaaggataaatgcagcaaatgcctgagcggctgtaagtttcgcaataacgtcggcaactttggcggcttcctttccattaacaaactttcgcagtaa

SEQ ID NO: 34352 - DNA, 447 bp, Escherichia coli
gtggtgaatatcatcgtgtttgatccgaaaggctgggcgctgttccgttccttcaaagccgtcaaggagaagctggatacccgtcgcggctctaattccgagctggagacagcggtaaaagacctgggcgaagcggtgtcctataaggggatgtatggcgatacggcgatcgtcgtgtattccggacagtacgtggaaaaagacgtcaaaaagaacttcctgccggacaacacgatggtgctggggaacactcaggcacgcggtctgcgcacctatggctgcattcaggatgcggacgcacagcgcgaaggcattaacgcctctgcccgctacccgaaaaactgggtgaccaccggcgatccggcgcgtgagttcaccatgattcagtctgcaccgctgatgctgctggctgaccctgatgcgttcgtgtccgtacaactggcgtaa

SEQ ID NO: 34353 - DNA, 207 bp, Escherichia coli
atgctgatagaagccgggctgagtacctacgaaaaagagtgtgcaaaacgcggcgatgactatcaggaaatttttgcccagcaggtccgtgaaacgatggagcgtcgtgcagccggtcttaaaccacccgcctgggcggctgcggcatttgaatccgggctgcgacaatcaacagaggaggagaagagtgacagcagagctgcgtaa

SEQ ID NO: 34354 - DNA, 354 bp, Escherichia coli; identical to SEQ ID NO: 24141

SEQ ID NO: 34355 - DNA, 324 bp, Escherichia coli; identical to SEQ ID NO: 26247

SEQ ID NO: 34356 - DNA, 324 bp, Escherichia coli; identical to SEQ ID NO: 26248

SEQ ID NO: 34357 - DNA, 207 bp, Escherichia coli
atgctgatagaagccggactgagcacctacgagaaagagtgcgcgaaacgcggtgacgactatcaggaaatttttgcccagcaggtccgtgaaacgatggagcgccgcgcagccggtcttaaaccgcccgcctgggcggcagcgacatttgaatccggactgcgacaatcaacagaggaggagaagagtgacagcagagctgcgtaa

SEQ ID NO: 34358 - DNA, 573 bp, Escherichia coli
atgcttgtacatagcattctctgcatgtttactcctttgccaggtgtgtcacaacatgctttggcatcctccacgcataaacgacgcggatttcttctacgttcaggttgtagccagaatcattttggtgatttcctgcttcaacgggcagccaggcttcactctctatcaactggtgagaacggcttgcccggcagcttcgatgtgtgctggagggagaataaaagtctaagatgtgcgatagagggaagtcgcattgaattatgtgttgtggagggatcgctggtatcaaatatgtgcgctgaagggaaagatagaagattagatgtgcgctggagggaaacttggatggttagatgtgtgctggagggaatgtctgggcaaactgcgtggcgcaaccctccagcgcacaccaaaaacaggaaaatgggcaggcattcccggcagcgcacatttttcaaatgcagctgccctccagcacacacttattcgggaagtttcagctttggattgcgagaatggacgattacaaaactttcccggcctttcttctcaattgaacagtcgagatag

SEQ ID NO: 34359 - DNA, 552 bp, Escherichia coli
atgagcaagattgactatcaggcactgcgtgaaaaggcagagaaagcaacgtgtggtgtgtggtcgctcgaatatggagagggccgatttgatggtgatgatgcactaattcatcgcgaggctgctgggtatattcccatttgcagaattgaaggagcgcatccagaaagcggtttcgatgaagatttccaaatggaacagcaggccaatgctgaattcatcgccgcagccagtccagctactgtgctggcgctgctggatgaacgggaaagaaaccagcaatacatcaaacgccgcgaccaggagaacgaggatattgcgctaacggtagggaagctgcgcgttgagcttgaggcagaaaaacagcgggcaaaggatctgtttatggaaaatgctcggcttaagtcaggtatagccggtctgatacacctcggtattcgatatgcagatgttgatgtcatgaaaattgctggagatgcccagctttctaccccatgcactgacagcatcataaacagcattgcaacaggcattcgcatcaaaggagagtga

SEQ ID NO: 34360 - DNA, 273 bp, Escherichia coli
atggacgaatcaagaaagcagtttgaagagtggtttaaaaccaaatatcacgtttcaagtgacgtgatgaagattatgcacatcaaggtcgagattgcatgggaggcgtggcaggcatcgcgagcagctattgaaataaccgcgccaaagtttatcgacagcagagaagcattatccaaagggtttactgttgattattccaatggcttcggtgatgcaatggaggcttatgaggaaaacatccgcgctgctggaatcaaagtgaaggagtga

SEQ ID NO: 34361 - DNA, 1452 bp, Escherichia coli
atgtcagacataaaaaatatactaaaatgcatgtactttgataaaaatagatactcaaactttggctccgtaattaaaagtctagagataaatggatttcgaggaataaaaaaactaacattaaatataaattttccggtaactgcaatatcagggctaaacggcgctgggaaaagcactcttgggcagttagcaatatgcgcatataaaaaaccagttacagcccgtgaatataagagattatatattaaagattttttccctgtatctaaagccgatccagcccctttcgataatgacgccagtgtcatttataaatatgaaacaaatgattcaacgaaaacacaagatgtgactgtcactcgcataaagtcttcttggtctggatataaaagacaaccagaaagacactgtttttacattggttttactgtctatattccaaaagtagaacgtagagatataagtgtttatggcggtaaagactttgatttaacagagagaagaagcgtcgaccattcagtaatattgaagatggcaaaaataataggtcatccatatgatgatatcgcattccaaggaatttctcatagagcacgtcgttcagaaattggtattgttgaaagacttgggtattcttattctgaaaataacatggggtttggcgaaggaagagttctttatacggttgatatgcttgaaacagctccagagcaaagtcttttcgtactagaagaaccagaaacatctcttcatgaaagcgcacagtatgaatttgcaaaatatttaatggaagtatgtcaacgtagaaaacatcaaataatattatcaacacactcaagtgtgatattaaatgctttacctcctgatgcacgaaaattacttattagagatcagactggtgtctatatcaaagatggaatttcaacaactcatgtgagatcaatactgtctgatgggcagtttaaagggctgcatatttgcgtagaagaccagtttgcaaaagttttacttagtgaagtaattagagcaaagcggagagacattcttaaatccattcaaatcactgatattggagataaagatgcagtccgacaagcagtcgaggtattcaagaaagcaggccttaatgttattgccgtaagagatgcagatgttggagaaaacattaaagatgatttattttctttccctggcaataggccaccagaagtagaagtatttcaacatgaggaagtaaaaaaattcctctacaaggagtatcatattgattttgattggttaataaaaaaggaagggattagtgatcatcacaattacactcaagcaattgctaaagaagcagaatgtgaggaggaagtaattagaactttagcaataaaaaaatatattgaaattattgatgagaaatttgacccacttattacaaatatagtaagcaaaataaaataa

SEQ ID NO: 34362 - DNA, 444 bp, Escherichia coli
atgttagatatcagaatgtcacgaccatctgaagcatcagagatcatacaaatctggaagagttcagtggatgctacccacgactttcttacaggtcatgaccgacaagaaatcgaaaaagaagttatcggctttttctcagaaactcctgtatgggttgcaacaaatcaggatgaccaaccgctaggatttatgtttttgcatgaggggcatctggaggcactttttgtagcaggctctgctcgcggacttggcgtcggaaaacgtttgatctctcatgcactggcgctgcatccagagctaagcgttgatgtaaatgaacaaaaccagcaggctgtagggttttatcagcatatgggttttcaggtatcagggcgttccgagctggataatcagggaaggccataccccttgttgcatctgagaatggccaataacatgtaa

SEQ ID NO: 34363 - DNA, 585 bp, Escherichia coli
atggataaaaaatttaaaaatcagatagtagatagcgatattgcacttttattgcttaaacacaggaaggctcgcaatttgactgtaacagagcttgctcaacgatcgggcgtcagtcaggccatgattagtaagattgaacgaggcatctccagccctagtgcaactatccttagccgcctggccaacgccatgaatgtaacgctatctaaactctttgcagagcttgagcaacatcagaattccctggttcgtgttgctcatcagcaacagcactggacggatgagcaatcaggcatcacccgttggtctttgtctcctgcgggggcatgcccggaactgatcaaagttgaaatccctgcaatgggtgagctgacgatacccgcctccgcaaatgagcatctttccgggcaaacgctttggatgatgagtggcagccttgattttcgagtcaaaaatcagacccatcatttacgtgccggtgactgtcttgcccttacctttgcaagcgagtaccaaatgagcaatccagatagtgagcagagctgttcttacatcgtggcttttagccaaaaaaatcaatga

SEQ ID NO: 34364 - DNA, 138 bp, Escherichia coli
atgtattacttaatcgacatcggctacgcacgggttgccgcgatgcagcggatggaagctgtctgggaaaagaaagctccgcttgctaatattagtacatccgatgaaaaatcgtgtgtgaaagttgcagattcgtaa

SEQ ID NO: 34365 - DNA, 1023 bp, Escherichia coli
atggctgtttctacagaagagcattacaggcatcaaaggcttagagaacaaggtttaactgatgctgagataaaagatattgatgcaaaagaataccgtaaatcatctttggatgagaagtcatcatatatatatcagaatatacagtcttgtttagaaatatcagacatctatgttgagaatccggaagaggaaaatgttgtttgtcggtactcaggattggctaatcaattaattaaattcacttcattaatgaagcgtcctggtataataactccatcaaatgttgaacgttgcatgcagatagcatatacagctaagttgaactctggttgtatatccaggcaggtaggcgctgcagtatctgatagttcattttcaattaagtctattggttggaatgatgtaccaagtggtcaagttccttgctctttaagggataggtttgatttgtctgaggggattgatgatattgcttactctgaattcgaaaagaacgaaaatagtttcattcgaaaaatagatagcactaagattatttttttagatgttaaaaataaaggaatgagagctccattttgttttaaaacagaatggaataatatccttgatgataaatacaaagaagatctacgggtcgaacataagttaaatgatgatgagtttgctattattgacaaaataaaatctaacgctaatcaagtttttacaagatcacttcatgctgaagagaatgctttcttacaaatatctaagtatggtggcgttggtatacagaatggttttttgttcacaacagcaagcccttgtgaattatgttctaaaaaagcgtatcaattagggatcaaacaaatatattacatagatccataccctggtatagcaatgaggaatattttaaacgcagggagcaataaaccattgcttaagcttttcaatggtgcaataggtaaggcattccataatttttacacgccaagaatggcttataaagatgagctttcagcaagatctagggggtga

SEQ ID NO: 34366 - DNA, 1638 bp, Escherichia coli
atgcggaagagtatggggaagacgccgatgagtgaactgttgcaaaagctgacccgtagctgttttgccgaccgggatgcactggatgtggcgcgaacacaggcggcgctgtggcagacatggctgctgccggtgacggcagacacgccggtcggggaagaccccggctaccacgacgatttcctgcgtatccgcgacgaaatgaacaaactgtccggtgccgataccggccttatctgccagcttgccgaatccctgctgctgacgcaggccaaagacgtgcgcatcgccacttactacatctgggcgcgactgcaccgcgacggtgagcgcggactggctgaaggactggcgctgttagccgggctggtggaacgcttcggtacgcaactgctgccctcgcgaccggcaagccgaaaaatggcgctggagtggctggcgggggaaaagatgctcgacagccttgcccgctacccggaggtggcaaaagaggattttgcgaacattgttgccgctcttaatcaactgtcggtttccttcactgcatggcccgaagaccagcattccccctccctgatgccgctgattaacgcgctggaatcacgtctggcgcagtcgggcgggatgaacgcggtggtgccgcaaaacagcagcggcgttccggcaccgtcttccccggtggatgcgccgcaggtacagaccatcacctccgggcgcgacctactcgaccaggcgaaagtgctggcccgttatctgaacgaacagccgcagggctggctttcagcacaccggctgatgaaaaccctgcgctgggacacggtgcatgaactgccgccggacgtggacggcaaaacccggctggccccgccgcgcaccgaatcacgcaaccagcttaagcggctgtatgcccagcagaactggacggaactgctggagcaggccgacctgatgttcagcaccggtgtcagccatttctggctggatatccagtggtatctgcatcaggcgctggcgaaggcgggcgcaccgtgggacagatggacagcggttatccgtcaggacctggcgctgctgctggagcgcctgccggggctggaaaatctggcatggaacgacggcacgccgtttgccgatgaggtgacgcgcaactggatagcgcagcaggtcatgatgcgggaagacggcgcatggcttgcggggaaagccgctgtgccgacagacgacgccacaaatgacgtactggcgctggagccggaagcactggagatggctgacagtcagggcgtggaagcggcgctgggctggatacagacccgtccgggcatcaccacggcacgacagcgcctgttattgcgactgctgatggcacgggtggcggaacagtacggtaaaaacgagatggcgctcctgctgctggaagaactggataccgccgcacagggaataacgctgacacagtgggagccagagctgctgtttgaagtaaaagcccgacaactgaaactgctgcgtctgcgggcgcaccgctatgcggataaagccctgctgaaccgaaaaatggaaatcctgctgggaacgctggtggcaatcgatccggtacgggcagcggtattgtgtgatacgcaacataaggactga

SEQ ID NO: 34367 - DNA, 606 bp, Escherichia coli
atgggaacaggctactttctggtcaggggggacaaaaccacctgcggcggcaaaattattgaaggcgcggacgaccatacgatcatgggtattccgcaggcacgggatatggaccgggtcacctgcggcagatatccgggaatgtttattattgtgggtggcgttcctgaaacagatattcacggcaggctgatggcggggacgctggacagtcagagcagttgcccgtgtaaagcacggtttattgcgtcaatgatggatgatacctatgagacggatgacggggggaacgagccggaacaacatgcgcagtcggcgaaaaaggatctgacttctggttctgattcatcctctgatgatgtaaaactggattacagaattaaattatcaggtaataagatactgacgccactgaatatacctgattataaagaaatgattagcggtggtagtacgaagaatacagaaaaaatagattttaccatcacaaataaaggcgatgagactgaagcgctttctctggaagtgcttgatggtaatgaagtgatttatagtgaacggcagaccggtaaatattgtgataagggagagcatgcctggcaatga

SEQ ID NO: 34368 - DNA, 978 bp, Escherichia coli
atggctgctaacaataccaaaatcaaggcactgcattacagacatgcagttatgcttcctaaaaaagatgcacttttaacatcagacttacaaagcagattatctgagattgtgactcataagtttcgtactgttcaagatagagttcattttctagaaacgaaggactctgatcctgatgtggcaacgcatgctcatatggttatgtcaaattcatttgaacgtaacggaatgttctttgcagaaattgtgtacatagagcctggcggaagtattccagtatttgatgttacggaatataaaaatccgaaattggaatatgaggctttcagaattgcgggtggcgatgttaaagaatatttggatagttttgcctatattggtgttgttaagaatcatgtcgtgattttacaaagtagagcaataagaataaaagacattgaaaattacattaattttattttaaaggaaaatctacgagtagatgttgaaaactttattgttttgcaggcaaataatttaagcattagtaatgaattcttgagaagaaataacattaaaaatgttagtttaaaactgccgttgacatataatggtaatggcgttgacgatgctgctagtgagttattgcgttctttaattggtgagcatcgtgttgaagaattgcgtaaaaacagtacccctgatacagaaataaaggaacaccttacaattgatatttctattggttataaatatcgagccagtgataatgagcaagatttacttcggaagataaccgaggggctaattgataacagggatgaaatgttgactattgagttaaaaggtgcagggattttgaaaaatgatgagattcaaataaaagacaatgttagcattgaatatagtaagggtttaccagttgttgatagtgtttgtgatgaaatggttgaatggttgttaaggttgttggatgctggggtgataaatccatga

SEQ ID NO: 34369 - DNA, 684 bp, Escherichia coli
atgattaataaaagaatagagcgttttattatacagttgagcttatctatcttgatagggggacttttcgcttctgttttttatgggatttacaatcagactggtatattgttagaaattggttctcttatatctaaagcattatctttaattggtgctattttaattggtttgctggtaaaaagatttgtggattatcaggataagattaaagatattgagttaaacagtaaggctccaagtaatgtggtggaattatttgaagctcaaaaagatgaatattttaaattgagttatcgtaactctattaattttatttatcttgtggtggggctttttatggttcttggatgtttgattgtgcctttagataagataaaagaaaatgttgatattggttacttcatagttgtggatgcagggatgaccgtttccacggtttgttttcttttgtgtgtttgttatgaaataattgtaaagactgaagaagcacgaaaggcgaaactccattttgaaaaaataaaagaaatagaggccgaaagacaatctttgattgaaaaactaaacaagaagattagagagcaaagagatgcagacaagaaagatgttgaaaaatttaggggtaataaagattttgatttgagagggtatttggataccttcaaaaaagattcttcaaattaa

SEQ ID NO: 34370 - DNA, 1308 bp, Escherichia coli
atgagcgaatatgttgagttagcatacgctgccgctacaagcaggctttgtctatttaccgggactggcttttcaaaggcagtctcgaacggtgaagctccaacgtggaaggaactattaaaaaaagtttgcagcaaagttcacaatgccaaaaagttggaagacacgttattccctgatgataaaccaccagcactgagtcttgaagaagccgcacaaatactatctttgaagctcaatattgagggtaagtcgatttatgatgaaattgttgacatcatatctccaattcaacttggagaagacatatcaaatataaaagattttttccaaaaaaactcattccgtgtcattacaacaaattatgacaagttggctgaatgcttggttggagatgaaagtgtgcagtctatcacgcccggcctgccaattccaaagtatccatccaaggtgaaaatatatcatgttcatggttctattgattcgccaaaaaatatgattgtcacttcagatgattacttcagatttataaattccgatacttatttttcacgaaaacttagtacgatgctgcatgaaaatacagttgcgatattagggtattctttaagcgacacaaatcttaaagcaattataaatgactataaaaaattttcgaaaaataatgccctgtgctctaatatctttttgatatctcgcaacaaagtaagtcaagatatgaaggattattacttctattgctttggtataagggtaattgacaatacagaaatagattgtttctttagtcgattaagttataagatttctctcattaaagacatcattgaaagagcgcgcgaaaatatcagaaaagttgtttcgggggcttacacttataaaaatgaatatcttaaattagaggattcattttatcaaattatatcatcaattatatcggaaggtttagattggaatgatgataaagtcgtttctcttttcgaaaggataatagaaaaaaagagaaagttaacaaggaataacggagcgtgggagcaatatgaacagttggcaaaatggcttatatattttggaagcatcatagaggttagcaatactaagtatgaaaaaacatatttagacgcagttgaatactcgatgggtcatatgagtaaagaaaggaattggggagtttcttggcatgcttacagagcttgggaaacacgatggcctgcaataattgcctcaaatagattaatgataaaaaaccacattgaaacattaggcaccttgaaggacgccaaccttatagttaagaatatagtgtaa

SEQ ID NO: 34371 - DNA, 234 bp, Escherichia coli
atgagcaacctactaccatgtccattctgtggcggtgcagcgcacgttgccagcgaagcagatcaccctgaatatggctctggcggtcgattctatttcgttcgatgcggtacgtgtcgcgctcaatctggtagcaaatatgcagcgcctggaaatgactgcgcgattttttattcagaggttagagcagagtggaatcagcgagcaaaggaggcaaccagtgagcaagattga

SEQ ID NO: 34372 - DNA, 222 bp, Escherichia coli; identical to SEQ ID NO: 27204

SEQ ID NO: 34373 - DNA, 1074 bp, Escherichia coli; identical to SEQ ID NO: 30063

SEQ ID NO: 34374 - DNA, 357 bp, Escherichia coli; identical to SEQ ID NO: 6160

SEQ ID NO: 34375 - DNA, 228 bp, Escherichia coli
atgaaaacatggttaatggggttcagcgagttcctgttgcgctataaacttgtctggagtgaaacatggaaaatccggaagcaattagatactccggtacgtgaaaaggacgaaaatgaattcttacccgctcatctggaattaaaacgccggtatccagacggccgcgtctggttgcttattttattatggggtttctggttattgctgtcattttatctgttttag

SEQ ID NO: 34376 - DNA, 234 bp, Escherichia coli; identical to SEQ ID NO: 13498

SEQ ID NO: 34377 - DNA, 240 bp, Escherichia coli
atggctgatttccagaatgctatgtgtaatggtgaaatgctgaagtgcctgttcaagctgttttccggccagtgcggtgtcggggcgcagcatttcactgccagccagtattatttcgccatcaataaactgatttgccagcagcgcatgttcgggatcgttggtgatcagacgcagttttttcacttcgctgagcaatggaatgatcttacggcagattgtcccatgtccaagaaatag

SEQ ID NO: 34378 - DNA, 405 bp, Escherichia coli
gtggcgtggcgtggcgaagcgaagagtcatttcaacctgtacatcttttgctgtcagtttttgcaccagcgcgccgggaatactgtatgcctccagcgtgaagtcgactttcttaccgtcctgccagacggtcaggcggtcgaaattgctggccataaagttgatgtactcttccgtcagcagcgcaacgcccggaaaaccgcccatggtattcgggccgtctggcaacagatgaccatgccaggctccgagatcgaaaaacggattaaaacgctggtgatcgtcgtaatcgtaatccttcatgtactgcggtgcgccagtacggttaatcacgtttttataattgtcagcattagcggcatgggcggaaaagctcatcagcagagcacaggctactggcgttaa

SEQ ID NO: 34379 - DNA, 1152 bp, Escherichia coli
atgaatgtagttgatttattctctggagttggcggtttaagcttaggggcaactcgagccggtttcaacttggttggagctgttgaactggataaacatgctattttttcacatgagttaaacttcccaaaatcaacacatttgcatcgggatgtctgctcgcttacagcaaaagatattttgtctgcatgtgctgtaaaggacattgattgcgttattggtggtccaccttgccaaggatttagcaccattggaaaaaggaatgccaatgatacaagaaatgaattgtatattcatttttttaggttggtaagtgagttatctccaatttgttttttggcagagaatgttccaggaattatgggtgagaaatataatccagtaagagaagaagcattttctttagttagagatggctattgtttattacatccaataagggttaatgcttcaaattatggagcacctacgacacggacacgaatatttttcatgggttttaaaagaggttttattaatcaattaaaagaatctgatttttttcctaaaaatataatagagcagactcttgtcaaagatgcactctacggattaccgcgaactataagaaaagagtggcagacagaggagcaaggctggcgttcagtaaaaatggataaagatggttactattatgagcgactttggggacatataccaaatggtgtaggtgatgcagaatccattcaaaatttaaagaaaggattggtatctggctttttaggtacagctcattcggaggaagtgctcaggagatatagacaactttcattcggtgaaactgataagatttcgagatcacaacgactcaatcctaacggtttttgtccaactttgagagcaggtacaggaagtgacaaggggagttatcaggccgttaggccaattcaccctactcaagctagggtgataactcctcgtgaagcagctaggttacaagggtttcctgattggttccgttttcatcctacaaagtggcacagttttagacagataggtaatagcgttagtccgcttgtggctgaggctatgctattacctttatacgattactgtttaaaagttaaaaaagaatctttgaataccatggaacgaccttgtagtattcgataa

SEQ ID NO: 34380 - DNA, 993 bp, Escherichia coli
atgagtactggcggaagcatcccatatcatttgcggcaaaacaaagccattgaaaggaatctatttatagaatccctaagaaggttaaacaattatacaaacatatccgaatatgtatatataggattcggggggcctttcctcgaagatttcaaacaaattcataatttgttaaaagtgactaaaatgatatctatcgaaggagataaaaatgtccattgccgacaacagtttaacaaaccattatcttgcataaatttgggtgataccccagaaatgagcggagacttcatcaatcgctataactttgacgataaaacgatcatatggttagattatgcaacgccttcagacttaaatgctcagttaaatgaaatagttaatttggttacaaagctaaaacccaaagacatttttaagatcactttaaatgcaaaccctgaagccttgggaaaaaacccgagcgaacgagatccaagagcatatagatttcaaaagataaacgatattttgactcaagattttttaccaccgaatgcagtagtcgaagatgtcggatttaaaaaataccctatgctcctagttaatgctatgagacgcgcaatagggcatggattaaaaggtcgaaatgacataagaatacatccattaacttctttcgtttataaagatggccaacagatggttactttaacagctatcgttcttgaaaacactgatacagaagaagctaaatttattgataattccagaatcaagaattggccattttatgatgggaagtggagtaatcctaaaaatataaacgtccctgctatgtctttaaaagaaaggatacatattgaatctttattacccgaagcttcagtagaaaacatccatgaaactctagggttttacattggctccactccttctggagccaactccgatctaagtaattttatcgaatactacaaggtcgttccatggtattcaaagattcttttttaa

SEQ ID NO: 34381 - DNA, 1425 bp, Escherichia coli
atggtttcgtcaaacgtcaaaatagcagcatttccagcaaaaagattctttgttgagatgctcacccgagatattgagttgtctgactcaattctagatttactagataactgcctagatggtgtattaagaaaaaacaatttcactccagagcaaaccttcggtaaatcagacgtttacaagggttactatgctcatattgaatttgatgagaatagtttcagaataactgataattgcggaggtattccagcaaaacttgcggaaagctatgcgtttaggttgggtagacctgcagaacgtgaggcggatgatctcccgacaattggtgtatatggtatcggaatgaaacgagcgattttcaaaatggggacatctgctcagattttaagcaaaactgaaaacgaacaattttcagttaccatttctcctgaatggatggctgatgatgaaaactggtctttggagttagagcgaaataatgttgacttaaacgaaacaggcgtcagcatccaaattaataatttaaggaaagatattaaagcatccctatcaaaggatcgtggctttgaagaagttttgattaatatcatagcaaatcattatagtttaatcattaaaaaagggtttgaggttaaagtaaatggatgtattgttaagccaaatagcaccaatttaatatttgatgaagaagccattaaaggcaataccgacggcattgctccttatgtatataaaaataattcaaatggagtttcaattaaagttgcagttggattttatcgtaacttgcctagtgaggaagaagaagagaatttattatcaggccgttccacaacagaaaaagctggttggacaattatatgcaatgatcgtgtagtcctacatgcggataaaaccaagcttacaggttggggagaagctggagttccacaatatcatactcaattcatcggaatttctggtgttgttattttcacatcatcaaatgctgaattactacctatcactacaactaaacgaggtgttgatggtaactctgagctatatctttctactaaagattttatgcgcgagggtttaaaattcttcacggactttaccaacaaatggaaaagtaacgcagaggaaagaaagcaaattattaatactgcatccaatatggtttcaacaactgaggtcgactttactaaatcaattcctagagaaaactggtcgaacgttcgacgttcaataggaggagaagttttcaaaccgaagctaccaatgcctcgggattcggatccattacgtcagataaaatttagccgtagacatagtgaaataaaactggtgtcagagtttctctttgatgatgcaactcaaccaccaacagaggttggtcaatattgttttgatgaatttctaaaaaaggctaaacaatga

SEQ ID NO: 34382 - DNA, 1284 bp, Escherichia coli
atgacagcagaaatagccgtatttaacaagaccgcagtagctttagccgcagattcagcagtaacgatttctggaggcggcaaacataaaatctataatggcgctgaaaagcttttcgctctcactaaacatcatcctgtaggtttgatggtatatggaactggtgatctctgcacagctccatgggagcttatcatcaaggcttatagaaaggatttaggctctaaatgttttgactctttggaggaatatgctgaggatttcttcaattatctacagtcggctaaatcaatcatcacaccaggtatgcgtgaggctcatctttatcacttcctgagcgagattgtattcagcatgcttgttgatgctttttctgaaggtctcgaaccaacatatttcgttaacttcgataagaatcaatttgttacagacctcacgaattattgcaacgatctccttacaaaattatctgatattaattactttgatggttttactccggatgatgaacaagcagcccaaacctatgcttcatcaattacccaacgcatcattgctcaaaagtttagtgactttgattcaatatccataactccacagttgacaaaagcagttagtgatgtattggcagctatgatatgcaagcaaagtgatattggttccgtctctgggattgtgattgcaggttatggcgataaagactattaccctaaagtattatcatatgaagtttgtggcttctttaatgataaaataaggaaaaccacagatgctgacaagtgctgcatcactcctaattgcggcgtgactccctttgcgcaagaggatgaagtttctgctttcatgcaaggagctagttcacatcttatccaaaatcttcatgctgagtatcaacgttctatcggcgatttacttgatggtattgattcagtaatcacagatttggtgcccacttcagatatcgaaggagccaaggatgctatagttgatgtagtgcgcagaactgtttccgattgcaaggggcgtattgatagctttgtccgagaaaactatgttgacaaagtcgtaaatatgatcgagtttttacccaagcaagatttagcttatatggctgaatcattagtaaatttaaccgctttcaagcgcaaggtctccgatgatactgaaacagtgggaggccccatagatgttgcaatcatttctaaagctgatggttttatctgggttaaacgtaagcactattttgcaaaagaactgaaccatcactacttttcacggtcatag

SEQ ID NO: 34383 - DNA, 321 bp, Escherichia coli
atgaaagacggcatttattttgttgtgttcagaagcggtcataatgatgttggcaatggcacggtcgttgtgaaggataatgcggttaatggtggtgattttgggtttacctatcaggggcgtgtacaagatggggtattgaaacttcatgtatcccgccataacccttcagcacaaaacgttattgcaggccttaacgattatgtgatggatctctctgtgagagatattggggatggttattaccttgaaggtggaattgctggtgttcctggtgcgactctgtctgtacaggcgaaatttatcggcaatttgatttaa

SEQ ID NO: 34384 - DNA, 1563 bp, Escherichia coli; identical to SEQ ID NO: 15120

SEQ ID NO: 34385 - DNA, 276 bp, Escherichia coli
atgttattacgtaatgggatgggatttttatctaaggacagatatacctctccaggtagtatgtctattgaacatttcaggtgccttgttgagatctcatcaataaatagtcgaaaaactattatggctatggaggattactttgttcatggcaagagcagaaaagaagcatgtgaaaggaacaacgtcgcacagagttatttttcaatcagtgtaaaaaagtttattaagataagtaatgcggttgctcaggcttccaaattttatagaagataa

SEQ ID NO: 34386 - DNA, 1029 bp, Escherichia coli
atgagtcagaaatacctcattcgcattgcagaactggaaagccagctgcgtcagaaagaccagcaactgagtctggttgaagagacggaggccttcctgcgctctgcactgacacgtgccgaagaaaagatcgaagaagatgaacgggaaatagaacatctgcgggctcagatagaaaaactgcgccggatactgttcggtacccgttctgaaaaactgcgtcgtgaagttgaactggctgaggccctgctgaaacaacgtgaacaggacagcgatcgttacagtgggcgggaagacgatcctcaggttccccgccagttgcgacagtcgcgccatcgtcgtccgttaccggcacaccttccccgtgaaatacaccgtctggagccagaagaaagctgttgcccggagtgtggcggtgagctggattatctgggggaagtcagcgctgaacagctggaactggtgatcagtgccctgaaagtgatccgcacagaacgggtaaaaaaagcctgtacaaaatgtgactgcatcgttgaagcaccggcgccgtcccgcccgatagagcgcggcatcgcgggccccggattacttgcccgcgtgttaacgggaaaatactgcgaacacctgccactgtatcgtcagagtaaaatctttgcccgccagggcgtcgaactgagccgtgcattactctccaactgggttgatgcgtgttgccagttaatgacgccgctgaatgacgccctgtaccgttacgtgatgaacacccgcaaggttcacactgataacacaccagtaaaagtgctggcaccgggcaggaagaaggcgaaaacaggatatatctggacgtatgtccgggatgacaggaatgtcggttcgccagagcctccgcggtttggttcgcctactcaccggatcatcagggtaaacatccggagcagcaccttcgtcccttccggggtatcctgcaggcagatgcgtttaatggttacgatcggctgttcagtgccgaacgtgaaggcggagcgttga

SEQ ID NO: 34387 - DNA, 645 bp, Escherichia coli
atgcctgatgctgacgctggcgttgttttgtgtggtgttgatgtggtgactggcggaaatataagacaacaaaaaatccttctgaccggaacctgctggtatgagctgacagggctgtggcacctgttatcagcacagggatacaacatttatcgtgtaccgctggggtattcctgtgtccggaaatgctgggacctggttattgttgtgctgagtgcagagcctgttgcgggctggggacgtcatttgccccggatacgtgaactgagggcagaaatgtccggtgagatgctggttctggtaccggaaaggctggaaatgctgaaggtgttgcgaaatatctgcccggtgtatagcggatgcatgcctctgtcgtgcctggaaagaactgtccgcatggcactgaacagaaaggcagcccgtaccggtaaattccgcctgacgtccggacaacgactggcactgaagcgcctttctgagcgaggaagagaccggcccctgaatctgaaacagagtgagcgggggctatactggcattatgcccggctggcagagaatgtgggcgtcagggatttcaggatgctgttgatgaccgggctggaccgtgaggttcataaaatggaagaccgacagtatggacagtga

SEQ ID NO: 34388 - DNA, 123 bp, Escherichia coli
atgaggcacagacaaaaagttgcgcttccgatgtgggtggttgtcggcacctgtgtggtcattgcctgtataacatgcctgatgctgacgctggcgttgttttgtgtggtgttgatgtggtga

SEQ ID NO: 34389 - DNA, 846 bp, Escherichia coli
atgaaaaagactctgattgcactggcagtggctgcttcagcagttgtgtctggttctgccatggcatggactaacggtaactttaacggttccgttgatattggcggcagtgttactgttggtgataactttgcgcagaagtgggcctggcaaacaggaacaagtttaggcgcttttgatggtaatgcaaaagaaatgactgatgctggcaaaaaattagtgattactgcagctcagaatgccgctattttgctgggtaaaactaatgaagcatttatggcaactgatgttgccagctcagcaattcctcaaattgcgttctctgactatcaaaaaggaaaggtcactccggtatttaccgatgcaggtaatacaggtactggctatttggagattccagttgttgatgctcaatcatctccgattggtcaggcaaaagtgaacatgactgttgctggtgttcgtatggtgactgatgcggcacagcaacgtggggtaattggttctgttattgctgacagttcagataatattttcttcggcggcgtcccaacggttgcagaaggtgctatgaatcatgggaatactgcaacaaactttattcaatctatggggggggttagctctgcagatatgttgggtcagctggccgcggttgatccgacgattgtcaataccgcagcttcaacattccctcagaagtcaagcatgaccgggaacgttactgctgctacttatgcaatggggattaagtctggtcaaactctcgaattgactttcacaaacccggtaacgcaaacaactgcatggaaagcaccgctgaatatttctgttacttatcagtaa

SEQ ID NO: 34390 - DNA, 207 bp, Escherichia coli
atgaagaaaaagcagatgctggattttattcaggaaataaagacaccatgcagaacgactgatattgcctcgcgttttaaaatgagttcttatcaggcccgccattaccttatgtgtcttgaaaaagagggaaaaataaggcgcactcctcttcgtcgaggtgccactactttatggcaggtagcaaaggaaacagaaaagcattaa

SEQ ID NO: 34391 - DNA, 2847 bp, Escherichia coli
atgaaacgacatctgaacaccagctacaggctggtatggaatcacattacgggcaccctggtggtggcttccgaactggcccgctcacggggaaaacgcgccggactggcggtttccctgtctcttgctgctgtcacgtcagtcccggcactggctgctgacacggttgtacaggcgggagaaaccgtgaacggcgggacactgacaaatcatgacaaccagactgtcttcggtacggccaacggaatgaccatcagtaccgggctggagtatgggccggataacgaggccaataccggcggccaatggatacaaaatggcggtaccgccaacaacactactgtcaccggtggtggtcttcagagagtgaatgccggaggaagcgtttcagacacagttatcagtgccggaggcggacagagccttcaggggcaggcagtgaacaccactctgaacggcggtgagcagtgggtacatgaaggcgggattgcaacgggtactgtcattaatgagaagggctggcaggccgtcaaatccggcgcagtggcaaccgacacggttgtgaataccggcgcggaagggggaccggatgcggaaaatggtgataccgggcagaccgtctacggagatgccgtacgcaccactatcaataaaaatggtcgtcagattgtggctgctgaaggaacggcaaataccactgttgtttatgccggcggcgaccagactgtacatggtcacgcgctggataccacgctgaatggggggtaccagtatgtgcacaacggcggtacggcgtctggcactgttgtaaacagtgacggctggcagattatcaaggaaggtggtctggcggatttcaccaccgttaaccagaaaggcaaactgcaggtgaacgccggtggtacagccacgaatgtcaccctgaagcagggcggcgcactggtcaccagtactgcagcaacggttcttggcagcaaccgtctggggaatttcacggtggaaaacggtaaggctgacggcgttgttctggagtccggcggtcgcctggatgtactggagggccattcagcgcagaaaacacgggtggatgacggcggtaccctggcagtgtctgccggtggtaaggcaacagatgtcaccatgacatccggtggagccctgattgcagacagtggtgccactgttgaggggaccaatgccagcggtaagttcagtattgatggcatatccggtcaggccagcggcctgttgctggaaaatggcggcagctttacggttaatgccgggggacaggccggcaacaccactgtcggacatcgtggaacactgacgctggctgccgggggaagtctgagtggcagaacacagctcagtaaaggtgccagcatggtactgaatggtgatgtggtcagtaccggcgatattgttaacgcaggggagattcgctttgataatcagacgacaccggatgccgcgctgagccgtgctgttgcaaaaggcgactccccggtaacgttccataaactgaccaccagtaacctcaccggtcagggtggcaccatcaatatgcgtgttcgccttgatggcagcaatgcctctgaccagttggtgattaatggtggtcaggcaaccggcaaaacctggcttgcgtttacaaatgtcggaaacagtaacctcggggtggcaacctccggacagggtatccgggttgtggatgcacagaatggtgccaccacagaagaaggtgcgtttgccctgagtcgcccgcttcaggccggcgcctttaactacaccctgaaccgtgacagcgatgaagactggtacctgcgcagtgaaaatgcttatcgtgctgaagtccccctgtatgcctccatgctgacacaggcaatggactatgaccggattctggcaggctcccgcagccatcagaccggtgtaaacggtgaaaataacagcgtccgtctcagcattcagggcggtcatctcgggcacgataacaacggtggtattgcccgcggggccacgccggaaagcagcggcagctatggcctcgtccgtctggagggtgacctgctgagaacaaaggttgccggtatgtctgtgaccgcgggggtatatggtgctgctggccattcttccgttgatgttaaggatgatgacggttcccgcgccggcacggtccgggatgatgccggcagccttggcggatacctgaatctggtacacacgtcctccggcctgtgggctgacattgtggcacagggaacccgccacagcatgaaagcgtcatcggacaataacgacttccgcgcccggggctggggctggctgggctcactggaaaccggtctgcccttcagtatcactgacaacctgatgctggagccacaactgcagtacacctggcaggggctctccctggatgacggccaggataacgccggttatgtgaagttcgggcatggcagtgcacaacatgtgcgtgccggcttccgtctgggcagccacaacgatatgacctttggcgaaggcacctcatcccgtgacactctgcgcgacagtgcaaaacaccgtgtgagtgaactgccggtgaactggtgggtacagccttctgttatccgcactttcagctcccggggtgacatgagcatgggtacagccgccgccggcagtaacatgacgttctcaccgtcccagaatggcacgtcactggacctgcaggccggactggaagcccgtgtccgggaaaatatcaccctgggcgttcaggccggttatgcccacagcgtcagcggcagcagcgctgaaggttataacggtcaggccacgctgaatgtgactttctga

SEQ ID NO: 34392 - DNA, 1455 bp, Escherichia coli
atgagtaataaaaagctggaagagctgctctggggagccgccgaatttcttcgtggccaaattgacgcatcagactacaagcagtatatcttcccgttgctgttttacaaacgcctgtcagatgtctatctggaagaatataacgaagcgctggaactccatgaaggtgatgctgaatatgccgccatgccgatgtttcaccgtttcaatattccctctgaagccagttgggaaaaggtacgcaataccagtaaaaacattggtgaagcgatccagaatgcgcttcgactaattgaagccaataacccgcgtttacatggcgtcttcggtgatgcacagtggaccaataaagagcgccttcccgatcatctgctggctgatctgattgaacatttcagtaaaattccgctcggcattaaatctgtcgcccaggatgatcttggtgaagcctacgaatacctgattaaaaagttcgctgatgattccggtcatacggcagcagagttctacaccaaccgaacagtcgtgcatttaatgacgcgcattatgggcttaaaaccgggtgaaacagcctatgatccaacgtgtggcactggagggatgttgctaaatgcagtgatggatcttcgtgcaagaggagaagagtggcgctctgtgcacctttatggccaggaagtgaacctgctgacttccgctattgctcgtatgaatatgttcctgcacgatattgaagaatttgatgtgctgcgcggtgatactctggctgaaccaaagtttattgaaaacgatcggctcaagcagtttgatgtgatttttgctaacccaccgtactccattaagaaatggaatcgtgacaagtttgccgctgatccgtatggtcgtaatctttatggtgtaccaccgcagggctgtgctgattatgcgttttatacccatataattaaaagcctgaagcctgatactggtcgcgcagctatgctctggccaaatggagttctcttcagagaaagtgagaaacagctcagagaaaaaattattcaaacagatattattgaatgtgtaattagtcttggccctggattgttttataattcacctatgccggcatgtattattttgttgaattgcaataaacgaactgagctaaaagggaaaatattatttataaatgcctatgatgaacttattaccactaggaatcatgcttatttaaatgatattaatataatgaatatctataactcttacattagtttgaaggatgtctctaatattactacgtatatagcctctatcgaggaagtcgaagataacgattttaatctaaatgttcctgtgtatatagaaaaagaatttaaagatttaaatctctcaagggagataagtaaatggcaatcgtttagaaaagaattgaatatgaactcttcttacttttttaatggaggaaagatatga

SEQ ID NO: 34393 - DNA, 672 bp, Escherichia coli
atgcatcttaatgaaactatattatcggtaagaaagttatatcaggatgttatagatgctgaagtaggtatttatctggcgacaacatcagctgggaaaaagaatgactggagttcattaagtgattcttttttaattaatccaaagattgggtcagtggatgaaataataccatatgttgatatggcatctttagatgttgaacttccatatatagactataaaggagaaactaagtcaggaaaatcttctggtatgaaatttagaaaagatgatatccttttggctagaatcacaccttgttttgaaaatggtaaggcagcatttgttgattttcttgcagaagagagtatagctgtgggatccactgagtttatagtgatgagatcaaaatttgaagatcattttctaaagaaacttggttattacataatcaaaacaaagaaatttaggcattatgctcttcatcacatggaaggcacttcaggtaggcaaagagtaacagtaagagtttttgatgatatcttcattcataataaattatttactgactcagatattttagtaaaaaaattggaatcgctcgagaaaatattgaaggtgctgagagataaaaaagaacattattttaatcttagacaagcattaatatatgagcttctaggagtttga

SEQ ID NO: 34394 - DNA, 348 bp, Escherichia coli
atggcaagcatcatcagtagccgggacagggcacgtctgaaagcttataacaaagaggcgctgaaggcatggtcagccacaaccggtgactctgaggatgacatattactctcactcttctcaaaagataatgtggagggagggaaagccagaatgcagcccatcaggtgggacgattatgccgtccgggttatgaatggtggacgtatggtgcagctatataataaatcgaaaccaatatattccccactgacttaccgttttacagatgaaagtggtgaagagcgtatggggtattacgctccggtattttcgctgattgatggtcagtttatccctgttacttga

SEQ ID NO: 34395 - DNA, 393 bp, Escherichia coli
atgaagatgagttattgggcgctcattttaacgtttattgcttgtattgctggtggtcttgtctggtcagctaatcactaccacggaaagtttctggaggagcagaagcgtgctgacgctgcggaacagcgagctgattctactgaggctatcaccgcgaatgttctgcgtactatggcaataacgaacatcattcaggaggcgaatcaacatgcaaaacagcagatcgcactggagtcacagagaacccaggaagatatcaaagtggctgttgcggatgatgattgtgcttcacgtcctgtgcctgctgccgctgctgaccggttgcggaaattcgcgaacggtttacgtgagcgttccggtggcaccactgccagccagcctgacttctga

SEQ ID NO: 34396 - DNA, 447 bp, Escherichia coli
atgactacttttaccgacaaagaactgattaaagaaatcagagagcgaatcggcagcctggacgtgcgagacaatattgagcgtcgggcttatgaaattgctctggcatcgctggaagcagaggcagttatgttctgtatatcaggacaaaatgtagattcagaagaacatgtatcaaccagcaaagcggttgttgatgcctgggttgaagaatggaatcaggttgacggaagtcctggcgaaccactgtacaaaactatgccactctactatcacgctgccttgccagcgccggtagtgcctgaagggctggttaaagcggtgcgtttttatgagcaggtaaaaaatgagaatccggcagtcgaaaccgtagcatggaaagacgctgttgactgggttctcgaagaggcttgtcaggctgtaaacattggcatcaaaggagagtga

SEQ ID NO: 34397 - DNA, 159 bp, Escherichia coli
atggcaggagaaaatgggccagcacgccctgatatagcgacaaaaccgccgttaccggcggatgtgcgcaactgcaatttctatgtgctgatggaggcgctgtaccgtcggtatggcacgccgggccaggacatttccctgcgtaccgagcctgcctga

SEQ ID NO: 34398 - DNA, 522 bp, Escherichia coli; identical to SEQ ID NO: 4896

SEQ ID NO: 34399 - DNA, 714 bp, Escherichia coli; identical to SEQ ID NO: 28164

SEQ ID NO: 34400 - DNA, 159 bp, Escherichia coli
atggttcagaaaattttgtcggataaggttatgaatgaaagaacaaatgcgtattactcttattatcttggagagcgtaatatctccgtactgccccttaatgtttatgatcccccggaacgttttatcgcttacataaaaaaaacagagaaaatctga

SEQ ID NO: 34401 - DNA, 444 bp, Escherichia coli
atgaataaatatttttatgatgtatctacaaatgctttctatccgatagctatgaaggaaatttatgaatcaaatggaatgaattttgacaatgctaaggaggttgatgaagaactgtttattgagtattcaggcgaaccaccgaaagggaaaatccgcattgctggtgaagatggttttcctgcctggggtgatattccgccgccaacgcacgatgaacttgttgcagcaactgaagcacaaaaacaactgctaatcgaccaggctaacgagtacatgaacagcaagcaatggccgggaaaagctgcaatgggacggctgaaagacgccgaaaaggtacagtataacgcgtggctggattacctggacgcactggaaatggtcgatacttccagtgctccagatattgaatggcctacgcctccggcagttcaggccagatga

SEQ ID NO: 34402 - DNA, 342 bp, Escherichia coli
ttgctatccatccagaacacgatagccaataccgatcccttctttcttcttcgcttcttccaccatactgttctgattgaagaaggaacatcgctggcaagtatctttctggcaatagaactgtggaaggcactgttagcagcttatctggacagagatgttggtgcttatatagatgaggtaagaaaaccgtccgggccaacgacatgggatattgaatggattgggattgaccgtcgtagctcggtttatcgcgcttacaagcgtcaggatatggaagaggggaagatttttcgacctattttaatcgtgagcggttcccgactgatgagtttgacatag

SEQ ID NO: 34403 - DNA, 408 bp, Escherichia coli
gtgaagggggttcaggacaaggggtctgtatatgattactctaacctgattcagcatgcatcagtcggtaataaccagtatcgggaaattcgtattgagtcacacctgggagacggggatgataaggtctttttatctgccggctcagccaatatctacgcaggtaaaggacatgatgttgtttattatgataaaacagacaccggttatctgaccattgatggcacaaaagcaaccgaagcgggtaattacacggtaacacgtgtacttggtggtgatgttaaggttttacaggaagttgtgaaggagcaggaggtttcagtcggaaaaagaactgaaaaaacgcaatatcggagttatgaattcactcatatcaatggtaaaaatttaacagagacagataactaa

SEQ ID NO: 34404 - DNA, 921 bp, Escherichia coli; identical to SEQ ID NO: 25523

SEQ ID NO: 34405 - DNA, 603 bp, Escherichia coli
atgagcgttatccaaacactacgagaactctccgaggtatggcaattatttggtgatatgcctgacgacgctacgttaggtgtcgatttagcggcgctttacctcggtatcagtgttaaatcattagcaaggtatagacaaaacggtggtggtccacactacattcaataccaatcagaagacagcaaagcccggaatcagagggtgaattatctcttgaaagatctccgttcatggcgggatagccacagggtaagcagcacaatgcacgcagcacaagtcaggggattagcttttacttgtctttcggatttcacaaaacctcaacctttttggtgcatcactaacggtagcggctctgcaagcaaaatcatatcccatgcattgacccttcctgatgatgattttaagcagcttttgttagagacgaatgcagaagtcgtctggatctctgtggaaaaagctctttttgatgcatggataaataaagatgaacgagctatctggcacaaggcttttacatcagtattaaagaacattgttcttgcatcgggtgctgaagaggaaaggtatattttgaatgacattttggatgataaataa

SEQ ID NO: 34406 - DNA, 555 bp, Escherichia coli
atgttaaaatggatacggacaatatttttttctgactatctaccatcaattttatgtctgctcttacttgtgaaaatggattatgcaattttctctaattggccgataaatcaatctgtagatagcagaataaaattaatgttgttattcatacatcttataatgctttttgctatcctttctccattcataggacgatttttagcaaaaattagcaatgaaaaatttaaagcttttattggcttgccggataaagataaaaatatcacctacattgatttatatgattttttaagtggacttgcattatctgctttttatttgtcaattttattattcactttaaaagatgtctatgaaataacaggttggcttatttcagggatatatgcatttttaatgtttgcctcatctatatcaatagcatcaatctcacttatgagatatatctggttgtttgctaaatttagtaaatatacatattcaattgctgcgttattagcagcaagcatgtgtatggcaattataggcgttgctattagaatggcttcatag

SEQ ID NO: 34407 - DNA, 567 bp, Escherichia coli
atgaaaaaaataaccaagccaacaaagaatacaatatttattgtggcagctcttgttggaatctgttcctacattttccccagaagccctgatactcaaaagacagatgatatcgttggggtgtggacatctgattattcatatggcacacagagtgttcttgctggtgtgaatgtgagaacttcatatttttctaatgggaaatataatgtgaatggccgaatgtcttttaaaatagataatgcaaatggaaaaacagccgttgttgactattatgttagtggtgcaggagagtggatacttcacgataaagaactgatagccacacttagcagtctgaaatcaattccagaccggattgtctctgatggaaaagacttcgatattcaggatcttgaaatattagaaaatatcatacgcaaaaaatttccaactatcgaggaaagaatggctcctggaacaagccagtcttacattattaaaaatgacagtcataatcaaaagctactggaggtcgtaaatccgtttgggaacaactttgacataattataacaagagagaaatag

SEQ ID NO: 34408 - DNA, 1224 bp, Escherichia coli
atgtctgttgaatatggtttaaaatgttttaccttaaatagtggagagagatattgtcaggtaatagaaaaaacaagtggcgttccattatattatccgaatttgtatattactcttgaaagtagaaataaaggagcatctatatcaactattgaacttgtggctggtagtttactatcttttgaacgatacttattttacgcaaaaatagatattagagatcgtattacagatttttcatttctatctaatgcagaattagatgcactttataattacatatccaaaaggcacaaaaggctgaaagttgtaaatatacgaaggttgccagaagttgcggatagaactcgacactttagaattacgaccattgttaactatctgaaatggtatatatcagaggttataccatttatgtcagatgagcagattcttaaaactgatttgttcatcaaaagaattgaaagtagaaagccacgaataaaacaatcatactactcagatactgaaaataaagctctggatgagaaacagcagaatgaactaaagaagattatcgatattggaagtttgaataacccttttaaacctgaagtgcaattgagaaattatttacttatacatattcttcttgagcttggcataagatgcggggaaatattaaacatccaaattaaagatatcaattttgataaaagcatcctttccattattagaaggccagatgagataaaagatccaagaaaaaaacagccattagtgaaaactaatgaaagaacattacctctttccccacatttagtttctaaaatcaaagagtatatatttgattataggaagcaaacaccaggggtgagttctaatgcatatttatttattacccataaaaagggttctacattaggtaatcctttatcaatatcagcctatcataagattatagataaaatacgttcatcaagtttattactaaaaaagttcaccggacatacgctgaggcatacatggaattataacttttcagtgatcgcaattaataagcagagaaacttaaaatcgcacaatcctgaaaaatacagatcatatctaatgggatgggaacaaaactctggaactgctcaaacatataataagaagtttatagagagtgaatctcataaaataatgatagagatgagcgaggcatttttttatggtttaggagagaataacgatggcagataa

SEQ ID NO: 34409 - DNA, 1353 bp, Escherichia coli
atggcagataatcactttattgcaagtttccaaaatgaggtaatgtatgcaaaagataaaagctataattttaatatttataatgataattggactataggcaagcaaattatttttaattttgaaaaggttgactctgttttacctgagggttttaaatttatttttaggaatgtcatggccactttcgctcaaaactatagcgcgtcttatgccaaaaaaatgttctggagtgcttatgatttctttaggaaaaacaaacgatgtcaatgggaagagatcacgcagtttgatctaaaaaattattattctttaacgtataatgaaaactatacgtatgtagagagcattaaatatttttttattaaatggtatgaattaggatttattggtataaaacatccaacttatgtttttctcctttcatggaaaataaaaaagaaaaacgttggtaaagccgttagaacattagaccctgaaggcggtcctctcactgatgaagaattaaacgaactacatagtaaggctatgaatgggtataatgacggaaaaataaatctttttgattttgctttacttaacattttattatgtacgggtagaaggccatcacaagtatcacagcttaaatgttgtgatataaaggaacatcatggtaagttttatctaaaaatacctcgaatcaagcaaggtcaaaatttccgacaagattttaaatctgtcgagatcccaagagggctgtatgaaataatttgcatgttaatacaggaaaatatatcactctttgaatcgcgattgtcgttaatttttacggatagacaagtaaattcattgccattatttccagagtactcaaggtttaaattttatgacttgtatcttgaaaatgaaatatacgatgatgattatcttcatgtgcattcagaaaagatatccagaagattaaaatttatatgtatcactaatgatattcgttctcacagaaccaataaattattaaagttaaactcaagaaggcttaggtatacccttggctccagagccgcaagaaagggatgtgatgcctacatgatagctcatttgttagatcattcatcgactaaaactgttcaaacatatattaataatttacctgaaaatgctaaaagaatcgatagcatgttgtcagttctaatgcttccgtatgctaatgagttctgctgtttagaggcggttggtagtcgatattggtttgataatatctttatccgaatacaaatccttcttgggcaaattaaaccagatggcgatattgctgaatcattacatcaatctactgtcttgatagaaaagagtcatagggttaaggagtaa

SEQ ID NO: 34410 - DNA, 1623 bp, Escherichia coli
atgaatatagaaattttagaattcaatagggataagtttataactgagtgtaagattgcatctcatgcgctaaaagaattttcatgggataacaacaaatggagtagttctttattattctatgaattaaatttaaatcaaaagaaaagaacaaataaaaaatatcttagcagagaatttatcgatatagctaagtcagtaatttggcatgaatgtttagataacccagcaaaaggggtaaattatataatatcgttgaggttaattgagtcagcattaattacttataatgaaaaagctaatatttgtttattgacttataaagttatcgagtacgcgcagactctcgcttttaaaagatacactaatcacaatgcgagcaaatattgtaacaatatgctaaaaatagttcgcctattagtatcgaaaaaaattatttctccaaacttaagattttcaggatgttattttaaagagtattatgattacgttacaactggtaagaacgaacataaattgccgaacgaacatactcttttttttctctgtaatctattttcaaaaaaattaactaatccaagggatattttcactacatcaatttttgcattactcatgtctgccccttggaggatctctgaggttatcaatttaaggtatgattgtgaagttttacagcgtagtgaggatggggtagcccgttacgggcttcgttatattggtgctaaaggatatggtgaggatattaagtggataccctccgttatgcaaccaatagttaaagaagctttgagaagattgcgtgttttatctaaaaacgctcgttttgttgcatctattttagaagacattattgaaaacagaaaagctgagcgaactttattgaataaagatttaggtgataaaataataaggttatacaagatgcgcgataaaacaagcttagttaagatgaacgatgtccagaacatggcaagtttattagaaagcaagaagcctaaaggttttccatttataaacggaaataaaagttttaagtacagtgatatgctatgtcttttaaataaggaccaacttcatgcgataaaacaaacctcgatatttgaaatatatatgcccaaccccacgtttttcagaatggatttttattcaaatagagatggggaacaaccgaatcgttggggtaatatctttcaaagacatggtttatccgaacagcaaaattatcatttgaaaacacatcaaataagacaccttatcaatactcttgcacagaggggcgggctatcagatatagatattgcgaagtggtctggaagaacccatgttaaacaaaatagagtatatgatcatatgacagatgatgagttatttacagcttcagtgtgttttatgaaagatgaagaagtgagtaaagaggctgtacttaaaaataattttggcgagagcttttcttacatgaaaaatattataaatgaaataaaatatttccagagaaatattggagatgatgcgatgaatttaagagatacaagactactcaccgctctcttaccccacttagaagaaatctattacaatttaaagaaaagagaggataagcatggaaagaaaattcagtag

SEQ ID NO: 34411 - DNA, 420 bp, Escherichia coli
atggaaaagctaaatagcatggaacgttttctaatactctttgaacgcttcattaaaaagctcgaagagtctgggatgtcagaatctgatataatagataaatcttatctattttgtgttggattttatataaagtataaaaatgacattgataatatagagttagctaacagagatgtcgttttatcctttatgcttacatcatattattgctttattaacaatgttgaaaaaagagtaatcgatgctgataaaataagaagaatgtgtgggttacttattcactttattatgaaaaacaaaaccaactcagaaattgtatttataacagaaaaaagaaaatatgatcgttccgtgttagcaaaatcattaagagataggaatgaaaactatatagctaactataacaaaaatgcttaa

SEQ ID NO: 34412 - DNA, 579 bp, Escherichia coli
atgaaatacttcatgatgaagcgtgtattactggcgattgcactccctgttttggttgcttattttggaggaagtaaggtcatgtcagtttattgggttcctctgttttttatcagtgctatgttatgtgcaacagcttatggtaaatatgttgtcaaaagaaataactcatccactttgaattattttaatgacaataatgatgggatctatcttcataaatttaatgaatgtgaaatccggttagacacaaataagcaagaagttttcctcaaaaatgatgagggtgcaaaaacgtattcttttgatgacatcaaagagtggcactacaacattacatacggtggtgaagttgcaggtgctggtttaagtagtatcagagagaacggtaaaacattaggtcaaaaccttgctgatacaggtctctttatccgtgtaaaagacgttcgtaaaccagagtggcatatccggttctatcttcgtaatgattcttttagctctcgtaaaggcattaatgatctcaaagcacaacttaatcaatggatggagatctttgaccagaatttgaatgctgcatga

SEQ ID NO: 34413 - DNA, 1188 bp, Escherichia coli
atgaaaggaatgcaaaaaatcaaaagagggaaaacctttaacggccttatttcttatttattaaaacctgcttcgcaccacaagtcagatccgtatgtagtcggtggcaatgtcatagaaagcttcgcagaagcactaagtgcagagttcaacgctacgaagctcctacgctccgatgtaagtaaacctgtatggcataactctttacgtcttcctgttggtgagagtttaccaatgcagaaatggaaacagatagctgatgactacatgaagcgtatgggcttctctgaaacgcatctacgtgcatacgtgcttcataatgataaagatggccaacatattcacatagtagcaagtcgcatcgatgcaacatccgggaagctctacttaggtaaaaatgagaaccttatcagcacacgtatcatccaggaacttgaaaaggactaccagctaacaagaactaaaggaactgatgctatgaaaccttcttcctcacctgccaaacgtaaaaaatcacgtaatgaagcaatgttagaagaaagaactggcaagaaatgtgcaaagacaatcatacaagaagctatagatacactcataaccagcaagatttccgaagaaaggtttgtgcagcagcttgcagctcagaagataagagcaatccccaacagggcttcaaccggaaaaatgaacggtttttcatttgaatacgccaaaatttcattcaaagcatcccaattaggtaaaaagtattcatggaaaaacttagagccgttcatcatcattgatccccttgtcgtagatgatagaaaagcttccattgccttcaatgcaaccaacccagaagaaattatcaagatagtgaaagctgatgccgtaagtttttttggtggtatagatgcagaaaacaccctgcttcctttatctgtcttgcctgtagcagatgatatctatcaagagaaagttaaaaccacaggtaaaagctatgtggacgtagcgatgcgatggatagaaaccatcccctgggtagacaaaatagttaacaccatcaaaaaactacgtaatccattgttaaaggcgtttaagcagccccccaagattttttcggctatcccccttcctatagacacaccacctctttctgctgttgaaaaagctacaaaaacaaacggttttaggtctaaaatttag

SEQ ID NO: 34414 - DNA, 375 bp, Escherichia coli
atggaaaatacttttaataaaattaataaaattaataaaaatgaatcatatcaaaatttactaagaacgcattgcatcagtgttcgactgaaccatgaagaactacagcttctcaatgctaaacgtggagagaaaagcaagggggaatggctcagattagcttctcttgataagcttcccatagtagttccttcaatcaacatagaagcttggaaatccctcagcgaaatatcacagaagctgaacaagctacttattcatctcgaaagtaaaagcactggtggtgagcttacaaagacagagatcttcgcagtgaagcgccaaatttctgagcttcgcttctgtcttacatcctccaagagatctatgagttaa

SEQ ID NO: 34415 - DNA, 198 bp, Escherichia coli
atgaagggtaataaaagatatcaaaatttaatggccataatctttgtagtctgttttttctttaatctaccattcagtcagccattatataaagatggaagtgtcgtggaggtattcgtagtattagctagtttcttttacatgatggctttcccattcttttacttttttgaaaataaatgcagagataaggtataa

SEQ ID NO: 34416 - DNA, 384 bp, Escherichia coli
atgaataactcattacatccaaactgtatcaaagctgcattagggatagtgggcattggatttatagctgttatagtggtagtcattgtaaaagaactcaacaatgaaatcctttctaaatattggttgctagttcctccaattttaatagcttttggtttttctattttctacgaaaaattgaaaaagattgcagagtttattttctccattgcttctgcattgggagcattgactttgtgtattgatactttggcaaatacacagaatgatctattcccatatttttttcaaagtgttatagggtatttaattatagttgtaatagcttctctttcattagcaaaaataatttccgcaattatattgaaaaaattaccataa

SEQ ID NO: 34417 - DNA, 492 bp, Escherichia coli
atgcataaatttcattgtaccgaattagattttaaaatatgcatcagccaaagcatagtagatgaattattttctcatcgtcaaactcactgtttcagtaaagaatctggaggtatgttattttcaaataatcttaatgactcagaggttgaaattaataaaattactatccccggcccttctgacttgcggagaagaaattatttcaagttagacgagaagaaagccaaagaagatattacttccttatttaaagagggatttcactatttgggtgattggcatacacataacgaagccgtagcaaacccttctgggacggatatccgcagtatccaagacttatttataaaatcaggacatacaagaccctttttcatcatgctaataattccgaacaaagcgaatatttccaattgttatttggtagcagcagatgggggaaaattacataaatttaaatattgtttagaaaggaagggttttgaatga

SEQ ID NO: 34418 - DNA, 1155 bp, Escherichia coli
atgtctgcaaagatatgtttcttccccgttggtaatggggatatgaccctcatccaaacggaagatgggcaaaatattttaatcgattgccacataagaaaagggaaggaacaccctgatgttctttctcagttaagagaaaagctggatcgtgatgagaaaggtagattatttatccacctatttatttggtctcatcccgataaagatcattgttctggaatttctgagcacttccatttaggcaaacccgaagactggagtgaaaggtcagataaaatctttattaatgaaatctggtccagtccgatagtatttaggcgacaccatgcacaaaatcataatttagtccaagatgcaagagatcttaattcagaagtaaaacgaagagttaatctttacaaagaaaaacgatatttagatggtgtcggtaatcaagttttagtcttaggtgaagatgaaaatggtaaaactgatgatatccctaatattgtactgcaacttgataatacaactcgactaattaatggtgcatattcatacaattttgaagctcatttgcttgcaccatcaccaaaaaaagatttggatgaggatgaagataagttaggtaagaatcattcaagtgtaattatcaattttgagttaaaaggcgataataaaacagcattctttttaagtggtggtgatgcggaagttgtttgttgggaaggtgtccgtaaccgcctgtttaaaaattacaatatgtcgtggcttgattacgatatactacaaaccccacatcattgctcttggcgatctttatcgcatgatagttcaagcggtaaaggagatgaagcaaaaacctccgaactggcgatggaagtattcaaccgagcaaaacaaaatgcatttataattgcaagttcagatcctattgcagatgatgctaatgatcccccatcatatcgagcaaaaaaagaatacgaaaatattgttgataatgtacaaggtcaatttttatgtgtatcggaccataaaaagaatggagagaatattccgttagaaattgaaatttcagataatggtattaagaaaattgcagcatctgcattaggcatggttgaatcatcaagtgccgcagtaaatagacaaggtggtggtggttatgcctga

SEQ ID NO: 34419 - DNA, 156 bp, Escherichia coli
atgaagaatgataaattaaccaacgaacagcaggcgcagaacaagtcaaacctgaaaaagagggcaggttatgcttgggaattattcaaatggggtattagactgtttgatttaatcactcgagcactggactacttagaagggggtggtgagtaa

SEQ ID NO: 34420 - DNA, 309 bp, Escherichia coli
atgttacataaagcccttcgtttaataaggcaataccataaagaatcaatagttgagttatcttcatctttaggtattccaaaagacaaaatagtatcgcttgaaagcggagtttggtcaccgtcgattgaagtcttagagcgttacgcctcccatttcgacataccagtatcctctttagtattcttttcggaatcattaggcacgcaaggccgtttgtctaagcgattgcgtttaaatttagccggtaaagttctggatgttctggagtgggtaagtaataaaaatgaaaaaacggaaaaagcttaa

SEQ ID NO: 34421 - DNA, 897 bp, Escherichia coli
atggattcgccattttacaaactcaaaagtaaaagaaaactggcgaatttgctttgtgttagtcttgaagaattatactctttgagaaaagatgaaggaaactattccgtttttgagcaactttctaaaaaaggaaaagcacgaaaaatacaaaagcctttagaaaaactagaacttgtacatacacgaattgcaagtttgttatcgcggattgctttgccagaatatctgcactcagggaagaagaagtgctctaatgtgacgaatgctaaagctcatcttaataatgaaaagatgatgacaacagatattaaagctttttttccatcaactacaagagggatgatattttcttttttcttttcggtgatgaaaatgtcatctgatgttgctgatgttttgtcccacatatgtacttgtcatgaccgattgccaacaggtagtcgcatcagtatgccgttggcatattttgcaaattcaagaatgtttggtgaaatatatcaactttgccaaaagttacgagttaacatgactgtttatgttgatgatctcactttttcaggtagtaacgtaaatcgattgttctgcgctgtaattcgtaagatcgttaataagcatgggcatgttatacacccaacgaaaacaaaactatatgccagagataagcctaagttggtaactggagttattgtattaggcaatgcattaaaagttaggaatgagcagcattttttgatggctagggaaatagattattggaaaataattaaagacgccgaaaatgcgagagaaacaatcattgccaaaaagctctttggtcgtttgcattcaatgggagtgattgagcaacgttacaaatctaaggtgcttactttaaaggctaatactgcaaattaa

SEQ ID NO: 34422 - DNA, 438 bp, Escherichia coli
atgtccaaaaatctcgaactattcaaccaacagacggctgaaatctttgcggtgctatgggataactttcctgtaccacaagtcatcacctacaaaaaatttaacgccgcgttacctgatgactactttgaccaacttaactcaccagaaatgaaagcactgaatcagttgcgtagtgtggttgatggcacattcactttcctaagcgaaaacggctatattctgtacggaacagaccatcagaccggttttcatgatgtgcgcctgaccgagaaagcactcgcggtgctcaacaaaaaacccgaagcacttggcggtaatgaaacgatgggtgataaaattatcagtgcagtaaaagacggaactccaggtgtcattgctggagcagtgacaaacctgttgactcttggcgttaattttgtgacgtcagcttcatag

SEQ ID NO: 34423 - DNA, 132 bp, Escherichia coli
atggcctcaaataacgacctgagctctcgcgaggtggacagttacactgaaaaaatggttgaacaagccagtaaagatgagcttatggtcgttataaaatacctgttaaatcacatcagaatgaataaataa

SEQ ID NO: 34424 - DNA, 462 bp, Escherichia coli
atgaatgagtttaagcgttttgaagaccggctgaccggactgattgagtcgctgtcaccgtcagggcgtcggcgagtggcggtagatatcgcgaagaaactgcgccagcgtcagcagcagagaattaaattacaaaaagccccggatggtatgccgtatgtaccgaggaaaaaacaaccggtgcgaaataagaaaggccggataaagcgggaaatgtttgtgaaattacgcactaaccggtttatgaaagcaaccggtagcgagagtgccgcggtggtggagtttgccagcggagtgcaacgaattgcgcgagtgcatcagtatggtttaaaagatagacccaatcccgacgttaaacctattaagtatgatgaacgtaaactacttggtttttcacataatgatattgactttatagaatcaacgatcattaattgtcttctggaaaaatccagagaatag

SEQ ID NO: 34425 - DNA, 540 bp, Escherichia coli
gtgacatgtaaaaagaatgaagatgatgttgtaaagaaaattgaactggtgctgaaaacaatcgcgcggacggattcttatttaaattcagccaatactaaatcaacgatattactaagcttagcttcagctgtaattgttgctattatagcaaattttgacaaagttatatgtctggtagatgtggatagtgataggctttttctctctcttttattgattgtaatagttgggttattggtaatctctttgttattttctctaaaaggtgttactccaaatatctctaagagtgataaggagaatactttttcatttgttgatatatcaagttattatagtagtcttgatggctattctagtagttttaagtcagtgagtgatctggagttgttggagcagttaattgcattgaattatactctttccagagcattaactagcaaatatgagatgcaaatcatagccattgactttataaaaatggctgtttatgtgctttgttttttaatatatgtggttgctttatctaattggtga

SEQ ID NO: 34426 - DNA, 1353 bp, Escherichia coli
atgtccataaagagtatttattcagtattagatgaaaggctggaagagataatttcaaaatcaaaatcgcaatcagtccatgatgctatatttgaatcagtggataatacacagttggccacggagagcttaagtaaatcttctggtttcgtaagaagttctatttcattgaaaaaagatgtaggtggaactgatgttcaaagttatcaggtgaaagatattgttagaaataaatttggcaagcacggtccactcatgacaagttttggatgtcatccggactttaataaaatggatgatggtgaggtgagaaatggttattccattaccatgtttatggatataatcggctcaactaaacttggggttgtttttccaccagaaatagtatttagaatcaaaaatgatattataagatgtgcgatcgaaacagtgaatgcatttgatggtcacgtccatagaattatgggtgatgcagtaatggcatttttccgaagtaatgaccgatataaaaacaataagatcgcagacagtgcaattgatgcaataaactgtgccgttgttttgattgaaatgttcaagggggttgttatacctaaattgagtgatttgggagttgacgaaaacttaggaataagaattggtcttgactatggccctcacgaggaagtggtgtggtcaaaatatggctatatggaaagtcatgaagtgactgcgacatctttttttgttgatgttgcggcaaaacttcagcaaaaagctcctaaaaactcaattatgataggtgcaagttttgtagagttattaggccttgatgatgttcaattaaaacataaaattaacagaaacaatggcgtagaacacaaggaattgtatttaaccccaaattataaagatgcttcaggcaaaccaataaattacagacaatatgtatttgataacgaacgttattgtaatttgctgcctataaatgatgaggggggtaaactcattgtaaaagcaacgcttaagaagagtgaaaatgatgtgtctgatgatgagtatatttgttgttctcgaatgataaaaaagggtatgggtatctcatttaaagggtactattactcacaagaacagtactctaatcccaggttcaaatttcgtgtcgaaaatacaggtcctgatgcaggtaatgttgataataagggtaatcatgagtcatatgaggtagcaaggtacactggcgagcgttattttgctaagcattgggaagattgtcattacaaaggactgcattatatgtttgtatctttttggaatggggatcaattaatagaaagggagaggtgtttttcagtttttattaacgattaa

SEQ ID NO: 34427 - DNA, 453 bp, Escherichia coli
atgaaaggtaatattcttggggatatccgagctgaacatgacgaaaagatgttggaagcttcattttggcaaacaactgattataaagctcttctcgaatcctacgatcgatgcatcattgttggccgcagaggaacaggaaaaagtgctctggtgcatatgctttccaaacattggcatgctaagccaaaaacctatgtgatgactattagtccggttgaagaacaaattattggattaagggatgttatttctttatttggtgaaaattacttacatataaaagccggtagcaagttagcatggcgatatgctatttatatggagctgctttctgagatcgcaagtcattacaagatgaaaaacgatcttgactacaaaagtgtagagtcgcatttattatcttggggaccgaagagacaaaatataagtagcaaaataagaaaaaattga

SEQ ID NO: 34428 - DNA, 1620 bp, Escherichia coli
ttgaacgctattctcgatgataacaaaaatataaaaccagctacaagaatagccgaactatccgataaatttgaacttgacttattggaagaggtgatagaagaagcaatttcgaagtcaaataatcaatttgttatttttgctgataggcttgatgaaggctatacaccggataatcttggtgttgcaatagttgatggtttcattcaggctgtgattgatataaaacaaaatatgaatgaaaaggttattgcctttgcatttgttagagataatattcatcgagccatatcaaaaatggaccctgattttactcgaaatattgaagggcaagtactgagattacattgggatgaatataacttgtttaatcttgtatgcaatagaatgagggtcgcttttaactcaaccattgagaacaacacgagggtgtggaatgcttacaccgcaaatgaattacagtctaataccggttttaaagaaacattgaaactgactctatataggccaagagatattttggttttgttaaataatgcattcttgcgagcaaacacacatgatcgtaatcgtattgtcattgatgacattcaagcaacagcgaatactatttcacaaaatagactcaatgatttgttaaaagaatatgagaatgtatttcctgcattagatatatttacatcgcaatttgctaatagcaaaccttactacagtgtttctgaagcgtcatctaagatacaatatgcccttgatctcaatggcgttattgacaagatgaaaatgcaggatttacttctttttgaagggccaatccaggtgattcaacgactttacagtgttggatttattgggttgtataaccagcagtcatcttcatatgtattttgccatgacggtaaggaacctgaaaaagaatttacaccagattcaaaattgctattgcatccatgctactggctagcattaagtgttcatgaatcagagatgactcccgatgctgctgatgatattcatgatgaatatgatattgaggtcagctctgtttccgaagagcagaggaaacaacgaatcggttcgttgctccaagaactacataatatacctgaaggacctgaaggtgctgtcgattttgaagcatgggcgctcaaaactataaagttactatttgctacgaatttaacaaacattgagttgcatcccaataaaaatgggttgcagcaaagagatattatagcgacaaatatagctgacactccagtttggaagagaattctgacagattatcagacacggcaagttgtttttgaagtgaaaaactataaaacattaggtgctgcagaatatagacaggtaaattcctatttgtttaaagactatgggcggatagcttttatcataaatagagatcacacagagaatttagaaaaacataaagagcttacgtgggtaaaagaaatttatgataatcataataaattagttgtgaagttaccctctaagttccttgaaaggcatctgtcaaaaatgagaagcccgcaaaaacatgacgaagttaataaacaattaggtaaactgctcgatcagtacataagggtctatttaaataataaatgtaagtaa

SEQ ID NO: 34429 - DNA, 126 bp, Escherichia coli
atggcaaaaatggggcaaagcgctgcaaaaggggcaaaaaaggggcaaaaaaggggcaaaaaaagagtgggttatcgtagcttattgttgtcgctgatgatatttaacacattgaaaaataagtaa

SEQ ID NO: 34430 - DNA, 1203 bp, Escherichia coli
atgatgaagaaaaatcatattacccgcaccatcattgcatctgctgtattattttcatttaacgctgcagcagcgacgtcatattttgaagcgcgtaacgatgcaatgggtggcaccggggtggcatcctcccattatggtgtggctcctctggcaaacccggctttactgacaaagcacaacagcaatgatgatttcagcctgttactgccgtccgtgggcgcacaattgtcagacccgaacgacatcgctaacaaagccgatgacattcaggatgactgggatgccttcgaccgcgcggtcgacagcaattacggtgttgaccaggcagcggcaaacctgaaacagcgcctgcaggagttccgcaatatccacgctgatgcgcaggtgggtgtttctgccgttgcggcactgccgaatgacacgctgccggttgccctgatggtgaaatcctacggtacggtcagcgttgacggcaaagtcagcgacgccgacctggaatatctggagaaagtcgccaacggcacaatcacggatgtggacaaaaacgcgctctcctcccgcgcgtatggtcgtgccgcagtggtcactgatgtgggtatttcctttgcaaaagaactggaaaccgccggtcagaaatggtcactgggcttcacacccaaataccagcgcgtggatctgttcaactacaacgtctccgtgcgtgactacgacaacagcgatttcagcgacgacaaataccacaacacgaaaaacggcgtgaacgccgacatcggggcatataccgacctcgatgacaactggacgctgggtctggtagcgcagaacctcattccacgcagcatcgatactaaagtggtcgacggtgttaaggaaacctacaaaatccgtccgcaggccactgccggtgtgtcctggcacaacgacctgttcaccaccgcacttgatgttgacctgacaccggccagcggattcacctccgacagcaaacgtcagttcgccagcatcggcgcagaattcaacgcatggaaatgggcacaactgcgtgccggttatcgccagaacatggcatcaaactccggaagtgccttcaccgcaggctttggcatctctccattcgacgtcgtacatatcgatgtatccggcctggtcgggaccgaccatgattacggtgcaatagcacaactccagttcactttctga

SEQ ID NO: 34431 - DNA, 264 bp, Escherichia coli
atgtttgacaaagaaacgtacatcgaaaacaaagcctttacggtgcaaccgtttgatcccgcaaacctgcgattgatcaccgacaggaaaaatgaatctttcattttccagacagaatgcatagtcgctgtggaaccgcgccagtcgttccgggacccgatggttaccgaatctgacgtcatcctggcgaacgacgttcgtatccgggtatcgctatcaccttctgacgtgttccagcagctcagcaaaaacacagggctgtaa

SEQ ID NO: 34432 - DNA, 450 bp, Escherichia coli
atgaaccgtatgatacctgcggggtgtcttgccgtactcctgctgggcggctgccacgcaacaccacacaaacccgattacggcgctgcatccgatgtggccagaacccgccacgcgcagtaccagctgtgggagcacggtgcactgtcaggacagacgcacgctgtaacctcccagcccgcgctgaccgcaaacagcggacgactttcctttgactgggacggcgatgccattgaactgctggacagtctggcccgtgcccggggtctgcagtttggttacaacggcgtccgcctccccctgccactgacgctgcatgtccgggatatgacctttgaaaatacgttaaggctgatacaggcacagaccgcctggcgcgccacactcactcagtatcccggcgtactctggctggacttcatgccggtccggaaaaaccacaaggagtga

SEQ ID NO: 34433 - DNA, 813 bp, Escherichia coli
atgtttcgtcatctcattctggccaccaccattgccatcgcactgtccggctgtacgcagatggcagccgacagccgcccgcacacagacaccggcacgccggatatcagtaccttcctgcatccggaaaatgcccgccccgacggcatgtcggatatccgctatcagttgctgaacgagacaggaaaaacactgggattccggggaggacgtgcagagcgcgccgccgagctgcgcaggacacttgaacaccgcgccacaacacttgatgccctgtacgacttccggccgctgctcagcccggaaggctggctgccaccggtgattgacgaagcccgggacgtggcacatgtcacgggcgaacagttcagaacggcagacaccgtgtggaccatcgtctctcctgaacgcttcgtcagcaatccacccggctggcgaacctggctgttcaccggtctgtcggacaaagtcacgccgcctgacggcagcgttatcccggaggaccgcagtcagcgaaaagtctgggagcaggcggtcaggacaggctggcaggaaggacgtgatgcagcagaccagatacttgaagccaactttaaccgtcttaaccgtgactatcgcggcatgatgctgtacgccatgctgcgctcacgcggaatgatttcagcacctgccgtcaccgacaccgttcagtccgtcaccggctccggcacaaaactggtcaccggcgaccgcgtccgcaggctgaaacagcacgccggcttcgaactgaacaaaacgcactggcgtcccgtcatcagcacggagaaaccgtaa

SEQ ID NO: 34434 - DNA, 1158 bp, Escherichia coli
atgtcccatgaattcacaccgtatgactttcacggcacaccgtctgcggaagacttcaaagccttcatggcatggtgtgccacacaacaggtatccgatatcaacatgcagggcggcagtccgctgtccgtggcccgcttcggtcgccgttgccgggcaagtcacatggtgctggcctgcgatacggtcagccggctcacggatgaagtctttgggctggatatccgcccggtcattaccagcgggcagccggtggaccgggccttccagcttgacggcgacatgaacggccgttacggcctgcagcgcggggagcgggtccgcttccgctgcaattttatcctcggcactgccggacgctttgaagagtccatctccctgaccatgcgggtcatcccctcggctattccgtcgctggattcgctgaatattgaaccggaactgaaagcagcgctgctgccacaacaggggctgggactggtctgcggggccaccggctccggcaagtccacgctgctggcagcaatataccgttactgtcaggacaattttcctgaccgcgtcatcgtgacttacgaagatccggttgaatatattctcgggcgggacactgacctgctcaaacctcaccagtcacagattggccggcacgtgcccggctttgctgaaggtatccgtgctggcatgcgacgaaacccggacctgattggggtgggtgaaatccgcgatcaggagacggcagaggcggccattgccgccggagaatccggtcacgtctgccttgccacctgccacacccactcaccgggtgaaaccatttcaaggatgctgggtctgctgccggtgcagtcccgtgatgccatggcgcatgccctgctgggcaccctgtcattcattgttgtgcaggtgctggtcagaacccgggatggacgccgacgtgctgtccgtgagttcatcacttttgacacggcactgcgaagtgcactgggtcagcttcctcatgaaaagtggggagaacatatcgacaacatcatcctgctcgaaaaacgcagaattgccgatcaggttgccaccctgtaccgccgtcatgacatcacccgtgaggaggcctgtctgttcatcccccatcacgagtggtcacgactgcccgacgcgtga

SEQ ID NO: 34435 - DNA, 288 bp, Escherichia coli
atgtattacgcatgccgctggcgggatgcatcgccgcccgtcgctgtttttggcattccgttgccgttcaccctgatttacctgttctggtgcccgtttccgtccggcaacacgattttcatctgcacgcttgtcctgggcgcattcgttctgctgggccattttggctggcgacttcaggtgctgctccagcgactggtttatctctggcacggaagccgggctgccggtcgcccgtggtggtatcgccacttcacggaagcgccccgtcgctggtccggtctgtga

SEQ ID NO: 34436 - DNA, 3711 bp, Escherichia coli
atgccgtctgtatcccgataccgcacctggcttgccgtgcctgcagatgaaatagaagatctcaaacaagcgcatcccccgatgaacgggcacacacccgtcctctgggataaagagcacaaactctggtttgcccgcccgggggcggacctgtccatgctggaccgctggctgccccgaccgcaggaagtctccatgaacggcagtgatccggtcaccgagtttgcccaggtactggaaaatgccggactggttctgaaagaactgccggccatggacggtaaaatccaccgggttccgaccaccggtgacaaaaacgggcaaaaaagtggcgcatatcgcggcttcctggacggcagacctgccggctggtacagggattatcgcagcgcggatgattcgccggtcaactggaccttctccggcggagagcagacagatccccgcgcaaggcttcacctgaaagcgcattcgctacaacgcagggaggacgcagagcgggaactgaaagcacagtacaacagacaggccgcgtatgcccgccgctatgtcaacaaatgggcgcaggccacggcacatgaatacctgacccggaaaggcattcaggctgcgccgggggtgcgaataaacgacaaaaatgagctcgttattcctttccgcaaccgtaacggcgcaatacgctcctaccagcgcattccggtcaccggcgggaaggatgcccgcatcctgaaagattccgagaaaaccggtaactggtttgcgctgggtacaccgcgcaacggccagccggtgctgtttgccgagggctatgccactgccgcctccctgcacgaagccaccggccttccggtgctgatgacagtggatgcgggcaacatgattgccgtggccgaagaggcccggcaaaaatggaagcaaagcccctttatcttctgtgccgacaacgatcatgcacgccaggttaacaaaggtatcgtcagtgcaacaaaagccgcagaactgacaggaggatcggtcatctttcctgcgttcaccgatgccgaaaaagcgcagggactgaccgatttcaatgacctggacgccagccggggacgggccgcttttcagcatgtcatcaacgcccagttagaacatatcggggtttccacccccaacagtaacactccggaaatccgggaggcactggtgatcggcaacctcgtttttacaccggtccacactgaggaaaaaaacatgactccgacagaacatcctgaaacatcacccgatacagcacacagcagtgaacatgaaccggcaccttctctgcctcctgcaccgcctgaagtgcagccgtcactctccggtaacgttcatcatgagccggtgacgaccggggaggagatgaagcaaccggaaagcatcgctgaccaggactctccggaggcccccacggacaacacacagacgtctgacgttgtacctgacacctccggtacaaccgctgagctccgggaaggacatgaggctgtcacgatggcgacagcgcaggactggcaacactttgaggaggagatgaaacagcccgaaaatatcgctgggcacgacgcggatgaggcatccgcagagcacactgcgttcgtatcgtcggcagatgccccggaacctgagccctctgccacagagacagcatccactgaagcggctgtcagcaatgaccaggcagagacaacgctcacacaacaggaaaaacctgacacggcagaaacctccgcagaacatacggatgccactgcagcagcgccggcagaacagacaccgtctccgtcagcgagtgagccagccctccctgaagatactgccggcgatgagcagctggcagcagagacatccctgcagccggatgtaccgggtgcaggtgatgacggataccctggctatgacgtcgaataccaggactacagcgcggaatatgaggactatgatgccagtgccctgcaggagtacgcagccatgcagcaggcagccacgatgcagcatgcagaggctgaagcaggaacggagacagaacagacaacggacgtgccccttcagcagccccaacaaccccgtacagaaccggcacaaccgcaggccacctcagccgcccccggaggcactgcatccccggcatcagaagcgtcagacaacagcgagcccgacgccatcacctatggccctgaacgaaaaaatcatacccgcgtccgcacggatatcgacaaactggtccgcagtctccagaccagagagcagtctgaccatacactgcagtatcaccttccggatggcacgcacgccttcacagacgtcggagggcatctgctcatggctaaagggcagagcacgcaggagcagtccatcctggccgctctcggggtggccatgcagtattacggcggggtgattgagctcaccggcagcgatgagttcaaaaaacggacaatggaaatcatcgtcgactatgacctgaaggtcacgatgaaagatcccgtgcagcgaaatgcgctggagcagatgcgggcagagcgggagaatcctgacaccatcatgacgcacatgcccacaccggaactgaacagaacaaccggacaggccatgacgcagccggaagcaccggtaccgtcacaacccgctgctgtaccgccccaacagcccgctgaagctgcggcatcgccgacacaggatgaaacgccacagccgccggcagaggcatccgcaccaccggtcacacccgtaccgccggcaacagaaacgcagaacgctccggcacccacaaccagcgataatgcgcgtatggttccgggcaaacctgtcactggccgtctggaggcatccggacggggcaccgatccggaaagcaaccagatgactgactggatacagctgaagacacgctcacagaccgtcactttctggggggatgccttcggcaaactgacccgggattacaaagccgggcagatggtcactgtgacaatggcctcacgcaacgaagcacagtgcgaatggactatgcagtctgcaggaaaagcaacagcaaggatctctgaagagccgcaacccggcgaacagatgaaactcttcgatgccgggacattccgggcagcaatggagcagatttgccgggtactgccacagtggcaggatgagctgaaacaacttcctctgccgtcacaggatatcgccctgctggacaacgggcgtccgggcaccccgactgcctcatcccgttgcctgcccgcaccgctgccgcgcaacagtctcacaatgatcgccggtggcagtaatgacaacggcctgcaggcagccctgttccggacagccgggaattactatcagggcgtgatgcggctgggcgggctcgggcttttccccgttcttgtcacaccggtcaaccagaaactggtcgttacggccatcacgaaagacggcccacgctatgccggatacggtaatgcccggacgtcctctcaggacggcacccccgtacctccggacacgctcagcttcacactggccggtaataaaaccacactgcatgtgccgctgacggccccccgtaagctgtctgccgacaacttccggctgctcggtttcccgcaaaccatgcagcagtgggaccagcagcaacaggcaaaaaaaacacagcaggcggagatggcagcacagcacaaccccgcgccgggacggtga

SEQ ID NO: 34437 - DNA, 390 bp, Escherichia coli
atgacacagagctccgtcagacgggtggctgcagccacctgcctgcttcttttgcctttattcgccaccccggcctccgccgcttccacatgtcgggcatacacagcagcacaggaaggggcctcccggggctattcgctggccaaatcagcggcgcagtcctggtctgactatgagtcggattattccggtgccctggaagactgcctgtctcaaatccgggatttgtccctgacggtcaatctcagtgccaacatcgatgccctgctgcagtcactggagaagaaagtctgcagtgtcgtggtctcctcagccaacagttacatcccccccagcgtgacgctggacccctggagcgaggttaccagttctgttaattcactgttctga

SEQ ID NO: 34438 - DNA, 699 bp, Escherichia coli
atgcagaaaacaaaaaaaccggcctcggccggaaaaacaaaacaatcgtcacgggagaaaactccttacgccgatgccgtggccctgatgaaaaaagcagccgacgtgctgaccatcggacgcggcatgatccacatcacgcttgtgctggcgtatgcccttgccgtggtcgtcacgctggcaggctggctggcctggaaggtcgcccaccccccggtgcactacttctcaacagagaacggcgttatcacccgtattgtgccgacagatgaacccggatggtcccagaatgacgccattgatttcggtgcccgcgccctgcgcgaatccttctctctggatttcgtgcacttccgggagcagacggcggcggtccgtccgtactactccgccgaaggctataccggctacgtcaggggactggaaagttccaacatcctctcctccatacgcgatgacaggatgaacctgaccaacagtatcggtgccggcgtggtgtcaaaaaccggccgcctgagcgacggcacctgggtctgggtgatccagtaccgggtcagcctgcagcttgttggtcagaaaaccaaacgtcccgaacagaagcaactattcgaagtcaccatccagcgcacggacccccgtgtgaaatacgccgggatggaaatccgccagatcatctcccgcgacgcaccgcgcgattaa

SEQ ID NO: 34439 - DNA, 948 bp, Escherichia coli
atgccaaaattactccctttgacggggctgcttcttgccgtcctgtcaggccaggtactggccgaatccacaggaacaggaacgccggggacatccgcgcagggtacgcggggaagtgtgccggcctcccccatcagcggcaccgcccccctgccgggactgtctccggcagctcaggaggcggctgcccttgactcaccgctgaccccggacgaaatccgggaactggcaaaacggctgcaggccacggagcaggcgctggccgccccggtgaccagcgtcgttccccgcatcagctcactgacggtcagtctttctccgggggccagcctgccggttctgcgccttgccctcaataacgccagcacggtgacgttccaggacagcacgggggccccctggcctctggcggcaccgccgatgaatccgaatgagcatctctttcagatcaactacatcccggattccccagtattttccgtcctgccgcgtaccgcctgggcatcaggcaacgtgactgtacttctgaaagggctggaagtgccggtcatcataagtctgaccagcggcgatcccgacagcaatatatcgtcacgtgaaatcgatgcccgtcttgatttgcgcatcccccggcagggaccgcaggccgctgccggccccacaccaccggcacgggtggcgcttcatgatgaaacgctgcaggcctttctggacgggacaccgcccgatggtgcccgtcgcctgaaggtcaggggtgggccggataatctgcgggtgtggcgtatcggcgatgacctgtatgtccggtgccgtgcaatgctgcgcgatgagttcgaacagacgctgtcatctgccgacggaacccgcctgtggaagctgcccgtcaccccgttgttaacgttttccgttgacggtcgcaccgtcacagcctcaccggaactggagtaa

SEQ ID NO: 34440 - DNA, 1296 bp, Escherichia coli
atgtccacagaaaaggatgccggacagtccggcaaaaaaggcgttgtactggtcgtcgctgcgctggtactcatcgccggcataagctacgtcgggatgggctggttccagccacaggaaagaacacagagcagactagccctgagtgccgccagcgtccggacaggcaccaccaccgatgaaacggcgcattaccgggagctcctgcgtcaggataacgatcagggcgcagcagaggcagaaaaaaacaatacatccttcctggccagtattccccgtggcgtggatatccccgtcgaaaacacagacacgggaaaaaccggccaatccggtaacgacgaaaaacgcacaacacgggaaaataaccggacgccgccgtcacagcaacgcgtgaacgacaaggacaggcaggagcgcctgaagcagctgctggcacgcctgcgaaatacgacaccggccacactgacggtggctaccgtacccggcggggagagcggcgggagcgggcgcagcaacgggggacagagtcagggcatctggcacaactggacctcatcgctgtccagtgggaacagcatcattcctgccaccctgcgcagcacggatgtgaccacaccgcccgtcacgataattccggcgctgacccgtgtgccggcttatatcgagacggcagtggattcggacaacaccacgtctcaggtggtggcgaatatccctgcaggtccctgggccggggccagactgcatgcggcccgtatcacccttgtcggcgatggcgttgaaatcaacttcacccggatgttctggcagggtacggaatacaaggttaatgcctgggcacaggatcagaagacgctgcagtcttccatcgccagcgacgttaaccaccgctacgtgtcccgcattttccttcccgcctttctgggaggctttggcgaggccggctcgctgttcaaatccgccaacacacaaatcctcaccaaccagtacagcaccctcgccagtacggcaatgccgtccggcaaggtgctggcaggcgtgattggcggaggaatggcagaaaaaactggcagtgtcctgcagcaggatgcggcaaaactgcctgccacccaggtcaccgtaaaccgcaatgaaaccatcgccatccagtttgtggacggcgtctacagcacggatgccatcaaacccggagccagccggacaacacaaaacgcacaggtcacgtcggagagccgacagccaacactggcgcaacttcgcgcccgacagaaaacagaggacgaatccgatgagtaa

SEQ ID NO: 34441 - DNA, 885 bp, Escherichia coli
atgagtaagcagcacaacaacaccggtgactttgacatcccggacatactccctgatcccgccacagacacagacctgcaggtgctcacggcaccgccaccggacacagaccccgaccttcctgaagcggacgaggaaatcacggataccgatgacgatccggaaagtgccccggaagatgaggaagataccccactccccttctggcactggcagcgcccgctctttctcggcctcagtcttcccattatcggcggtattctgctggccattgtcgcccttgtcgtcacgtcactgccctcctcaccgccggcaggcaacgacctgacactcaccccggaggaaacgacggcggccgacacagctctccggacggcacacacgcagccccgggcgatggcgatggacaacaaccagcccggagaagccgtccccccgaccggaggcactgaccttcaggcactgacccgcgctctgaaggaggaaatggatcagcgaacagacgccctgcagtcgcagataacaaaactgtccgggggcgtcgccggcctgtcagatgccctgcgcaaggatgaagacgccctgcgtaacctgatgacccgggtacaggcgctggaggcggcagtccggcagacaaccacggccccgcgaactgcggcgcagcctgcacaggcgacagacaccgcaccggcttcccggcgcaccaccgtccactccgccatcagtggcatgcgtattgtgtcgatggacagcggcatggcctggatacgctggaaagacagtacctggtctgtccgtcagggagaccgactaggcagtgtgaccatcaccggtattgaccctgctgaacgcactgtgaccaccaccggcggagtgatccactaa

SEQ ID NO: 34442 - DNA, 534 bp, Escherichia coli
atgtccacagatgcactgtcagccatcatcagttttggcaacaacatctacagctccggtctctcctttctggtttcctggagcacattcgttggtgtggcaggctttgcgctggtactggccagcgcccacagcaggggaaaccggggcggtcaggtgtatacagggaagacactgctcagcctcttcttctgtgccggtctgacatgtctgaagccgctcgtgaatgcttccggtgcgcagtttggctttgaaatgacctcctttgacagcatttcctgggcccccacatccacgtttggtcagggggctgaagccgtcaacgccctgctgacagtggcacgcctgttcggtattggctgtttcatgggcggcctcaacaccctgagacgttccggactggaaggtcatacggcactgagtgccagtgaaaacaccagtctcggcttcggaaaaatcattttcggcacgctgctcgcgttcatcgacaacgtgctggatgccacgctcacttcgctgaacatccatttttaa

SEQ ID NO: 34443 - DNA, 423 bp, Escherichia coli
atgcgtaactatctccgcacgctgtccctgtgccacccggctgaacgctggctgatgatctgtgcccgtatcagctggcacctgacccgccagcagcatcgtctggtgaaagtactgaccgcgctgctggttcccctgctgcccattcaggctcatgcctcctcagactgggccgcaattctgaacagttgggcaaacggtgccgactccggcctcacctccctgctgacctacgcaaaattcgggggggctgcgctgttcatcgggggcctggtgggtttctcccgtgtgggtaaaacccccaacgtcacggcgaaaggctgctttattgccctgctcgtcggggccgggctgttctccgtgggggcgctaatcaacagtacccagagccagtccggtctggaaaccaccaccgtcggttaa

SEQ ID NO: 34444 - DNA, 537 bp, Escherichia coli
atgctgattaacagaaaaaaactgccggcccttgccgttctcttcagtcttgtcattctgccatccgtctgtccggctgcagagcaggtaaccgtgggattctcccccggcggcagtgctcaggcggcagtgctcgatgtcatcggtcaggcccgggaaagcattgaccttgctgcctattacctcacctcaaagagcacggcacaggcactggctgaggctgctgaacggggcgtcagtgtacgcgtggtggcagacaaaaaagccaatagttcacgctataccgccgccacctggctggcccgtcacggtattcccgttcgtgtgaacgggcattacgacatcatgcataacaagttcatgattatcgacgggcggaccgtggaaaccggcagcttcaactacaccgcctctgccgacaaacgaaacgcagaaaacgtcattgtccttcgcgatatgccggatgcagcacaaccgtatgcccgggaattcgaacgcctgtggaatgaatccgaaccgctgaacagcgggctgtaa

SEQ ID NO: 34445 - DNA, 708 bp, Escherichia coli
atgaacctgccttatccggacgttgtacccgacacaacgtacgaccagcggccacagccgcatcacggcggcatttgtccggcctgccggatgaatgccagtacactctggcaactaccggacgccagcgttctccgccaccatgaacagcatatcgtcacgctgcaacatatgctcgagcccggcaggaatacagcgggggcaacagaagcctgccgacactacctggagcagcacctgccgttcggcacagatgaagatctgacagacacggtggatatcaggcccctgacatcaactgaagccacacaactggattcacggcgtcacgcattcaggaaaaacgccgtctgtgatatctgccatgcctggctgtggctgaacggaccagcggccacgcagggtgaaatggtctggatgcccgaccttgccgccccctggatagttggcctgaaccgcctggcactccgcgacatgatgagcaccagtgatacgcgccagcaggccggacgccgcgcactggatcacctgttgctgttcagtcgccccgtgcgccgtatgttcggctcctcccgccctgcggattttgctgcaaccctgctcagcgcaccgcccggtgaacgcagcaacatgcgcaaacgcctgcggggactggcgctcatcctgcgcccggcatcccttcatatctaccgtacagagaaaccgtaa

SEQ ID NO: 34446 - DNA, 3063 bp, Escherichia coli
atgtcaatcatcacccgcattgaagacagcctcatctggctgtcccgctacggacttgccagagaatttccggaatactgcgatctggaaacagtcattgcactgaccgacgatgaccgtatccgacacccggaactgacctccccttacattgccgtcactgccagaggagaatacatgtcgacactggaaatcgccggcgcactgaaagagatgagggaggatgttccaccggatcagattccaccaggaagcccgtgcacctctctggcgcattttgcacagcacctgacacctgcgctggcgacgtttttccggaccctcggacacaaaatcagtatggttctcgagcgggaccccgaaggcggagaagcggaaatccggaacatgctggccccccagtatgcctccctgcgccggaccggcatgcagatggaggatattcttgacgagaaaatcgccacgctgtctccctggctgatccgcgaacgctgctggctttccgtctggagctcacatgaggcaaccagccgtacggagtacacggattacctgaaaaagaaaacgcagacagaaacagcaatgcctcatgccaggtacggacagccgctctgggaaccgatgttctccgggctgaaaatccggcatgacgcacttatcaacacactgattcatgccctgtctgccgacagggaaggtcagcttgtcagactgatggaaacggcagaagtctgcagggaactgcgcagccagatactgcgcggacaggttccccgggactggcgaccggtccttgccggtgaaaacagacccgcaggctggccacagcaggatgatatatccgcactgctcgccccaccactgaactttcagctgttcagcgatgatgtggagacatcgggcagtctggtccgggctggcggactctggcatggcacggcgagtatcgtgctgccaccgcagcaactgcagagcatgaacgacctgattgtccgtattccccggagcgtcccctggcggatacgcatggatattgcgcccggcggcatgaaaaagctccagggaaaacgttttctggccagtatgggacgcttcattaattccatccgccccctgagcgatgccattgagacgcttgctgaaactgaccgcaccacgccggtctgcgtcatgaccatcgtggcatccacctgggcggccacaaaggaggactgccgacgtaacctgatgctgctgcgttcagcactggaaggctggggcatctgcgaggtcaccactacgtttggtgacccacgccgtggctgggtgaacagcctgctggcggcctccacctcatccggcccgaacctgctctacccgccgctgaacgaggcactctggctggcgcccttcaaccgtccggcatcggcctggtcagatgacgcgcaggtgatggggcatgtagaggacgggaaacccgttccgctggggctggccagctcccgacagacaaagttcacggagattgtcggtggtgaaccgggcaccgggaaatcggtactggtgaacgccctcagtaacgcaatggtgacctctgccatgcagaaactgccgtttcttgctgtcattgacaaaggatactccgcgctgggtcagatccagctggttcgcgataacctgccggaagacaggaaagatgaggcggtgggcatcgtactgaagaacagcgacgaatactgccgcaacccctttgacattctgttcggtgcccgttatcccatcccgccggagcgggagttcatgctcaacctgctgtatgccctctgcattgacgcctcgaaagccgatgcccccaacccggcagacacccgacagattttgtcccggatcatcgatgccgccttcacgcagaccgcagagaccgctccccgcctctatgaatacggcaccctcccggcggtggaccgggcgctggccgagagcggcctgcgggaaatgcatgacgcagagtggtggagtctctgcacctggtacgacgtgcgggatatgctgcacgacagagggtatcaggcagaggcgcagcaggcgcactaccaggccgttccggagctgacagacatgatcggtctgctctccactgaagccatccggaccaccttcggcaccgtgcagcgtgacggctcacaggagctgctgctgagttatatccagcgctcgctgaccagcgcccgcagcgagtacagaatgctggcaggccggacacgtttcgccctgaacccggacacgcgcctgattgccgttgacctgaacctggtggccggagatgccacgccggcaggaaggctgaaaaccgggattatgtatctgttcgccgggcaaatcaccagcggggacttcatcctgccgcagtaccaggaagaggtgaaaaaaacgctggcaccggcatactggccggccatgcaggaacgtattcgccagctggaccaggaaattaaaacaaagctgtacgatgagttgcacaatgtgcggggtattgatttcattctgcaggcgctggaaaccaacgacagggaaatgcgtaagttcggtatccggaccgtgctgtgctcccagtatctgggggacttcccggaggcaatattaaaatctgccaactcactgtggctgatgaaaatccgggaaggcgacaaggagcttctccggaagcactttggtgtaccggacgtgacgctgacacgcttctcacgacataccggaggtgccgcaccggacggcagcggaacatcgttcctcggcgtgttcagaacccgcctgggaacaatggcccggatactgaaaaacacactggggcccagagaactctgggcactgaactcatcaccggaagacagcgccctgcgccgtctgctgaatgaagaggtgggtacgaaaaccgcacgccgtattctggcagagaactttccgcacggctcggcagcccgggtgattgagtaccgccggaaacaggccggtgacagggaagcaacgtcagtgacggcaggactggcgacagaactgctcggaaagcagggttatcgtctttaa

SEQ ID NO: 34447 - DNA, 1212 bp, Escherichia coli
atgcgccttactttttgtcggctccctgctgccgtcttcggcctgggatgctactgcataccactggcggtctccgcagtgaccgtgaatgtgaattcaagcgttcccatatcaaccgaggttgttccccagctcagtaccgcaaacacggcactggccagcatcctgaccactgagcaggaaatcgcaacggcgattgcggaaaacgcgtcgaaaaccaatgccatcatcacgcagacagcgcaggcaaaccgcgaacagcagattttcagtaatcaggtccagcggcttgaggaagcccgcaggagcttcactctgccggaaagtatctgcagtgaatccgcctccggcgtggccgttcaggcccgcaacgaggcgcgggccaccacatccagcctgtcttccggttcagggatttcaaaagccgccgtgaaggagcgtttcaccacgccgccggcctccgaagccacggatgcctatacaggtgcagctgttcatgcgtcgtactgtacggaggtcgattacagcgctttcggcggaaccactctctgcccttccgttggcagttatccgggcggcgacagccaggtccggtcactgtatgacggagcggggaaaacaggaaagactcccgacctgacgttctctcaggaccagatagatgccgcacaggcctacctgaaaaacacggccagaccttctgccgggcgaacgctgaaaaaaggggatgccgtcacgactactggcatggcctacaccggcctgcagaatgaattcaatgccattctggatgcagctgcagaaccccagcagtccctgattgctgacagtacccccaattccgccaccaccgctgccgtgaacgaggccattaacggctctgattcggcaaaaagctattacgaagccacggtgtcagatacggccagaacgtccggaatgagcaaccgggagtttgaagcctttgaagtgggacgccgctatgccaacacggattatcagacggacctgcagcagatggacggggacaacctgacacgagaacaaatccgcatcagttcgctgattgcctgggagctgcacgacattaaagagcagatcaggaaaaacaacattctcacaggacaactgctggccgtcaccgcacgcgattcctacgcggcacgactgggcgcgcttgaagacaaaatcaataacggagtcagccgatga

SEQ ID NO: 34448 - DNA, 564 bp, Escherichia coli
atgacacactcccctgaaaacaaagagagcaacattctcacacgcatgggccggaccgtgctctgggtccttcttccggtcgacgccctgcgtgttatcgggaaaaccgcccgcaaccaggctaacgcccgaatgaaggatgcccggaaacaccttcccggcctgtccggcacagccggcgatgaaacaacagcaccggacaatcagaccactgagggctgggcacaggccgtggcagcgtcaggcaaaacaccggcacagctggagcagggataccgccgccagcaactggtattccgctttattttctggatatctgcgctctcaaccggttactggactacccggactcttgacaccccgtccgggctgtttttctccaacatatttctgatgctgggctgcgccatgtgcggattatcgcagtcactcattgcaggattccggctgtggcagatacgcaaccgccgtgtcagcccggcagaaaaaggcacatttcgtcatttcctcgctgagtcaaactggttcagcgaggccacaggtatcggcaaagggaaacactga

SEQ ID NO: 34449 - DNA, 225 bp, Escherichia coli
atgccactcatcattcaaatcaccatcagtgaagacactgaacgttcacgccgtaaaggacaggttccgggctgtcatattcatgtggatcagatatctcccgtcatggctgccacagaggccgaacaaatgacggcagaaatgctgctcagtcacggcttatcgctcatgaccccgtcagcatcttttcccaccacgccagacgccaccaccaaaaaacactga

SEQ ID NO: 34450 - DNA, 2145 bp, Escherichia coli
atgaataaaaaaatcagcctgctggtcacagcgggcctgctgccattctgtctgccggcacaggcagacgacgtcacatacgaaaccattgcttccgcagcggagaaaagcactgacctgtcccgtcaggcgctggtcaccatattcggagatgtggtcgtcaacccgttcagtttcacgaacgccagtgtcatcggcaatacatttgccatattcaacgggattctgtgcgggctggctctgttctggttcggcttcattggtatccgcaaggttatcagcgcggctcaggccggacgttttcagggcgcatccgcaattatcagcaccctgctggcgtttctgggcattgtgcccacggccagcggctggtcactctcgcagctcattttcctctggggcgtctcagtgatgggcgtggggggagcaaacctgatagtcacgactgccggtaacgatatcgccggcgggtacagtctgacgacccagccaaccagtgccagcacaaggacggcagcgcgaggcatctttgaaatggagttgtgcaaatatgccatcaaccagtcgctgtcagatctgaacagcctgatgcagtcggagacggcctacatgaccaccacaaccagcagtaccgacaaaagctacacgctcacggtcagtaacggcagtggcacatgtggctctgttgaactgccttattcatctgccagaacagctgtctcagacagcttcttcaatggtctgagcgaccaggatgtcagcggtatttatactgcccagaaaaacgcgctcagcacgatgattaacacgatggactcggcagcaaaaactttcctgacgaccttcattgaacgccgggataacaacaccggcaccttcgaagacgtggaaagtatcattcagtcggctgcatccagctatgaaagcacggtgcagcaggccatcaacaacgtgaacggtgaaaacacgatacaggaagcactgacagagtacctggacacccagggttggatcacactgggcgcgtggtatcaaacatttgcgaccgccaaccagagactggcaagcattgctaatcaggcaccttccgtgacatcgctctcatcaatcggagagtccggtccaaccgacctgtaccaaggggtaatggcggcctacaaaaccaacctgcaaaacacaacttatacaccgacatcaagcacatcgggagtttcattatccaaatatgaaatggatagtcaaaatgctgaggaccccaacacactaatatccaagttattagaacagtcatttggaattagcatgatccaaggtttcataaataccttaaatgaggatacttccagcccattaataacgatgaaaaagattggtgactatacactaagcgcagttgaaacaacttatggcacatatattgccgcacaagccataactaaaggagcaggaagttctgccattggctggttctttgataaattcactggagcagctacatttattaataaaatattctccgccaccgcaccggctattaactttttccttttatgggtctttgttattggctttcagctttctatatttttacctgcaataccattcatcttctggatgattgctgtcggcaattggatagtgagtgtattaataggttgtgcagcaggtcctctctgggctgcaacacatctcggcgtagaacatgacaggggaagtcgtgctgcctatggatatatttatctgatcgatgggatgatccgtccttcattgatggtgttgggttttatattcgcatctgtcgccgttgttgccgtaggaacaatactaaacaagattttcggtattgccctaacgaatatccaagcaatttctctgacgggcattattagcgtcataggattcctgatgatttatgcaaggatatgtacctcgatggtaaccaatatatttgcacttcaggcttacatgccagattatattatagctttcgtcggaggcagagaggcagcaaatacattctccggcatggttgagtctgtaaaaggtatatttgtttctggcggcagtaacttaagaagatctcctgccacaaacattattcagaagaaggatacaaataaaaatgatgatggtataaaaagttaa

SEQ ID NO: 34451 - DNA, 954 bp, Escherichia coli
atgtatagcgaagtaaagagatataaatggtatcaggaaatcgctcaggcattatggtatccgtacttttttgctgcattccctttaattttattttgctgttggtttaccatatcaaataataccggtttttattataccagaacgcatgacagattttactactgggcatggttttggttatttatatctttcattccagtcatcatccacttctggactatgcacaaacgaacagcagtcctgaaaagagttgttgaatatgtgaaggaagaaacaggattcactcttgcacggggatggagagacgaggtatttctccgctaccattccacctgggtgggtatagataacattaacggtaatctgttatatgtgaaagtattccccaacggtgtactggatgttataggcctcagcccgtctaatatcagtgcttacggaattgaaagtaataagttaatcacattacatacgaatctgccgcgatatccattcatcaaatggagtgatttcggtaaaaacgaaagattttatgagcttatcactcaattcatgaataatcacagcggtgacaacagattccagtcacgcatattctcgttgcgcgagaaactggaggatatatcaggcctcatcgttccggatatttctatcacaaccggcagtaatatgactcatgccgaaaaagtcgcacaggcccatacaaacgcgcaaaaacttaaagcctggcaggcggaaatgcagcgcaaggaagacgaggagcgcgcgcgtgaacgccagcagcagaatgcaaaccattcagcaccggcaatggatgaaccggaatatgttgaactgccacgaatccctgaattgtcaccggaagagcaggcagcactggacaaatcgacggaaaaagagcgcgcggaaatggagaaaattctgggaccaatccccacgtcattcaattaa

SEQ ID NO: 34452 - DNA, 2214 bp, Escherichia coli
atgagacttttcatcgccgaaaagcctcaggtggcaatggccatcgctgaggcactctccgatatcaacagcacgcctgtttccagaaaagacggctacatcctctgcgggaaggatgccatcacctggtgtctcggacatcttctgcagcttcaggagccggagaccatcaatcctgactgggcaatctggaaagcagaagacctgcccatctggctgtggcctccccgttactgcccgagaacgcgccgggagccaggcaagcccccagccgaagaccccgctgtactcaggcaactgaacgtgatctcttcccttgcccgacaggcctcacgtatcgtgcatgccggagacccggatgacgaggggcagttgcttgtcgaggaagttctggtctggatcgggaatcagttgccggtggaccgtatcctgattaacgacatcacgctggccaccgtaaaaaaagcgctgtcagacatccgcgacaaccgccagttctggccactctaccagcgtgcactggcacgcagtgtgggcgaccagatgtttggttttaacatgacccgggcctgtaccgtggcggcccgcgcacgttacccggaaatgcgcggcgtgcttccggtgggcagggttcagactcccacgctcgggctggtcgttaaccgctggctggccgtcaaaaaccatcaggaagcctggtatttcaccgtggatgccgcattctctggcgcggaacacgcgatcgaagcccggatgcaggtgccggaagatgccccctgcgatgagaaaaagcgtatcagtgacgagggctgggcaacccgctgcgcgcagtcactgacaaaacagcctgccgtggtggaaagcgtcaggacaggcaccgaggtaagtaatccgccgctgccactgacgctgctggatctgcagcgcctcatggcccgtcagcacggcatcgatggccagaccacgctggccatcacacagtccctgcgcgacaactggaaagccatcacctacaaccgcagcgactgcccgtacctttctgatgatcagtatgcggaatcccccgcactgcttgacacactgcagcgcacgggctgctggcataacctgccgctggacccgtcacgcaaatctgccgctttcaacactgcaaaggtgggggcacataccgctatcatacccacgacgtcgctccccgatctgagcagactgaatgaccaggagcgcctcgtctggcagaccattgcggaatacttcctagtgcagttcatgcagccccgccagcgggaggtggtgaccgtaacgctgacctgccggggacaacgtttcgtggtccgtgcccgacgcctgctggagccgggatacacctcgctgctgaaagcctcccgacaggaagatacggagcaggatgaacagggcacactgcccggggataacacggcctggctgaaacgtctggtaccgggacaacagctgcagtgtgtctccgccacggcagtccgccacaaaaccacaccgccgcccctgttcaccgaagacacgctgctggcagcgatggcacgcattgctgacttcgtcaccgatgaacgggtccgggcgctgttgcgccagaaggatgaagacaaggaaaaagagaacggcggtattggaacagccgccacgcgggccggccatatccagattctcaggcgtcgcggcctcatcacagagatgaaaggcaaactcattcccaccgaaaacggcatcgcccttatccgcagcctgccgcccaccatcacccgcccggacctcacggcgctctgggtcgaacgccagaatgccatcatcgatggcaggatgaccgtggagcagtttgctgaaaagctgcacgaggaactgaaagtgctggttgtccgggctgcagatatcaacggaataaaaccaggcggtgaccaggcagtcagcctgccctgccccgcttgtcgtaaaccgctccgcttctggaaggacaacgtcagctgttcagcccggtgcgggttccgcctgtcaaggacgctgctcggcaaggagctgaccatgcatcaactgaccacgctgctgaccacaggacgctccccgttaatcaggggttttaaagggaaaaatgacaaaacttttgatgcgtatctggtgttccgggatatcaggaaaggcgatatcggctttgtgttcccggagagaaagaaaaaacgttaa

SEQ ID NO: 34453 - DNA, 1194 bp, Escherichia coli
atgagtacgtccacaaacagtgtgcaacagggtgagcagggacttgccctggttgccatgatcatcatttcgatcattctctttctggttgtctggctgaaaggcacggtatatgccacctgtgcgtttctgcacagctgctggggcattctgctggcactcccccgggatttcgccctgcacaggctggcagcagagaagtacaacctgctcgcagaaacggccgcacgcgctgacagtatcaccgcctccgaatggctggacgtgatggcagacaccgtcacgatactttatgccgtgctgttcccgctggggctgctgctgttatatctctggtggggacatccgtcccagaaccggttcagccgcagacgcgtcagcatcaccacactgccacacatgctcgctcccctgtcaccggccctgcagtacatcctcgcccgcagtaacggccggaaacggcttctgctggacctgccgtccccgacaaaccgcctggcacagacaccccaggcctttgttaaaaagtacagactggtttccggcagaattctggatgaaaggaagacggcagactgtttcatgaaacaggccggtccggcgctgacggggtggaaaagtctgtggccacatcaccgtgctttatttaccgtcttcggactgcagttttttctgcaggaccgccccgccgcagaagccctgctggacaaactgaacatctccgccgccacggcccggaaaacgggggcttaccggaaatgccggcatccactgccggactggtcactggcaacacaggatttcatgcgcgtggcacgccatcctgcggcacgccggtggctgaaagagcaccgttttgtacgcagtggtctggtctggctgtatgcccatgaccttcgcctgaattcgccccgctggtactggctgaaagagctcgagcggccactgtggtatgccctgcacagggcaaacagcagcaaagggttcattgagggggcgggtattgtggccatcgccagaaacgaagggctggcgaaaagtctgcaccttccggttccggagcctgacgtcagcatggcggtccggggactccgggcagaccttatcgcctgtggcctgttgtgggaggaagaatccgccccgcccgtacaacaggaaacacacaacgccggctgggaatgcccggagctgtga

SEQ ID NO: 34454 - DNA, 1209 bp, Escherichia coli
atgtttcagaacgatatttttgacgaagaccagaacagcacctggcatgcagaatccactgacaactatttcatcgtcacggaacgctacagcgacaacacggaaagggtggcactggtactgaaaaaggacataacacacctgtactccccgacggacgcgagcggcatcagactctcttacagtaaatggagcggtgatgagctgactttaatgcccgacctgtcgccggaaaaagcacgcagagtggttgatgccattgcggatgaaatccgccgcagggagagtaccccggtcatacttcacccgctaaacaacataaaggctgaacgcagtatcacccggttcgcccggcgaattgttcccgtggtcggcggcatactcctcacagccggactggtgtggatgatatcgggccggggcggttcattcaccgccggtgagcatatctaccgtacagatatgacgccacagtatgtcggggaggacaagccggagccggtgcaccgcgttaatgaactcccccttcgccaggtggtcagttcagcggtggcaacccgtgacgccgccacacagcatatccgtgaccgtttgccggcgacacctgatgccttgactcagccacagccgtctgcagaaagggctgcccctccggacacatcgacacaaccggcgtcaggcgaacagcgtctggcggaaaacctgaaacgcgcggatgaacgcaacattttcacggttccgctctctgaaggacatgagcggacgctttatgtcttctcagacccgtcatgtccgcactgccgtgatatcgaacctgtgctggaacgtctttctggcagtttcaacattcgcatattcccggtgtccgtgattggcggagaaaaatcggccagccaagcgcagaaagtgctgtgcgaatccgatgccactgcccgccgcagcgcctggaaggcactgttcagcccgggcgagggcatgctgtttccggtgaaaacggagagcggggacacgaaagcagcatcagactgtgagctggccgcccgcgccgtcagcgtaaatgacaaggcattccgggcatatcagtttgccggaacaccgtgggtgctcagtgaccgtggtcaggtcgtcccacaggagttactgaacaacgcaacagaagtcgctctctggctgaagctgaacgacaacaccgctgacgctgaacaatag

SEQ ID NO: 34455 - DNA, 2754 bp, Escherichia coli
atggttccggtaataccacaaaaacgacgcgatggcggatcatcctttgatgatctggtgtcgtatattgtggtccgtgaccatgaagagatggataaaaaataccagaaggttgaggcctgcgaactgcgcggttcggagacgaagggtaaccgtttttcgcgtattgtcgactatctctgcaaggagagacagtctggcgtttcatcgcttgagaaggtctacaaggatggcgtttttcaggagaacttccacggagtgacctgctttcataactgcagttcagtggaaacggcagtggatgaaatgcagtctgtcgttgatcgtaaacgtagtacgcgtagcgatactgatcctgtttttcattacattctgagctggccggagcatgaatgtccccgtccggagcagattcaggactgcatccgtcatacgctgaatcgtctggggctgaccgggcatcagtttatggcggcggtgcatacggatacagataaccttcatgtgcatgttgccgtcaaccggatacacccggaaacttttcgaacccgtgctgtcggaatggcaatagatcgtctgcataaagcctgtcgcgagctggaaataaaacatggctttgctctgacaaatggcaattttattgttgatgaaaaccagcagattgtccgtcgttccgcgcatgaacggaaacaactgagtgcatggaactgtgatgcgcaggagaatttcagaaactatattcgtgtaaaaacgttaccttttgcgggtaaattccagactcagggatggcgtgctttttatctgtttatgggcagtaagggcctcacgctggacagaatgagcaatggtgaatttgccgttcgcgatatccgtaatcctgaacgttttgttgtgccgttatctgattttggtcatgagtggaagatgcagtcgctcgtagccgtcatgggagaatggcaggcgccttccgaaaatgttctgcagcagctggaaaagctacggcacagaccggttttcttcgaacccaaaacagattatgtaccccgtccgctttaccggatgcaggagaaatacagtctggctgattatgcgcgggagcatattcatgatgcatttgaaaaaatgacatggcgtggcgctcatcatacagttgatgagcttcatgccctgtttgcccgtaacggtctgtatctgcaggtcatgaataacgagcttgtggtgtgtgacgcttacgacagaaaacgaactcccgtgcgtgctgaatctgttcatcctaaattgcaggtgcctctgttagcggatcttgatggcggctggaaagccgtgccacgagacatttttacgcatgtcccgccggagcgtgcatataaatctgaagggcttgagcgtgtggtgctcagtgacagtgaacggcagaaaactttcttcggtgcaggtccacagggggcactgaaacgcgaaatgttctctgacagggagtccctttatggctatgcggttgatcactgtcggcagaaaattgatgacatgatccgggaaggcagtttcacgtggctggcgtgtcatgagatgtttgcgaaggaaggactgctgctggttccgcagtacaaagggctggtagtgatggatgcgtggcggagtattccgacgccggtgcgtgcaacggccattcatcctgacctgtcactgcagattgcggagcagcatgccggtccgtttgagccggtgccgatggatatctttgaacgagtgcctccgcagtctcagtaccggcagtcgttaagtgcacgtgagaaagcggtgcgtatggagcgtcgtatagagcgtgccactgaacgtgcgaatctgcgcgaacgctataacacattccgtgcaacctggcagaaaccggacctgcaggcaaaggaacgttatgcgcgtatcaatgaggcgacccgtcgtgagaaggcgatcatccggcagcgtttccgtgacccgcgtatccggagaatacattacaacgcagcagagctgcggcgttatcaggccagaatgaacctgaaggacatgctgaaagaagaacgcatacgtcttgctgaagcagggaaactgcatccaccttcatggcgtcagtgggtggagcaggaggcgctgaagggtgataaagcagcgatttccgcgctcagggggatggcatatcgtgaaaaacggggtaagaaagaaaccgtcaccacgccgggatttggcgtcattaaatttgatgccggaattgatccacagatgatgaaactggagggggctaccggtgagttacgtcgtgacggcagcattgtatacaggcaggatgataacggacggacaatctgtcgggataacggtgacaacattgttcttaaccgcgatccacagagtggtgtgctgggacggtctgcacttaaaacagtaccgttgatatttgggcgggagagtgagcgttttgagccggatggtaatgatcctgctctactccgctcgtttggtgagattgttgcctggcacaaccggaaggacccgcaacatatccgtattatcagcagaaaagatgccgatgattatcgtcaggccgcagtgagcagacaccagaagcgggttgaaaaatccgaacgggatgcgcgcaactggcagtatgttgcagagcacctggcggaacaactggatcgggaagagcaacagcaggatggtaatgctcatggcccgactccggttggtcataaggggccggggatgggacgttaa

SEQ ID NO: 34456 - DNA, 315 bp, Escherichia coli
atgagtaaaagcgaaaaacggattaaggatgcagtgattccccggattcgttgcactcaggcagagaaggacaccatcaccgaaaaggcgaacttctttggcgtcagtgttcccgaatacctgcggcggctggcgctcggaaagccgctgatcccggtcatcgaccaggacatgcttttcgaacttcgccgtctcggtgcactgcagaaacacctgtttctggagggaggacgcgtcggcgacaaagagtattcagaagtgatagtggccctgcgtgagtgcgcggatgcgctgaagaaacgcatcggcagctga

SEQ ID NO: 34457 - DNA, 348 bp, Escherichia coli
atggcaggaaagaaatttttttccgatgacgatattgaagcggcacgtcttgcactctctgaactccctgacctgaccgcaaaacgtaaaacactgcatgattttctgtctgcaatccgggatgacatcatcgtcctggtcaggacaaaaggttacacccttgccgacatcagaagcacactgaaggaggccggttatgaggtgggagaaaagacactgagggatatcattcgtgaagccgaagcgaagaaatcccgacgccgttccggcacttctccggcaaagataaaggctgtatcagctcatactgaccaaaaggataatgtaaaggtatcgccagaacagtga

SEQ ID NO: 34458 - DNA, 720 bp, Escherichia coli
atgagcgcacgttcacgggcactgatccccctcagcgcagagcaacaggccgccatgcaggctgtggctgtcacagaacaacgtcgtcgtcagggacgcacactttcagcatggccttatgccagcgctttctttcgctgcctgaatggcagccgccggatttcgctgaccgatctccgcttttttgctcctgcgctgacgaaggaggaatttcatggcaaccgtctcctgtggctggctgccgtggataaactgattgaaagttttggtgaagtctgtgttcttcccctgccatccgatgctgggcatcgtctgttcccgtccgttccttttcgtgaaggtgagcggcgtcgtcagaaaaccacgctgacagagcagaaatacagccgccagcgggaacgtgaggcagaacgacgggaactggaataccagacatgttttgctcaggcgcagattgaccttgcgtttcatactcccgccacggtcggaagctggttgtcccgctggtctggtgttgttgaggagcatgatctggaaacgattttctgggggtggtgcgggcgttttccatcactgtcatcatttgaccggtttttctggcaggaggaaccactctggcggctgatttttgaagccggtgaggccggtcgtggtgcaccggtacagatacgtgcacttgagcagtggatgatcccgaacaagctggagaacgcaatatga

SEQ ID NO: 34459 - DNA, 681 bp, Escherichia coli
gtgaacacgacagaacatcccgtgcgccagttactctggtgtgctcttaatgccctgcatgccgctcaggaaagccacggcatcaacagtgaatccggactccgccgctacctgcttgagtggctctccggtgccggcagacaccctgaattccggaacatcccggaagaaatcatggcgctgagggcactggcggaacaagaccgcgatatccccattaccggcacgctgaacacgctctttctcagctcggccacagtcggggagtgcccgctgttccgcttccgggccgcaatgggcaggttacagaaggccggatggcgcacaaccgtctgcccctggacggagcgggtcttcagcgaatccattgaactggcctgtaccggcagacgtcatctgctgcagctgagtcgcacggaggaatgcttcatgccgtccggacagatgtgcgcccccgtatacctgcagctcatcaccccgctgcaccgcagaacagagcagcttctggacgcggcagaaaacgcactggctgatgaaggctttcaggtggtgagaggatttgagcatcagttcggcatcgaacgacgtgaaatcctctttcacaccctgtttgtcggccttcccggcctgcctgaagaggcctggggcgtcagaccggaacagaccatcaccgtacattaa

SEQ ID NO: 34460 - DNA, 582 bp, Escherichia coli
ttgaaacgtgaacgtcttattccactggccatgctgggcggctggtgtgtattcgtactgttcatatccctgccgggactgagccggatgagcacctggcctgcacacaaccggaacgtcatgctgctcatgatgttagccaccatgtgccttcccctgctgttacgcccgctgtccgcgttctttcgcaaaatatgtaggcagaacagcttttatgtccgggagcagcaggacaaccacacggtccatattttcctgagtgcacacgccgacacgtcctccccggtggccatgcgtcgccactggaaagtgctgaacgaactgctgaccactgcattacgccagggcaaacgtgtctcgatgacatcacatctcctgacgcaaccccggacggacaaactggttcgtgccctgcagaagcaggggctggaggtttctgtgaaacgggatgagtgccccacaccggctttcgaacgctggaccatcaccgccagctggaccatcagccagtggaagattccccacgtaaacagacgcagcggcattgtcatcctgacgccggagagctggcgtcagccataa

SEQ ID NO: 34461 - DNA, 279 bp, Escherichia coli
atgagcaacgaagacagcaacaggaaaatatccacaggtatgcatctgtgcttttctcccctttccaaaaaaattgtactggccagaatgcgggaatcgaaaggtcgcctgcgccgcgtcggcaatgaccggggacgtgatgtcacgaatgaagctgcccgccttgtatgggaggtcgtccgggctgaaggcggaaaaatctggtgggaagaggaagatggcacttgcctggttttaaaagccgaaaccacaaaaacagatgagaaaaaaaacgcatga

SEQ ID NO: 34462 - DNA, 585 bp, Escherichia coli
atgaaaacacgtattttatcgataatcaccgccgccacagtactgtcaggatgcgcaggcagcagtacgcaaccggcgtcagggatgcagacgttactcccggaacataacccgaaggtgacgttctcggtcgataccgtgcgaacggacacaacggccagcaatcctgtatgcctgccggaaaaatatggaaaccttcttcacgagcgccatccgaacctgtttgccggtgctcaggggattatttcacgcagtgcattttttaatgacagcctgacgctgacacctgaaacgctccacgggatgatgcagaatacgccctgtgttgaatcactggtaacgtccgcaggtccggataccttcactgcagatgtctctcccggtgtcagaatgcaggtatcaccggatattcagggtaccaccggcaatatcactctgcggctctcggccacagaccagaaacgaaaacagactgttgagcagcgtatttctctcagaccggaacagtcccttgtcgtgaatggattcaccggagacgaagctggcgaaaagcgcgtcgttctcattacgcctcacatgcgttga

SEQ ID NO: 34463 - DNA, 255 bp, Escherichia coli
atgccacagcaacatcccggacgactgcaggtgctggtcgtcgacacgcgctgcgaacgcagactgttttcaacgacaacaccgacagaccccgagacgcttgcccgccgtttctgcacgccggacaactgtctcgtggtggtactacgagacaaccggtttcttttccgtctggagcgtgccccgggcagccacaaccgctggcacaggggacgtcgttcccgccatcagcatctgcaggactggctatcatga

SEQ ID NO: 34464 - DNA, 696 bp, Escherichia coli
atgaatataaattccttaccatcccccgaaataaaagacaccgatgttttcattaccgtcataaccgttctggtgatatttactgcagcattaatcccgtcgactcccccgcccccggaagtgcaggaaacatttgatgccgtttattatgcatccctgcctgcacttacgcccgtcatcctgcagggatggcagttctgctgctccgtgtttgacaagacgccggggagacaggagttatcacaagtagtgagaacagtgaatctgcatcttgcactggccccatttctgataaacgtgatatctgcgctcgtttttttcggctgcatcgcagattgcgtcgtcatttttattcacggtcatgaaccttcagcccggggaattattattcccggcgctgttgccctttgcctgggttatatattttctgtgtacagattgtacgcctcgtcccatgtacagaacggcagacacgtgacactgctcatcatgctttgctgtctgacagcctgtttatcgctggcaattattgcaggccgacaggacattttttccggagtagaaagagaaagcctgctgcgtatcatagtctcgggattatgcttcacgttttgcctgctcatcggatacacccatctctggcttaattcatcagtcccccatctggaacaggaggatctgaaaaaccgccgataa

SEQ ID NO: 34465 - DNA, 1332 bp, Escherichia coli
atgcacaaaaaacacctgacgctctttctgccgtcactcattaccggctgcgccggtttcgcctctccgccggagactgaaaacgcagccactgcactggtctttgtcgacgggcaaatcagcgaaagcagctcactcctggcacagacacagcggcggctgagtccgccgcctgtcagccccccggctgccgtgacgaacacgtccgctcaggccgtgacggcgcagtccctgcccctgccggcaccggcactcacggctgacgccgccctgtcaaatataatcatgacaggcactccgggaagcgcccctgtcacggcgcagcccctgacacgcaaccgcacagtcagcgactgggtgaaacagctgcttcccgccggctggcagttccgccaggagaatgccgccacaccggcactccggacgcgtatcgcctcctggtctgccaatgaccagtggacgcgctcactgaaccggttgctggctgaacagcatctgtgggggcacctggactggaaaaaccgcaccctgaccgtcaccacctcaccggcagcgccagccacagacagcagcccgcaggccaccgcgccggcatccgccacgtctgcggtggcagcaacgccggtgaaaacaacgccctctcccgcgccggtcagccccttccgtaacagcacgtccaccgggaaatcatccgcctcacaccttaaggtgtcgggacagcccggtgacatcccggtcgttttcctgtcggaagcccgtaatctcaccacggaacagtgggtgagccggttactgcctgacggctggaaaaccgactggcgtaccgacagacaggcacgtcagcaccgcactgaccgccttgctgtgaacgaccagtggacacgggcgctcgatgccctgctgacacgccagaacctctggggacacctggactggaacagccgcacgctggtcatcaccccgaccgctgccgcaccgctcagtaccagcgggacaggcacggcgaaggcgactggtgccaccgtttctgcactgccccctcttcccgcgccgggctggacagcagaaaaaggtgccacactgcgacagacactcacccgctgggcagcacaggtgccctgcaccgttaccggtcatcagccagggcagacctggtctgtggtctggtccgcgtctgtggactaccccatcgacgcggcattcaccctgcgcgggggctggaaagatgttctgacgcagaccttcgacctctacagtcgcgccaatacgccgctgctgggaacgctgtttgagaaacagtgcatcctcagcgtccgcgaccggaaagactga

SEQ ID NO: 34466 - DNA, 471 bp, Escherichia coli
atgccttttgccgtactcgcactggccatcgtgatgacattcttcacgatcctttcatacgaaaccgggaaacaggccacccgcacggaagagcgcgtgctgaaacgggaggcagatgacgtcgcctcacagatgatgtcgctgagtcaggccctgacgcactggcggtggaagaatccgtctgccaccgccttaccggctgtcagcacactcggactgccgttctccacaccggactcgcgtatagggtatgcactcagtggcggacgcctgtgggtctggtctgcagaagacagcacccccggtctggcggcccgtctcacgacactcacactcggctccggcctccttttccggttcagcaacggcaccctgaaggacatgcagggcaacaccgtcagcacctccggtctgaccctgccctctgccctgcagtccacttcaggtacccggctggttcacctcaattaa

SEQ ID NO: 34467 - DNA, 1647 bp, Escherichia coli
atgcgaataaaacccatcgcggcggcccttgtggcgctgcagttgtccggctgcgccacgcaccgggagttcagggagatcgatgcacagacatcggccacccgtgatcacgttcagtctgtactggacgaaacaaacagacagatgtccggtagcgcactgaccgtatcagacagcacctggatcaacccggagccggtccgcgccactaatgaaaagaagcaggtccccgtctgctggctgcaggtcaaccggactgacagcctgtccgtggatgatgtggcggccctgattgccgacagctgccacgtcaatgtccgtgtcctgccggatgcgcgcgtcagtcacgtggccacagccggtctcactcgtgccgtccagggtgaactcccgctgcccggcagcacctccgccgccgacagcaggggaagaacgccgctcggaaacacaggcagcagtggtcccaccacgtcggtatccaccggaggaaccctgtccggcctgcgctgggacggcagtctcagcggcctgctggatgacgtgacggcgcggatgggcatttcctggcgctggcgcaataatcagatacaacttttccgtctcgacacccgcacattccagctggcaatcctgaatgccgacacatcaatgaatgcgaaggttgtgggtggaaccacctcgtcctccgggtcttccggaacctccggcagcagttcactgagcggcgaacagagcacctcccagcagaccaacgtggcggtatcttcaaaagtgtacgacgacatcaaagccaccgtgtctgccatgctttcctcagaaggctcctcctggctggcaccgggcagcgccacgctgaccgtgacggacacaccggaagtgcttaaccgaattggggaatacatcgaccgccagaacgccattcttgaccgacaggtgaaactgaaggttgatgtctaccgcatcaccttccgtgacacgaagcagattggtatcgactggacggcggtgtacagcgcagcaaagggcatgggctacacgctgaccagcgccttcggggatgctgcatctgatgtggccaccatcggtgtcacctcctcttccggtcgtctgtccggttcagaggtactgattaaggcactgaaccagcaggctaatatcagttcggccaccaccaccaatacggtgaccaccaacatggtgccggccccactgcagatagcgaaagaaaccacctatctggccaaaacgtccaccaccacgtcggacagctacagctccacagagctggaacccggcaccatcaccaccggtctgttcatgacagtgctgccgtatatccgcgacaacggcaccatccagttgcagatgagtttcagcctgagtgatgacccgaccatcaccacagtcagcgcgaaagacggcagcacctccatccagacgccgaccacagatgttcgttcactgacccagcgtgccaacctgaagcccggacagacactggtgctgaacggttttcagagtctgtataacgaagcaaaccgacagggcacaacgtcaaaaagctggttcggcttcggaggaggggaaagtgctgagcgtgaccgttccatgctgctcgtactcgtgaccccggtactctcatcatga

SEQ ID NO: 34468 - DNA, 1308 bp, Escherichia coli
atgagcacatcagagattattcctgtcactctgcccggaagacgtccgggacgccccggacgtcgcatctccgtcattgccgggcttgagtggaaagatattcccgccggacagtccacaggcagacacatcccgccaggcagggggcagtatgtaaaactgcgcgccggcagcggtggcacacacgtccgcgtgggattcacccggtcaccgggtcgcctgtattcactggccgtgctggccatcccggccctgaaggggaacgggtatgcctttgtccgccacggagaacgaattgctttcctggcctgtctgcatgatatgcccgccctgaccggtgacgtgaccggcagcacggagctggtccgtaacgcctgtacggtgttcaggacaatgcacgatcgggatgaaccgaccgacggctggatgatcctcggctcgccggaggcaccggtggatatacaggacgtcctgccgtccaccctgccgggccgggcacgtctgcatccggtcaaccaggcaatacggattgtcactctgaccgtgcttgtcgccgcccttgccggcagtgccctgtggggctacagccgctggcaggaagagcagcggctgcgtcagctgcaggccatgaatctccggcaaatgcaggatgcaaagcagaacggtccggagcggcaggccgaaccccatccgtggccgcaactgccgctggtgcagaccttcctggatacctgtattccggcacttcgttcgctgcatgtctcagagggcggctggcagctgacggccgcagaatgtacgccggacacgctgcgggctgactatgaacgtccgaaaggctccacggtcacctatgaagactttcgcagggctatcacacagcacaaccgtttttcctttgtcaccctgcaggacggcggagaaaaagcccaggcaggttacagcctgagcatgacgaccggaacggatgaatccctgcaacccgttgagcagcatcttgcccgcttcctggcccccttccagcgcggggaccgcccgctgcagatggaaacggagaaaatgccggatatcgccgggcacacggtcactatcggagaccgggaggttctgcttttccgcgactggcagcagtggcagttctcactggaagaacgtctgcagccggatgcagccttgttcacgcagccgggcacgcggctgaccgccgtcaccctcctgctcagcgaagacggcgaactcacctggaaaacccgtggccagacctgggccacgcaggcacaacaacccacggagaacactcatgaataa

SEQ ID NO: 34469 - DNA, 450 bp, Escherichia coli
atgaataacatccctccggcagcacgacggctgctcatcagcaccctgctgctggtgtccgccggcagcagccacgcggccctgaccgtcggtgacgtcgatgacctgcagcagcagaacgtcattctgtcccagcaggcccgtgccgctgaactgcgccagcgcattgcccaggcacagagtcagggggccgccaccgtccccgcgccggttatcagcagcgacggtgcacccgccgcgccacaggaaaatgcccgtccgcaactgacaggcattcagggagcacgcggacaccttgaggcccgtgtgcagcatggacgccaggtcgcgagactcaccaccggccagaactggcccggtaccaccatcaccctgcgggaaatccgtcctgacagcgtgacgctgagcgacggaacccgcctcactccgggggacagctatggtcagtaa

SEQ ID NO: 34470 - DNA, 1539 bp, Escherichia coli
atggtcagtaacacggatataccggacggactccggcatctggtacaggtgctgccggccgcagcggggaagcccggccaccgagtctgttttcctgtcacggaaaccagcaatccggagatacagacattcatcaccggcctgttgcgcaccaccggtcagcccgtcatccctgagccggtgtcaccggaggagttccgcaacctgcagaatgatgcgggggatgccctccgccacgacggtagcgagcacagtcgttcagaggtgcaaacccgtgtgctgaacatgttccgcgaagcccgccgtgtgggggcatcggatattcacatcaccgttttcgtcgcacagacgcgcatcgagatgcgtatcaacggcctcctctacccggttgccatgctctccagagacgaaggcatcagctggctgatgaccatctaccagtccatgtctgacctgtccgacaacatgttcaaggcctacatgccacaggatgcgcgtctgaaacaggagttcctgcaggatgtggggctgttcggtgcccgttatgcgcacatcaacacgccaaaaggtgtctttgccgtgatgcgtcttatccccgacgacggcagtgcaccaccctcactggagacgctcggctttctgccggcacagattgcggtcatccacgccatgctcgccagtccggatgccatcatcatcaactccggtcccaccggttccggtaaatccacgaccgggcgcagcttcatggcgctctggctgcagcacggcaacggacagcgacgcattatcacccaggaggacccggtggagggggaagtcgaaggagccatccacacctcggtgaccgctgaccgctccagcgaggaggacatcaacctcgcctggctgcgtggtcgtcgtgccatgctccgtctggacccggatgcggtctatatcggtgaaatccgcgaccatgactcggccatggccgccatcaactttgccgaatccggccacatcgtgctgaccacacagcacgccaacagtccgctgggaaatctcaaccgcctgcaaatcatcggtgtgccacagggcttcctgcgcagcagccgtctgtttcaggggctgattgcccagcgtctgctgccgacactctgtccgcactgcgcacggacacgggaagaggccgggctgacaccggagcaacagcagttcacggaccgctggttcacaccacagcagcaggaagccctgcgtttccgcaatcctgacgggtgcagtgaatgcatccgtccggtgatgggcaccgcaaccagtcacggtctgaaaggccggacggtggcagcggaagtgatgaaaaccagtccggaaatcctccgaacctaccacgatgagggcgaggatgcggcacgcacgctgtggctgcgtcagggtggaatcagcctgagtcagcatgcccggcatcatgtgctggccggacaggtggacccgtttatggccaatgacatcgtgccgtttgaggatgcaaatgcacaggaggcagagcatggccagtga

SEQ ID NO: 34471 - DNA, 1065 bp, Escherichia coli
atggccagtgaaatgcaacgcagaatggcccgtctggcgctctccggcagcaaccgtatccgcttctatgaggtgctgaaaatgcaaatcatgagcggacggacacttgagcaggccatgctcaacatccgcgaggtgtacacccggggcgggcaacgttttcacccctttggcgtgctggcacaggactgtctcgactccctgtcggtgaaccgggaaggaaacctgctcccggacgttttccggcgctggttttccggtgaggaggctgcctcgcttgccgtgggcatgcgtgccggctccctgctgacggcgctggacagtctcatccggctgatcaggtccctgcagtccatccgttccgttattgccggggctgcccttgccccgttcggtgccattcttgccctgagcgggatactgaccctgctgtccgttcagctggttccgcagttcgtcaaaattatcccgccggagaaagcccgtggtgcccttgccatcacttacggtctggcggacttcgtcaccacagcaggcccctgggtgctggctatgctcattgcgttttttttgctggcgctctggtccctgccccgctggaccggccggatacggcagtttttcgatcaccttcccccatggagtatgtaccggctgatgcagagcagtgtttttctgctcaacctctccacgctgattggtgcccgcatgacctttcaggatgccctgaaaacgctcagcgacggcggtgtgccgtggctgcaggagcgcctgataccggcacagcatcatttcagcaacggtgcggatctggggaccgccctcgaacgcgccggacacaacttcccctcacaggagatgatccttcacctgaaggcgctttctgccggggaaggcgcggagctggccatcgccaacctggccgactggtggctgggcagaacccgcgcaattgccaaaggcatgctctacctgagcctgctgatttcggtcgtcatggtcttcggctgtctgggcattatggccagcagcatgatggccctgcgcgaccttgtgaacatgtaa

SEQ ID NO: 34472 - DNA, 606 bp, Escherichia coli
atgaaaacgaaaccgaatgtattaccagcgcataatgactgcccgcagaccacgacaactggcaactcacgccgtcgcaaggcacatcgtgggatcgagatgctgtccgcaatggggtggtggagttatgcgatcatcatcgtcgtgtgcgtactcggaatgctgtttggtctgtacatcttcggccgctccggcagtgaagcatccaacctgacccagctggccactgccacgcagcgtgccgcccggacacaggcggggttcggcacagccaacctgaacaccgtgctctacaacgccggacaaatcccgaatggctggacctacagcagcgggaccatttacaaccagtggaacggcaccgtcaccgtgaccgggaaaacctcctatttcaccatcacggatacaggtattccgagctctgagtgtatttctatcgctcagacactggcggccggtggtgtggcgaactacctgacagtcggtggtacgaaaatcaccccggccagcgatattgccaccatcaacaccgcctgcggtaacgccaacagcagcgtcaacagcacgacaaaaaccatcgtcatgtatgttggcgctctccagtaa

SEQ ID NO: 34473 - DNA, 501 bp, Escherichia coli
atgacgacacgcatcctgtcgtgcctgctcctttttatctgttttctttttcttccggcacacacgcaggctgccgtgcagccatcagtgagaatgtgtttttccactgccgggaaaatgtaccagatagacccactgttactggaagccatcgcccggcatgaaagcggtctgaatccccgggcaatgaatctccgcaaccgtaacggtacggtggactatggactgatgcaggtgaactcatcgcatatcccgctcctgaaacagaaagggattatccgaaacccgcaggacctgctcgatccctgtctgaatattcagataggtgcctgggtactggcacgccactttcagagctgtggtgtgaactggaactgtcttggcagctacaacgctggattccgcagcacaatgaaccagcgacgggaggactacgcagacaatatttatgccatctaccggaaactgaaccgggagcgccgcaacatggcattacgttaa

SEQ ID NO: 34474 - DNA, 576 bp, Escherichia coli
atggctctgacattcttctttgtaccggctggtacgcttgctgccttcgccctgatccgctactacgacgatcattccggacagctgaaccgtcgggatatctgcaccggcctgctctggtgtgctctgtggctgctactgagtgtttattcacgcaaggagctgtccctgccactgtcgataagcatgggattgctgtgcgcatgcaccgtaactgacgccctgcgcacctggctgccggccgaactgacgctgcctcttgccgtgacgatggtctggcatgccagtctctccccgtgggggtttcagagtgccctcatctggggggcggtctggactgcattttatggtggtcgctggctgttttaccggctgcaacatcgggaggactctccaggcagcggcgacattattcttgctggcatcaccggcatcgccggcggcccgtcatccgcgtttctgattgcatcggccatcacagggcatctggcctggggaaccgtgcgccatctgcacgaagccccgtttggcccctggctctgtctggctatcactgttcaactgctcttcttctga

SEQ ID NO: 34475 - DNA, 1449 bp, Escherichia coli
atgcaccgcactcttcctagaaaacgccccgcccgggggattgatcttatcggcacctttgcatccgtggctgttggttttttgattgtcggtctggcactgaccatgctctaccggagcagcgaggacagcaataacaacgttgtggcccgtcaggcaaccagctgggccacagcggccaaactgtatattgccgcgaactacgacaccctgctggcctcagcccccaccacaatcagccgcagcacgctggtcaacagcggatacctgaacagtggtgaaccggagaccaatctgttccagcagacctggaaagtcgctgtcaggaaaaacaccaaaaacagcgatcaactggatgccgttctgctgtccagtggcgggcaggcaatggattacccgacgctgcgctacattgcggcggccattgacggttacggcggttttgtctacagcggcagcatgccgtcaggctgtaccagcagcaccaccacggtgaacggtgcggcctgtggctggacgctggatctgtccggattcggtatcagcacaaccagcggtcacattgccgtcaatctgggggcagacattgccggcagcgccagcagcggcggcgactttctgcaccgctattccgtgccgggtcatgccgaatacaaccagatgaacacggcgctggacatgaacggcaaaaacgtaaaccgtgctggcaacctcctggtgacatctgacggaaaatcatcagatgatcatggcagcagcggctcaaccggttttgtgggatgggcatcaggcagtgcaagcggaaccgccagtgatgcaacatcactgagagcaggcatgtacttttcgacctctgcgccatccagcagtgacaaagagagcgtgtggatcaaaacgaccagcaataccagtctggatgtgacaggcaaggttcgcgcagcgacggtgaaaggaacccggctcatcacatccgagggctatctgatgccaggaaaaacggtgacggcaaacacatcctgtacgccagccgcactgggtatttcggaccttctggcagacacaacaggccttgtagcccatgacagcactggtgccacactttcgtgccaatccggtgtgtggaagagtttaggaacaacaaacgggacgtatacaaatctgggttctcatagcggcagcttttcaggttcgaacaacggtacgggaacactgtttgtatacgccagtggaggaaacggcggttcctcctgtgcgaatccagccaaactacagggatttgttaacggcagccaggttgcggttaacgccaataacaatcctgattatgcgaagacggtattcatcacatttgccgtgcccagtggttcgtcgtatcagatcacttcatacccgaccgagaactattcctgcgggcgaggcaatttttctgtctggggataccagacctga

SEQ ID NO: 34476 - DNA, 153 bp, Escherichia coli
atgaagtattttctgtaccagatagtccctatagcagccatcatttgcgcagcaattctagcgctaaaaggtatcaatggctgggggtggttcttaactgttgggttcctgcttgcaggggcagatacagtaaaggctcagttatctaagtag

SEQ ID NO: 34477 - DNA, 459 bp, Escherichia coli
atggggaacgaaaagagcttagcgcacacccgatggaactgtaaatatcacatagtatttgcgccaaaataccgaagacaggtgttctacagagagaagcgtagagcaataggcagtattttgagaaagctgtgtgagtggaaaagtgtacggattctggaagctgaatgctgtgcagatcatatccatatgcttgtggagatcccgcccaaaatgagcgtatccggctttatgggatatctgaaagggaaaagcagtctgatgctttacgagcagtttggtgatttgaaattcaaatacaggaacagggagttctggtgcagagggtactacgtcgatacggtgggtaagaacacggcgaagatacaggattacataaagcaccagcttgaagaggataaaatgggagagcagttatcgattccctatccgggcagcccgtttacgggccgtaagtaa

SEQ ID NO: 34478 - DNA, 198 bp, Escherichia coli
gtgaactacaatgcttgcaaatggtacgagtcctcagtggcatttaatcatttcatcggcggtgatagcggtgggtcgatctactacaaaccggtttcctgtcctacaggatatgtgatgacgggcacccggatgtatggcataggtgatggagtcgatgaggagcatgttgatgcttactgttgcccgtttaattga

SEQ ID NO: 34479 - DNA, 198 bp, Escherichia coli; identical to SEQ ID NO: 34478

SEQ ID NO: 34480 - DNA, 198 bp, Escherichia coli; identical to SEQ ID NO: 34478

SEQ ID NO: 34481 - DNA, 471 bp, Escherichia coli
atggcatgggatatggcgcttggctggattatctggtgtcaccgcgctgccatgctgcattgtgccgaacctgcaagtaagcatgaagagttgccgcttgattatctccaaggtcaaaaagatggtcttgaatgggctgcgcagctggcagaggcaaatcacccacaaactggcgactggctttatgatgaccctgttgagcttgcaaaggctattcgcaaaggtccggatatgcccgaggccgctggcaactctccggtaactccggatggttggataagctgtagtgagctaatgccggataccaaaacagccgttcttgttgccgtggagtttggcaggaaaggtgactggcgaatgaaatgggcgacttacatcccgggtcatcctgacgctaatgatgggtggataattcctggtgcgtcgtggaaaccgtcacactggatgccgctaccagagcctccactttga

SEQ ID NO: 34482 - DNA, 336 bp, Escherichia coli
atgtctaagttgaagttggcttacgatgctgacaatccttttccgaatagcgaatttgcccccatcggaattgaagactcagaagagccagcacatggaggtggcaatggaggaggatcagatatgaacagtagaatgacccgcattgaaacgattgccgccaaccaagaaaagctaatatcagaaactagaaaagagttgattggcatccgtggcgacatgcacggaatggagcgtcgcctagcagataagatggacgagaatcagaagtggcttatcgccctcatgatatctgcaatccttgctccgctgtttattgccttggttaccaaatag

SEQ ID NO: 34483 - DNA, 366 bp, Escherichia coli
atgagtgacaattcaggatactcagacgatcaactgcgagagggtgaatatcgcaaggcgctatcgtctataactacaaaggttctcgactctttcttgagagctaaaggtgttccagacgaatgcccaatgtgcgggcagtctgaaatggttgtccctcaagttcaatttgtaaatcaggataatggaaaagacatcatgggtaggcatgcccattatggtgaatatataaaaaacgaagatggatcattcaacccaataaattactcttatcatgtaatttgcaagcattgcggatacattatgcagtacaacacaggtgttgtgttaagctggtatctaagggagaaaaacagcaatgtctaa

SEQ ID NO: 34484 - DNA, 1107 bp, Escherichia coli
atgacaagtggtgtcccagtggtgctttctgactttgagttaaagtcgatcttagccttaactgaacgttttacgtggcatatcgccagaccaattattgcttctttagggctacctacaggtagagggcgtgaagcaacaaacgacaaaatactagaaagcctcattgattttaaaaagaaagataggcaaaaatttgacaaaatcattgcaagtgtaaatgatttagtctttgggcaggttgtttatggtgaaaaagcaatatttagtttgtctgtagatagtcaagtaattaaattacttgatgatagatatgctctccaatggaatatgatgaagcaaccaacatcattagtcgaaacgattgttgatgatgttcaattacagcatgctattaaaaatcaacttgagcttgttaattactctaagcaaaatactcagtctattttggtattttcatctatcagggagctggttgtaagagagaaagtccctccgtcaaagttagcagcatacaaacagtttgatgaaatcattgcgaagagaaaagaaaaacgtcagtgttttgatgtgtgtatattagattcagcttcaaataaaatccatgtattaattgatactaatggtaatgttgttggtgataatatcgtttttgcgaaaacgaattttattcgtgagttatataattgcgcaggttatcaatttaattcatcggaaaaggatttttatccattaattgagccaattttcaagcaaaatgtaatgccatattcaagtttaagttataaggtgttcgatttgtcatttttaacttatgagggaaccactcataaggaaaagaaaaatgtggctaagaaagacttgcgtgatgatctgtttaataaagagggcattaaagctgtaggtaatattggtttatatcgtattggaattagagtagataggaataatccaaaattgcaattggcggatagtgtagagcttatcattccaggaacattacgcagacatttaggtggtagtgggtgctctcctgtcaattatgctatattaagcaaatgtatatccaaagatgatttcgaaaccctcacaaagctgatattataa

SEQ ID NO: 34485 - DNA, 435 bp, Escherichia coli
atgaaggatggtgatatgccccagatcatcaaagaaatatgtgcagagcgccctgatataggggcgctagcttgctatttgtatgatgaaattggtgtgagagcaaagaaatcgcctaatatagctctgagttataaagatttatttagtatcgttaatggttataaaggatgtatacaacctgaagcatatgagcaggttgtgtacccagctatacaaattctttgtagtccaaaggttgagtttttaaaactcaattattggtttattgatgattttcatgatcctattgagcttgagttagaagatgttatagaggctgaaattaatcaatctttagtaaacccatttacaggggagattatgtatgactataagtccttcgtctttcctttttttacattagatgaatctaaattaaaggatattgtctga

SEQ ID NO: 34486 - DNA, 666 bp, Escherichia coli
atgttaaaaatgtctgcaccaatgagtttagctgaaattgataatgatatttttcttcagcgtatcaatgcttctattactcgcgttaggtttgctctccagtcgtatgagaacttcaaacagtttgtaagaattgagcttgattctgctgtacaggcaattgaggaaaattcaaataaattgaattttgatttaacagaagatcagcttactttaattttactggcaaatataaaaaataaagatatgggaattgaagcatatcatgaaaataatcaacgaggtcattgtgatataacaataaagttgaatagatttacttggcatggcgaggccaaaaaacacactggttcatatagttatttatttaaagggtatgcacaactcactgagcgatatagcactggtactgtagacagtgcaagtggtgggttaattatatatacgcgtaataaaaaatgtaatgaaatgatgactaagtggaaggctcatttagataaatcggctccaagaattcatgcttgtaagtctatctcgataactccttgtaagagaaacccattggttttttacagtcaacatactcacactgttagtcaacttaattatgaggttatacactaccctgtaaacctttatcatgagcctgtagactcagagctttga

SEQ ID NO: 34487 - DNA, 189 bp, Escherichia coli
atgaagaagaatacccgctttgcttttaacgcttacctgcagcagttggcgcgtctgaacggtgtggcagttgaagaactgtccagcaagttcaccgtagagccgtctgtgcagcagacgctggaagaccagatccagcagtccgccgctttcctgacgctgattaacgtcacgccagtgactgagtag

SEQ ID NO: 34488 - DNA, 1137 bp, Escherichia coli
atgaaccgaaagatactggtagtatttggaacgcggccagaagctattaaaatgattcctgttgttcaggaattgaaaaaggaaaaagactttattgtgaaagtctgtatcactgctcaacatagacaaatgcttgatcaggtattgaacatttttaatattcagcctgactatgacttaaatgtgatggaaagtgggcaaacattagacgatataacattaaaggttctcaaaggggtatcgtcagtattgaaagatttctcgccagacttagtattagtccatggagataccacaactacttttgctagtagcttggcgtgttattatcaaaaaattgatgtcgggcatgttgaagctggtttacgtactggcgatatttattcaccatggccagaagaaggtaatagaaggttaactgccgtattagctaaatatcacttctcgccaacaaaagatgcgtcgtttaatttaaaacgagaggggtacaatcccgattgcatatttgtaacaggaaatactgttattgattctttaatgagagccaaggatataatcaaagataatgaaagtttgcagaaggaattttctaataagtttggttttattggtaatgacaaaaaactgatattggtaacaggtcatagaagagaaaatttcggattgggatttgaaaatgtttgtaaatcgttagccgaggtggcatataaatatactaacgtaaacattgtataccctgttcatcttaatccaaatgttcaggaacctgtaaaaaggatattgggtgatatacctaatattttcttgatagaaccgcaagaatatcttccatttgtttatctaatgaatagggcttacctgattcttacagactcaggaggaattcaggaagaagcaccgtcgctaggcgtaccagtattggttacaagggaggtaacagaaaggccagaggctgttaaagcagggacggttaaattagtcggtacaacccccataaaaatagtatctgctattgatgaattactccttgatgataataaatataaaaaaatgtcacgagcgcataatccatacggagatggtttagcatctgttagaatatgtgatatattaactaaagtattaactgcaatataa

SEQ ID NO: 34489 - DNA, 234 bp, Escherichia coli
atggtcggcgtggatgaaatctccgggcatatagtagaaaatgttattgagctggctcgtcggttaggtattgatatcattgccgaaggcattgaaaccgaatcacaggagttgttcatgacagagaaaggaagcagctatctgcagggataccgctatgcacctccactacccgcggaacagtttattgctgagtgggtatacaacagcagaaacggcaaaaaccagagataa

SEQ ID NO: 34490 - DNA, 276 bp, Escherichia coli
atgtctcaggtcgaacatagccttaatcctgttgcacattttttatcagatcaatttcatattgggatcaatatttcaccagcgcattttctgtccccggggctggaagatagctgtataaagtttctatccaccttcccgaaagggaaagtgaaactggttctggaactgacagaacgaaaccagctatccgtcacagcagaatcaaaagctttatttgcgaaattacatcaacagggagtattgtttgctctggatgattttggtactggctag

SEQ ID NO: 34491 - DNA, 849 bp, Escherichia coli
atggcaactaactataaaaacatgtgtaatcaacatttatatcacgatgtttactttttttgtcacgcaataaagaatatattaaacaatcagagcgattatattcgtgggctgaatgacttttatggagatggaagaataaacaggttcgatataccattccctcggtggtcacattttcatgattttgtagaattcattgttttaaatatatatagtgaagatttaaaacatgatcatctttctaatgttttgaataatatgaaaagttactcatctcgggcagtaagtgatgacaatatttcagttaattcctttgaatacatacataaaaaataccttgcccaccttaatgaaaatgagttagaaatatcacatacgactgtaagtgaactggaggagtttttatatgaatttcattctagtgaagagtttttaaagcatatagaaaacacagttagagaggtattttatatcttgtttggcaacagaaaggtaatgcaagattttaatgagatgattgcccgagcaagggaggatgaaattgatattatagatactaaatatcataaagacaatggggtgttaaaaagaaagaatatcccggaatgggtaaagaacgctgtatatcatagagataaaggaagatgtgttgtatgtaaaaaagatatcacgcgaatagttaatatatataacatggtcaattttgatcatattgtacctcttgcgatgtttgggttaaatgatatttcaaatattcaattactgtgcgctgaatgtaatggagaaaagaaagcaaataatacactaacgtcatatgattattatgagtggtatgagatcgattaa

SEQ ID NO: 34492 - DNA, 672 bp, Escherichia coli
atgctcatccacttcacatcagattacggcaaaatatcttcaatactaagatctcagtatttgctattaaaatattgtagagaaacattctcaaatacgaagggcataatagcatcctcggcagcacatccgatggtttcctttagtaattatgatgaggatgagttaattaaaacaccaataacttacggtcactttggtatccaatttaaatgggaatgggtcaaagagaataacattagccctgttatttatatgcaaaataactcacctgcagcagaagggcttgaagcattattaaatgaaaggaagaaaaataaacttttatcgcccaaaatgagattggcgattatgaagctaaaatgctttactaaaaatgccgtgggtaataactctaaaatgaaagacacagactttgactttacaagagaaaaagaatggcgttttgttcctaccttaaagcaaatagatggaaatcgtatatctgaaaatcggtcaacttatgacaaatgctatgataaatacaatacaaaaataagatcatatcctttaaaattcaaaatggctgatatagattgcatctacatagaaaaagattatctttctcgattctcttgcgacttccctcaattaagagagaaggtcaaaacatcaaactggtctttaatttaa

SEQ ID NO: 34493 - DNA, 432 bp, Escherichia coli
atgggcaaagcggtggggtttaccgaaacatttgaattcgatatagcttctgcgtgcgcgcgcgctaatggtaaacgtaaacgcaagccttccgttcttcgtcgcagagctattgatgcactgttgcaaggtatgtgcttctattacgatcctgtttcaaatcaagtgcatcgttctataaccgaacttgcacttgattgcggattagccagaaaaaatgctcatggtcatttagccattgagcgagctgtcagagcaattaaatcactggaagaagattttgggtttatagtctgttccccgtcatcagatttttacaataagcgctgcacaataacgttgacgcctcgtttttttgagtttttagggatatttccgttggcgctgactgaagcacgtctggctgtcttacggagtgggtatggtgattaa

SEQ ID NO: 34494 - DNA, 135 bp, Escherichia coli
atgaagaaagcaggtgatttttcaacaccaaccgctgaaagtaataaagaggaaccttgtgcgtacatagttggtccaacattttctgatgatgttggtgccatatttgctgacaacaatattgtgtcagaatga

SEQ ID NO: 34495 - DNA, 189 bp, Escherichia coli
atgctcaatatgtttgcccagtttgtaaaaaaggtgttaacctccgtaaagggaaggttatacccccatattttgctcatttgcccggacatggtacgtcagactgtgaaaattttgttcccggaaattccatcattatcgaaactattaaaactatttcaaagcgatatatggatttgcgcttattga

SEQ ID NO: 34496 - DNA, 270 bp, Escherichia coli
atgtctatcgatatcaacaagttaaaatcaaaattaattgaagattataaattcgctgacgagattagcgatgatgaaatcaatagagttttaagtgaaatacacaaaaagggtgcctcaacaccaaaagaagtagacgaaattgtctatacggtattagagggtaaaaggcattatgctttcgaaagtctggatacatccaatactacatcccttgcattacagttaattcaggcggcaaaggtatatgctcaaacgcaaggaagatga

SEQ ID NO: 34497 - DNA, 789 bp, Escherichia coli
atgctcaaacgcaaggaagatgaaagcattcacatagagagtaaaaaaaaacttgatatggaattgcagtttttaatagatgagatgcaagctggaaaggataaaaacactattcttccactgttgaataaactgcaattacagttttcaacctatgttactgattttgaaaattttatcgttcgagtttcagaaaatgggtattatcgttcaaaaggtgaaataaaagatgttttaattagcgtagaaaattttttaaattcaaatgcagttgttgcagaagcaataaatacagtttcaagcatattcaatttaccccaatgttatcaagaaggaaatttcataacaactgctcaaataatattaagaacacatcagaaagaaaaagccgaggaattatccaaaatttataagaataaaggattatcaacaaatggctttgatagtaaagaaaaaatttatttaaacagacacgggtttgatatgaccagatttatttcgtttatattaggattaatttgtatactttattttttatatgaatacaacataggtaatataaacaatggtataagttggtttaattatagattgtttgttccagcaggattaggagcaataatattttcactatttccggcaaccatgcaattaaaattaagagcaggagtgacagccacagggattgtcgcatttattatatttttttatactgtcaatccagcaaaagttcccgattttcaacttcataatattgatagcaatgaatcatcagtaaaaaacaaatga

SEQ ID NO: 34498 - DNA, 606 bp, Escherichia coli
atgagtgttgtagctacactgagagacctttcagaggtatggcaattgttcggtaatatgcctgacgatacagcattgaatgttgaattaacggccctttatttggggatcagtgttaagaccttagcaaggtatcgccaaaatggtgagggaccaccttacattcaataccaggctggaaacagtaaggctcgaaatcaacgagttaattatttgctgggggatttaaggatttggagggatgggtataaagtagtaagcacgatgcaagcagcacaagttcgtggactggcattcaattcactgatcgacttcacgatcccgcaaccattctggcgtattgataattctgctgagttacagaatcgaaataaaatcctatcacatgcacttagaacaccagaagaaagatttaaaatttatttagcagaaaaacatatcaatatcgtttggatctcagtagaagaagctttgcttttagattggacagatctaagtgaaagacaagtattccatgattcgtttgttaactttttaagtaatttaatccagctttctacttctgcacaagaaaatcttgtattgaataacatttttaaaaaataa

SEQ ID NO: 34499 - DNA, 468 bp, Escherichia coli
  misc_feature (280)..(289): n is a, c, g, or t
atgaaaaaagaaatatttattgccactattatttttcatttactatctaaaggtgctcttgccgaagagttcaactacagctttattcgtggagggagtaaggatattcctgaagttttaaacagtaataaagaaaacgtaccaggaaaatatgttgttgatattgtttttaatggttctaaaatcgcctcatctaccgagatgaacatcgcaaaagaggatgctgaagggatatgtctttctgatgaatggctaactgaaaacggcattataattaatnnnnnnnnnnttataaaaatgtttataatgctgcacgccagtgctatttgctgggtaatgaggcgaacagtaaagtcgcgtttgatcaatctttgcaagaagtatctattgatttgccacaggcaggcttccaggacgcagcaaaagatggtggtgtgtgggactatggtagtaacggttttaaaatag

SEQ ID NO: 34500 - DNA, 384 bp, Escherichia coli
atggatatagaaattactaatcctgtaaatataaagttggacgttattgagtttgatgagcatgttccttccttaaagtttagcgtctcaatttcagttgagaagtttggttataaggctgaggttaatactcacttctggatagaatgccagtgctttgacaagtttgttagctgtatgaattgtggtgaacttgccatcctcaaggatatgaacgatagttttgagttaattttaaatccagtcgctggtgtgctgaattggtcatgtatgaaggaagatatcaatggtggtatctccctttcaaaaggaagtgaaaagcttgatgatgctgccaagcaatcaatattacgtgcttttaatgactatcctaaatggtggtag

SEQ ID NO: 34501 - DNA, 972 bp, Escherichia coli
atgaacagggaaattcagcagcggctacagtgggtaaaactctatgaaacgtccggtgatgcgggatttgtatgccgtcgctgtggcatttctcggcccacattgcgtaaatggtggcgcagatatctggctcagggcatcgctggtctggaaagccacagccgtcgccccaagcgttcaccatcaacgaaaaccggcacttgcgaagtcgctctgattctggagttacgttctcagcgaaatctgggggcaagacgtattcaaagcgagttaaaacgacttcattcaatctcactggcaatagcaacaatccacaaagtcctttgccagaatcaggttaaacctgttgttaaatttcggcgtaaagctgatttcattcgctacgaacgccctgttcccggtgatcgggttcagatggatacctgtaaaattggccccggcttatatcagtacacatctattgatgattgcactcgctacagagtcctgaggctctactctcgtcgcacggcggcaaacacactggattttattgattgtgttattgaagaaatgcctttcccgatacagcgctttcagacagaccggggaagagaattttttgccgttaaagtgcaggaaagattaaaagaatatggcatcaagtttcgtccaaataagccagcgtcgcctcatcttaacggaaaggttgaacgttcccaaaagacagacaaagctgagttttacgctaccgtagatctttctgctgatgacctgaaggaactgctggcagaatggcagcattactataactgggaacgtcctcatagcgctcacaacggtaaaactccgatggaacgctactttgaactttctgagaaaacaccatactctgatgccgttcatgcaaactatcagcccaatgaagagcatatacaagaacagaattacaagcttgaacttggactgagaaaattgaaacgatgtctatga

SEQ ID NO: 34502 - DNA, 2634 bp, Escherichia coli
atgtttttattttttcactctgaacaaactgaaaaaaacaccagttattacaaggggttactttttgaagagttgttaaaagaatacttggaaggctctggatacgacattgagttaaggaaaaaagaatctagtttagagtacgacattgaaggattctctagagcaactggccaaaagattattggcgaagctaaagcacacagcaaaagcatgagtggacaaacagttgctgcgttcgttggaaagcttttgccgctaggtcttctggaaaaaaaggtgcatggattatttctgtcattatcaccattaacaccggaggcggaagattattttcgaactgtcgaaaatatggggttaacgacaaaggtaggaaaggaactttataaccaaataactgcgactttgcatttgccgactgaagcatctctacataaggaaattaaaggttatgaccttgtggccccaaacattctcaagactgatacggggttgtataagttatttattttaaaagaggtaaactcaggaacgccatcaaattttatggtattcaataaaagtggcagccaaattgatgatgaaagatttttggaagatttaaaaatagggatttcagaacttgctggtttggatttcattatgcctagcaagaaaaaaatagttgacgaaatgcctcaagtaaagcgtgaaatagttcgaggattaactgttgggactgaatgggctgactataggctacctgcagggccaactgtgttcgttggcaggactgaattcataggtgaacttctttctcacatcaaacataatgagctaccacatgttcttcagataaaaagtcgctctggagtaggaaaaagctctcttgtatcctttttagaaaacaagctctcaatggatggggttattactgaattacatgactcaagggatgtaaaaacaatatatgatgttttttatcttgttcagaggtttacccaaagcagcattattgcgactaattttatagaacttgatgaacaactgaaagacttgcaactttcactaaatggccaaaaggcagttttctttgttgaccaatttgaatctacattttcgaatcctgacattttcgattgctatgaatacattgcgaactcaataacaaagcttcgtggtggtgtatacatagtgtttgcgcgtaaaaatgatcagctaacaacctatgacaacagtaaagtttctcttaatagaattaatcagctatcgaaaagctttactcttccggattttgaaaacaaagaatcaatacttcttttagaaaaaataaatgaaaataactctaatattctcagtaaagaaatactaccctatattattgaatttgcgcagggttttccttggcttttaaagagaacgatagctcatgttttaaaactcactcgaaaaggtgactctcagagggatttaatcagtgcgggcttaaaactgaacgacctttttgaagaagagcttgaaggtttggatgagattgaaaaagattatctagttaagattgcagctaagctaccagcagatttcaatgagcttcaataccaatttgacgaagacccaatgcttgtaaaagtcctcgataagttaacagcttacagattggtacgcttgagtggttctacctatgatacttataacgatgttttcaaagaatatcttgtctaccaaaagcttcctgaatttagactgctggttatttatagaatgtatccaagctctgttatatcccagtttcataaactgataacaatgagaaagctgacaattacaaaaataacggaaaatctaaatgtaagggaaggttacgcatttaatctcgttaaggaattgcggaatttagacttgcttgatgcagttaaaagtggtgaatggataattccaaccaatgttagggatatatattctcaaggaacccttgctggttatctacgccgaaaaattttagacaatcaactcgtcgagactttacttaaaaaaattctttctggagaaaaagttttcgagtgcgatatacccacgtatttttctgagtcttatccttttattgaggcatcagagaaaacatggggattatactctacgattttaaagtcatggttacttgccctaaaaattatagaaattgatggggaaggtcgcattattgcctcagatgtgtcgcataatgatgcaacagctgagttaggaaatcttaagaaaatttcgggcttaagggcaggaaataaagggcttttcttccctgtaacatctcacgctaaaatgattgaagttaccagcttgatactgaatggtaaagagcctactggaaaagaagcgcttaaagcaaaatctgatttaaataatgctggtgttttagtcgatgggcacttagcagtatctaatattgaagagcttaatgaggcacttacagctcaaatacttgatgacggctatgaggatttctggaaagcaatacacgctggtcagccttgttatgaaatttttaaaggtattgcaggggaaggattaactgagtccacccttaaatggcgcttaagaaagttaacggctttagcaaaaaaactgaaaatcataccaaacaaaagattcaaatattaa

SEQ ID NO: 34503 - DNA, 507 bp, Escherichia coli
gtggatgcaacgctatccttaatcaagggggacgttgccatgaaacgaagaactcggattaactacacgccagagcagaaggcaattatctgggacagatataagcaaggtgattctctacatgatatcgccagaatgttcgacagatatcattcttccattatgcccactatccaccagacaggcggctaccgtcctcccgtgcgaaaacggtaccgattagcgctttcgcttgataaaagagaggagatatccagaggagtggtaacaaaactcagtatcagggacatcgccgccaaattatcaaaagcgccttcaacgattagccgcgaggtcaggaggcacggaggtgccaaacaataccgtgcagcaaaagccgatactgctgcatgggaaaatgctctgagaccaaaaccttgcaagctaattgaaagcccacattgtgtaaaatcattgcagagaagatgcatcaggactagtcgccggaacagatcgccggctggctga

SEQ ID NO: 34504 - DNA, 795 bp, Escherichia coli
ttgttgatcccgaaaaacaatcgtatattacattttttcttttccaatgctaagtttgcggctgatttagcaatataccgtgacatcggtgaatatatctactggaggttagatgaagatgaaaaaattattgctacacttaataaatctttaggttcttattcagatgtttcgaagtataaatgtcctatttactctgggatcacgctgtttgaaatcatggttcatgaaggtattcatcaggggcttcaggatcatttatggctgcattactatacacattttgcaaagaaaatcataaagaatatgaataggcagtcgaatgaatatagtggcgaatgggaaacaccttttcacttccttctctgtcatttatttagcatcgctataaattgggcagaacaatgcgaatggatagatgaaaaggacatccttcaagaaaataaagaaacagaaaatttcgatcttcattatatttcaaaagaggctaccaaattacttggtgctatgctggagttggttttgcctaattcaaaactcactttgaaatctaggaaagatattcttggtataattgtgtcttgttacattagattgaaaaggaataaaaaattaaaagacgtcgctgacgcattattaattttcacaactagaggcgaaggtaatttggcatcgccgtattatcgtaaagaacttctagaaatattcaatacacttgatgattatcgattaagaagtgatgctccggaattccgagaagctatagagtctgcgattcaagcaaggcctaattag

SEQ ID NO: 34505 - DNA, 171 bp, Escherichia coli
atgaaacacactccatccccaaaacagatcgtccatactttgaatcaagcacgtaaagcaggtagcgttcggttaaccggttctagggatgaacgtaaggctcagcttcgtgctcttcgtgagaaggacttagccgaagaagggaggtttgttgggcacacaacctggtaa

SEQ ID NO: 34506 - DNA, 483 bp, Escherichia coli
ttgggcacacaacctggtaatgcacctaagaagatctacttcagaaaagtagaactcgcgaataaatttgcatcttcaagtgatacgttcggattcgatgcagaagtacaagaatcctatgttgatgatttagttgatctccaaatcttgatggaaaatcaaggttacattgagatttacgatcctcaaattcacggttacactgcgcgttatcccttggccaaagattcaaattccgtacctggctcatctcctgactacaccggcctatatcatgtgagattgcagagcaacggtgatgttgatccgctagtaattgttaccttccatggaatgattgtcgatcaagagcactatgagaaagccgtgatagaaaccatgattacgcacgatgtcatgtttggcaggaggggatgcaagtatccctctcgggttaaatcacagcgtaggttcgtccgctcaacattagatagcccagattaa

SEQ ID NO: 34507 - DNA, 276 bp, Escherichia coli
atggctctgctgttacaccaacgtttactttcccttagaaggcgaattctcgcgcttcccccccactttgtattgccgattgagctaggccagttgccgccattaaccagttggcttgaactgcgacccgcgtcaatttcaaatgtgcctttcgtgattctgagctgccatcaatatgtttggctgtttgatgtccgttcctggcacaaagcagaccatgagaagatagacgctataacatttgagtcctaccaatcgatctgttcattgccatga

SEQ ID NO: 34508 - DNA, 942 bp, Escherichia coli
atggtggaagtgacgacaacgcgggagacataccggtatgtgtacgatgcgctggggaggcggacggaaaaacagcacatcagccctgacggtaaaccgtacaaccggacaaaatttttatgggacggaatgcggctggcgcaggagaacaggccggagggaataagcagcctgtatatctacagcgacccgggaagttatgaaccgctggcgcgggtggataaggcggggaaagagggaccgaaccggatactgtattttcacacggatgtgaacggtgcgccggaagagatgacggacagcgacgggaaaatcgtgtgggagacggggtatcaggtctggggtaacacgatacaggagaaggaccacggcggggtggagcagaacctgcgataccaggggcagtacctcgacagggaaacggggctgcactacaatctgcacaggtactatgatccggatgtcgggcggttcatggtaacggacccgatcagtttagctggcgggataaatctttatcagtatgcgccgaatccgttgtcatggatagatcctttaggattaacggttactcctctaaacaaagagggattttatgtttatgggctttataagccaggggctacagagccatattatgtaggtcatactgagcaaaacccgttgaagcgagaaggtcaacatgctggaacaggaaggcttggtgatgcagaattgcgaatacttaaaggtgaggatggtaaactgacgtattctcaggcaaaaggctatgaacaagcttatcgagaaaaatataaaacaaaaacaggttttccaggaaatgttattgagccaatagataagagtcgcactgattcacgaggtagatctcattatagaaactatcgtgcagcagctagagaaattggtataaaacctaccaagagtagagggtgtatttga

SEQ ID NO: 34509 - DNA, 375 bp, Escherichia coli
atgaatggtatgtctgacgtaagactaaagaaatcaactattgagagcctaaaagagtacgtgaatgactttggcatgacggttgatgatgttgtcctgaacttaattgaagagaataattcattaaaatcgttattaggtcagggcttttctttgcctggtggagataaggacacacattccttcaaggattacgtgattcataagcttccaaaaggaaagatcttggttaccaaagacgggcttaaagttagcaacatgaagaaggtattgatcgaggcagggagcgctgtagggatggatgataaagagctaaaccctgactttacgacctatgaaataggccgttttctcttcaaacatcttcagggataa

SEQ ID NO: 34510 - DNA, 879 bp, Escherichia coli
atggacgtattccgtacggctaccggctgtctcctttgccgtgagccggcccgccgcgtcacgcgccagccggtgacggatttcaccgccccggtccccggtgaacaccacttccgtgaccgcgttcagcgcgttgtagcggtacgcctggcggcagccgtccgggtttatctgctccgccagacggtccagcacgtcatggcggaaccggtagctttctccgttctcgtttgtcagcgtgaccagacgcccgtaagcgtcgtacccgaacgccgtcctgcgtcccgtcgcgtcagtccggctgcgcacccggccctgcccgtcacgctgccagcgcgttatcctccccatcgggctggtgtacttcaccagcctgcccgccgcgtccgactggtaattcaccgtgcggccgtccgccagtatcacctccgtcaggtggccgctgtcgtcatacccgtagcgcgtgctgtgactctccgcatccgtcattctgatgagccgcgtgcgttcgtcgtagaaccacgccgtctgcgagccggagcagtccgtgtgccgcatgagctgcccgtcttcgttccactgaaggtatttattccccccgcgcgtatcggttatctgcaccacctgaccgtggcggtcatactgataccgggtgttctgctgcagcgggtcggtcacggcaagaaggttgccgtgttcatcgtactcacagcaccagctgttccccgccgcgtccacctccgtttccggctggtgccacaccgggtgccactgtgtctgtgccacccgccccagcgggtcgtgcgtctccgtgatatgcccctgccggtcatacacatagcgccatttgccgccctgcgcatcggtcattcccagtaa

SEQ ID NO: 34511 - DNA, 1095 bp, Escherichia coli
ttggcttctttacaggttttgaatgctatcgctgttaggatcacacctcctgaggacgaacagaaagattggtcctatacattaggtgctctgtggcccgtcgatcagcaggaagtcatcacatttacaacgaaagtagatgcaagatttcataagagcagtaaatctcatgcgaagtttcaaaaaccttacccaggaagctctttcccttccaagctgtcaaaatttttagaaaaagaaacttcattcgaagtctttgtagatgattttatccagaaaaaattaattacatctgcaagacaatccagagcaagtaacggtgcaatattagtttttactcattatcaacttcaacacgaaaaagaagatggttctgttcataaagattttgaacgacttcttgttttaatgcttaaaaataccgatgcattaagattcaaagaaaacctgcaactaaatccagttgacataattgacttagataaattcttgcaaggtgcaagagttgatataaccagatttatgtctgaggaagtagaagatgaagacaaaaataatttatgcttcattcgtggaactggtgatgtaagaaaatattttaccgaatcaattggtgccgaagatattatctccaataaaaccagtagtgagcaatgtattaaagctttggaacaattctctcaccaaaaagaatttggtcgtgctttgagagaaaaaatcgaatccaaggttcaggaactatttaataattgtaagcgtggacagtccataaccttagaaaagattcaaacacaaatcgatgcaattatacccgttgatttagcagagcataaaaatacattcgtagattttgtaaacgaaaatggatttgaagttaatgaagagttcgaagtatctgcaagtgataaaagacaatatgaatggttagattttgaaaccaatattgcaaaaatgagtgtaagaaaacatcagattggtttgcctggttctgatagaccaattatctttgacactgaaacaaacgaagtaaagctaactcagaagattaatgatccaataattattgctcggctgaaagagcttgcaaatgaataa

SEQ ID NO: 34512 - DNA, 915 bp, Escherichia coli
atgaaaatgcctagagttatatgtataattgtcacttttaatcgcgagcatttactgcaacaaacacttgatgcagtattaaatcaaacattccccctacaaaatataattgttatagataataatagcttcgataatacacgcagtttagtttctaaattgagcgaaaataatcccaaaatagaatatcataatactggagcgaatattggaggcgctggcgggtttcatagaggttttgctattgcctcaaaatataaatatgattatttatggcttatggatgatgatctaaagcctgaaatagaatgtctttataacctgatatcctctgcaactgaacatggtatctatcaacctataagaataaatgtagatggctcatgtgcagaactttcccctgttgtttatgatttaaaaaatcctttttttatgaatccgaagcgattatctgtcatcaacctctataaacgtatgaacaatgctgtatatagtccttttgatattcatggagttcctttcgaggggccattaatatctagagatgtaattcaatgtattggttatcccaatcctaatttctttattttttatgacgatcttgactactccttgagggcaagaaaagcagggtttgaaatcaaatgtattccaagtgccagagcggttagactactaaaaaataatcagcgtagtgatttgacatcttggaaaggatattttatgtttcgtaatcttttctatattcatcgtacctatggcgaaaatatattcgttaggttaaaaccatttctgctggttctggggtatcttgtgtttttaatctttagatttaagtttaatcaagttcctactattttatctgcatttaaagattcacgaaaacttgataattctgaattacataaaccataa

SEQ ID NO: 34513 - DNA, 660 bp, Escherichia coli
  misc_feature (635)..(644): n is a, c, g, or t
atgtttttaaacttttctgcgtggaaagaagatttctgggataattataacgaggtcggtgctaacttaagtctgacaaaaagttttgatcaaataacaatgacactgaacggtggttattccagactgcaaaatatggatgctgactataatgttggtttgtcaataagtgtgccgttaagtctgtttgataaaacacattatagtttttcgaatgttaactatgatcgacgtacggggaccagtatgaatactgggatctcaggaatgattaatcaaaggctgagttataacgcatcagttaaccagacgcgtgatactaccggtggtacactttctgcctcctatttattcgactggatgcagacgtcagcaacgtattcacaaactgggaaaaattcatctacctcactccagttgggtggtagtgtaattggtgtgccagaaggtggcataatatttactccagttaaaaatgatcaactggctatcgtgcaaatgaaagatgtccccggtgttatgtttaacggttctttaccgggagataaatatggtcgggcggtaatcccacttactgcttataacaataatacgatttctgtaaatgcagaaaaattaccgaagaatattgagcnnnnnnnnnngattcactgtgagtaa

SEQ ID NO: 34514 - DNA, 474 bp, Escherichia coli
atgaaaacattgtctcagaacaccacctcttcggcctgtgcaccggagactggcctgcaacaactggttgccaccatagtccctgatgaacagcgcatcagcttctggccgcagcattttggcctcattccacagtgggtgaccctggagccccgggtcttcggctggatggaccgtctgtatgaagactactgcggtggtatctggaatctgtacaccctgaacaacggtggcgcatttatggcccccgaaccggatgacgatgatgacggaacatgggtactgttcaatgccatgaacggtaaccgcgctgaaatgagcccggaagccgccggcattgctgcctgtctgatgacgtacagtcatcacgcctgccgtacggagtgttatgccatgacggttcattattaccgtctgcgggattacgccctgcaacatccggaatgcagcgccattatgcgcatcatcgactga

SEQ ID NO: 34515 - DNA, 132 bp, Escherichia coli
atgattatggttctatctgaattaggtattagaggtggtgagttgttaaatatcaaaattgaagatattaattttcagaaaaaattctctatattagaaggcgagcagatgagatatcggaccctcggttga

SEQ ID NO: 34516 - DNA, 258 bp, Escherichia coli
  misc_feature (165)..(174): n is a, c, g, or t
atggttaggggattgttactattcggaattattttgatggtaattattttgatggggtacttctcttttttaccggcctcacaatggtggtttatcaaaaatatcatatcaaattttgattttgtaaaagcgctcctttcaattctaatattatcattgattacnnnnnnnnnnatttttgtttttcggtattttagagaaaaaatactcattaaagttagaaaaattaactttcggtgggttaaatgttttatttga

SEQ ID NO: 34517 - DNA, 231 bp, Escherichia coli
atgattaactatcaactattagaaacaacattttttaaagaagcaaaacaacttgcagaagtgtttatttcactggctgaacgagcaaaagaagaaaatgattttgccttgcttgatgatgtgctggatgacattgcaacctatcgtataccgctacagattgcactaaacaaggctaaacagattcagcaagagatggaatcagcagatcaaggagagattgcacaatga

SEQ ID NO: 34518 - DNA, 1491 bp, Escherichia coli
atgccatactttcagtatcctgatgagtttcccctgagctcgctgcctccactcattcgtgatgccgttattgaagctcagcaaatcacgcaggctcccctggggcttgtggcagcatctgccctgggcgctgtttcacttgtctgccagaatctgattgatgtctgcagactgaatacactgcgggggccggtttctcttttcttactgacgcttgctgagtccggagaacgaaaaaccgcagtggacaaattattaatggagcccctgtaccagcaggagatgctgttatattccagacacaaaaatgaactgacgacatggaaaaataaggaagagcttttaaaggcgcagaaaaaagcattgttgtcaaaactgaataaagaactccgcaaaggcgcggatgagtcagaaacgctcagacaactggaagcgcttcagaaaaacagaggggaaaaacctgtaagatataaattcatttttaatgatgccacgatagcagcaattaaagatcagctttgtggtcagtggcgttcagtgggtatcatgtctgatgaagccggtataatatttgatgggtataccctgtctgagctgccttttattaacaaaatgtgggatggctccgtattgtcggtggacagaaagaatgaacccgaacagatgattgaaaatgccagaatgacattatccctcatggtacaacccggtctttttgaccgatatatggagcgaaaaggttctgttgccagggacagtggttttcttgcccgttgtctaatcagtaaacctgccaccacgcaggggaaacgctttattaacggagctgtgaccccgggaggatcattaacggcatttcatgaacgattaatggaactggccagaggcagtattgaaaaatccagtaaggatgaacgttattgtctgcatttttctcctgaagcgcaaaaaatatttattgatcactataatgttctggagcaggatttgtctccttccggacccttaagccagtttcggggacatgtttcaaaaaaaacagaaaacattgcgagaattgctgcgttattgcagtatttcagtcagggtgaagggaaaatctctgccgatatcatgacgtctgctgtcgtaataagttcgtggtacacagatgaatataaaaaattatttgcgttacctgatgaatctgaactgcagctgcaggacgcccgggagctgctcgactggctcattgaggagtgccgcggagaatgcccgccccgtgtcaggaaaaattatattctccagtgtggcccgggccggttccggaacaggaaaaagctgaacgtcctgctgaacattcttgcatctcaactcaggctctctgtcgtgcaggaaggaaaaaccacctatgtcctgctttccgaaataaacaatatcacgctgcctgaactgaatgcgtgctacagccagaaactgataagatggcatgagcaatcctttggcttataa

SEQ ID NO: 34519 - DNA, 207 bp, Escherichia coli; identical to SEQ ID NO: 6172

SEQ ID NO: 34520 - DNA, 1626 bp, Escherichia coli; identical to SEQ ID NO: 32385

SEQ ID NO: 34521 - DNA, 1026 bp, Escherichia coli
atgtctgtatatacaactgcagaattactggcatcgacccagcatcactttaagttcgatccgctgtttctgcgcctgtttttccgtgaaacctatcctttcaccacggagaaagtctatctctcacaaattccgggactggtaaacatggcgctgtacgtttcgccgattgtttccggtgaggttatccgatcccgtggcggctccacctctgaatttacgccgggttatgtcaaacccaagcatgaggtgaatccgcagatgaccctgcgtcgcctgccggatgaagaaccgcagaacctggctgacccggcttaccgtcgtcgccgtattattcggcagaatatgctggatgaaaatctggcgattgcccaggtcgaagagatgcaggcagtttctgccgtgcttaagggcaaatacaccatgaccggtgaagccttcgatccggttgaggtggatatgggccgcagtgaggcgaataacatcacgcagtccggcggcacggagtggagcaagcgtgacaagtccacgtatgatccgaccgacgatatcgaagcctacgcgctgaacgccagcggagtggtgaatatcatcgtgtttgatccgaaaggctgggcgctgttccgttccttcaaagccgtcagggagaagctggatactcgtcgcggctctcattccgagctggagacagcggtgaaagacctgggcaaagcggtgtcctacaaggggatgtatggcgatgtggccatcgtcgtgtattccggacagtacgtggaaaacggcgtcaaaaagaacttcctgccggacaacacgatggtgctggggaacactcaggcacgcggtctgcgcacctatggctgcattcaggatgcggacgcacagcgcgaaggcattaactcctctgcccgttacccgaaaaactgggtgaccaccggcgatccggcgcgtgagttcaccatgattcagtcagcaccgctgatgctgctggctgaccctgatgagttcgtgtccgtacaactggcgtaa

SEQ ID NO: 34522 - DNA, 198 bp, Escherichia coli
atgacccgcctgcaggacgagctgcgcacggaatctgtccgcgctcaggcccgtgaacagtttaccggtgcggtggaccggatatttgacacggcggagagcgtctgtgttgcctctgttgcccgtacggttctgcgtgccgtccgtgacacggtggtctctgttgcccgcgctgtatggaactggattttcttctga

SEQ ID NO: 34523 - DNA, 981 bp, Escherichia coli
atgagtcatcaacttaccttcgccgacagtgaattcagcagtaagcgccgtcagaccagaaaagagattttcttgtcccgcatggagcagattctgccatggcaaaacatggtggaagtcatcgagccgttttaccccaaggctggtaatggccggcgaccttatccgctggaaaccatgctacgcattcactgcatgcagcattggtacaacctgagcgatggcgcgatggaagatgctctgtacgaaatcgcctccatgcgtctgtttgcccggttatccctggatagcgccttgccggaccgcaccaccatcatgaatttccgccacctgctggagcagcatcaactggcccgccaattgttcaagaccatcagtcgctggctggccgaagcaggcgtcatgatgactcaaggcaccttggtcgatgccaccatcattgaggcacccagctcgaccaagaacaaagagcagcaacgcgatccggagatgcatcagaccaagaaaggcaatcagtggcactttggcatgaaggcccacattggtgtcgatgccaagagtggcctgacccacagcctagtcaccaccgcggccaacgagcatgacctcaatcagctgggtaatctgctgcatggagaggagcaatttgtctcagccgatgccggctaccaaggggcgccacagcgcgaggagctggccgaggtggatgtggactggctgatcgccgagcgccccggcaaggtaagaaccttgaaacagcatccacgcaagaacaaaacggccatcaacatcgaatacatgaaagccagcatccgggccaaggtggagcacccatttcgcatcatcaagcgacagttcggcttcgtgaaagccagatacaaggggttgctgaaaaacgataaccaactggcgatgttattcacgctggccaacctgtttcgggcggaccaaatgatacgtcagtgggagagatctcactaa

SEQ ID NO: 34524 - DNA, 651 bp, Escherichia coli
atgctaattgatcccaactcacatctttatgtttatgcaataacgagagactttggttttgcacctaatccatttcatggaagttgtaccttggcaacatgcaaacctggaattagaaagtcagctaaagtgggtgattggatactcggagttggtggagccaatttaaaatcagctaaaaaaaaatgtatcctattaatgaaagtttcagaaaaaattagtttcaatggttattgggaggataccaggttctctctcaaaaagcctgctagaaatggtagtcatgtacaaattctgggcgataatatctaccatcaaaatgaaaacaatgaatggatacaagaagattctcatcatagcaatgctgatggttcatttaacatgacaaatcttgaacgagatactagctctaataacgtgttgatttcagatcatttttattattttggtaataaagcgattgaagtagacttagactcaattgaatatcacagaattagaaactataaaaaaatccctttaaattcgactataccagccattgatcttataaaaaaaatagaatttgattttcgtagtgataaaaactcagttatatctgaccctgtctcttatacacatctgacgctgccgacgatactccttgtgtag

SEQ ID NO: 34525 - DNA, 639 bp, Escherichia coli
gtggtgctctgggaaatcgatctgacagaggtcggtggtgaacgttattttttctgtaatgagcagaacgaaaaaggtgagccggttacctggcaggggcggcagtatcaggcataccccattcaggggacgggatttgaactgaatggcaaaggcaccagtacgcgccccacgctggcagtctctaacctgcacggcatggtcaccgggatggcggaagatctgcagagtctggtcggcggaacggtggtcaggcgtaaggtttacgcccgttttctggatgcggtgaacttcgtcaacggaaacagtgacgccgatcctgagcaggaggtgatcagccgctggcgcatcgagcagtgcagcgaactgagcgcggtgagtgcctcttttgtactgtccacgccgacggaaacggacggtgccgtttttccggggcgcatcatgctggccaacacctgcacctggacctatcgcggtgacgagtgcggttatcacggtccggcggtcgcggatgaatatgatcagccgacgtccgatatcacgaaggataaatgcagcaaatgcctgagcggctgtaagtttcgcaataacgtcggcaactttggcggcttcctttccattaacaaactttcgcagtga

SEQ ID NO: 34526 - DNA, 306 bp, Escherichia coli; identical to SEQ ID NO: 10047

SEQ ID NO: 34527 - DNA, 1218 bp, Escherichia coli
atgcctctttcccgacgtaattttattcagaatgccgttttaggaatatctgccgcagggctgtcagctgcgccggcccttgccaaaaatatctcatcttcaacggcacatatcatcagtaaaacgtctggacatgctgatacatcgaccagcaagtctcttcatatcatcagtctggacagactggaggcttcagcaaaagatgtgatgacggaagctgcgtatgcatatattgctcatggtgctggagatgagtggacgtatcatgagaaccgcagggcattcagtgattatcctttgttacctcaccgactcagtggagttgctgcccacagcattgatatccggactgaccttttgggccatcatctggaacatcccctgctgatagcacctatgggcgcgcatatgttcgtccatccggaaggggaggtgattgctgcagcgggtgcagaaaaggccggggcactttatgaatcatcaggggcatccaaccgctctctggaggatattgcaaaagccagtaaaggacctaaatggttccagctgtattttaacgcggatgctggtgttacccgaagtttactggagcgtgcaaaagcggcaggctattcagccattattatcacagcggatgcgcttggtcccgggacaagtgatgcttttctcagcatgagctcgcctttccctgcaggagcgacgttcggtaatcatgacccccgttacggtggcaaaggtgatttttttaaccaaaaagttgagctgaccccggctgatattgagtttgtaaaaaaaatcaccgggctgccagtcattgtcaagggcatcctcagaggtgaggatgcagtggttgccattgatgcaggagcagatgccatccaggtgtctaatcatggtggtcgccagattgatggtgttccttctgccatcagccagttgcaggaagttgctgcaagagtcgggcacaaagttccggttatttttgacagcggtattcgcagggggattgatgttgtaagggctatctctcttggggcaacggctgttgcggtcggacgtcctgttctttatggcatcgcagtaggtggtgtcgggggcgttgccggtgtcattgagcacctgaagacggagctgaggacggcaatgttactgagtggtgctcgtacacttaaggatttggctcagggctttatcagaaacaaggagactgagcattga

SEQ ID NO: 34528 - DNA, 357 bp, Escherichia coli
atgaaaatattcattactgagcaacaaaaagctgaacttgaacgccttcatgattccagtcgtgacgggcgagtcagagatcgtattaaagccattcttctggcttccgaaggctggagttctgccatgattgctcaggctttacgcttgcatcagacaacgatttatcaccatatcagcgaattcctgaataaaggaaaactgaagcccgaaaacggcggctcagacagcaaactcagtgctgaacaaacggccttttcatcagccagttatccgataatttatttcaccatacccgcgatgttattgcgtttgtcacccggacatggaacatcattttcagcattccggggatga

SEQ ID NO: 34529 - DNA, 672 bp, Escherichia coli
atgaataagtggctgcatcgtaatggtgtcacctacaaaaaaccgtcaggcgtcccccataaattcagtgaagagaaacaaaggcaattcattgaatattataaggaactgaaaacaactgtgggtgatgagccgattctttttattgatggagtccatccgactcaggccactaaaatcagctatggctggatacgcaaaggccagaaaaaagcagtaaaaacaacaggcagccgcacacgcctgaatatcatgggggcgctgaatctgaaagcactgacgtcaccgctaatctgcgaatataaaaccattaatgaatataatgtatcccgttttttcaatgagatacgaaaggtttatcctgattataaccagaaaatccacgttattctggatggagcaggttaccaccgttcacagttagtgaaagactgggcggaagtggtaaatatcaggctgcattaccttcccccttacagtccaaacctgaatccgatagaaagaatgtggaaattaatgaacgaacatgcccggaataatcgctacttcagcagtacgcgagagttcagggaagcaatatctgtcttttttaaccagacactgccggatatagcggactcactgacatcccgaattaacgatcactttcaggtgctcacacccgcatcttga

SEQ ID NO: 34530 - DNA, 312 bp, Escherichia coli; identical to SEQ ID NO: 9190

SEQ ID NO: 34531 - DNA, 720 bp, Escherichia coli
gtgaattcactctataccgctgaaggtgtaatggataaacactcgctgtggcagcgttatgtcccgctggtgcgtcacgaagcattgcgcctgcaggttcgactgcccgcgagcgtggaacttgacgatctgctacaggcgggcggcattgggttacttaatgccgtcgaacgctatgacgccctacaaggaacggcatttacaacttacgcagtgcagcgtatccgtggcgctatgctggatgaacttcgcagccgtgactgggtgccgcgcagtgtgcgacgcaacgcgcgtgaagtggcacaggcaatagggcaactggagcaggaacttggccgcaacgccacggaaactgaggtagcggaacgtttagggatcgatattgccgattatcgccaaatgttgctcgacaccaataacagccagctcttctcctacgatgagtggcgcgaagagcacggcgatagcatcgaactggttactgatgatcatcagcgagaaaacccgctacaacaactgctggacagtaatctgcgccagcgggtgatggaagccatcgaaacgttgccggagcgcgaaaaattggtattaaccctctattatcaggaagagctgaatctcaaagagattggcgcggtgctggaggtcggggaatcgcgggtcagtcagttacacagccaggctattaaacggttacgcactaaactgggtaagttataa

SEQ ID NO: 34532 - DNA, 984 bp, Escherichia coli; identical to SEQ ID NO: 17571

SEQ ID NO: 34533 - DNA, 990 bp, Escherichia coli
gtgagagcactgctgacccctgaaattgccccgcgtatggggatcgtcttgttcagacccggttcagagctgatgcccctgtttatgcaggggcgtgtcctgctggagcctgagccggaacgttattcatcttttgccagtggtgccgttccggcagcatcacaaccgctggcggatgatcctgccgttcgggccgtgttccgccatgaggcggtgatccgtcgtgctggtggcgtggaatgccttgagagctggttacttcgtgaaaaaggctgccagtggcctcattccggatggcacagcgagaacatgaccacaatgcgacacgcgccgggcgcaatccgtctgtgctggcactgcgataacctgcttcgcgatcagttcacggaacgtctggaatcaatggcaacggataactgtgcccgctgggtgttgtccgtagtccgtcgtgatctcggttttgatgacagccacgttgtgacaatgccggaactgtgctggtggctggttcgtaatgacctggcggatgccttaccggaaagtgcagcccgtaaggcactgagattaccgaagcctgttgtgccgtctgtcacccgggaaagtgaccttgtgccttcggttcctgccaccagcatcatccgggataaggcgaaaaaggtgctggcgctgaaagtggatccggagtcgccggagtcttttatgttacgccccaaacgtcgtcgctgggttaatgaaaagtacacgcgctgggttaagacgcagccgtgtgcatgttgtggtaagccagccgacgatcctcatcacctgattggtcatggtcagggtggaatgggtacaaaagcgcatgacctttttgtgttgcctttgtgcagaaaacaccatgacggactgcatgcggataccgtggcatttgaagagaagtatggttcccaactggagctgatatttcgttttatcgatcgcgcgctggcgattggtgtgctgtcctga

SEQ ID NO: 34534 - DNA, 336 bp, Escherichia coli; identical to SEQ ID NO: 17647

SEQ ID NO: 34535 - DNA, 747 bp, Escherichia coli
atggcaacaccaaatcccctggagccggtaaaaggtgccggtaccactctgtgggtttacaacggcaaggctgatgcttatgcaaacccgttgtcagacgatgactggcagcgactggctaaggtgaaggatctgacgccgggcgagatgacggctgaatcctacgatgataactacctggatgatgaagacgcggactggaccgcgaccgggcagggacagaaatctgcaggtgataccagttttacgctggcctggaaaccgggagaggaaggccagaaagggcttataggctggtttgaaagcggcgatgtccgggcctataaaatccgttttccgaatggcacggtggatgtgtttcgtggctgggtcagcagtatcggtaaggccgtgacggcgaaagaagtgatcacccgcacggtgaaagtcactaacgtgggtaaaccttctgtagcggaagaacgcagcaaaattacgccggtcactgcgattaaggtaacgccgacaggtacggttgaaaaagggaaaacaaccaccctgaccgttactgtggaaccggaaaatgcaacggataagacattcagggcgatttccgccgatccatcaaaagccaccattagcgtgaaagatatgacgattactgtgacgggggttaaggatggaaaagtcagcatccctgtgatttccggtaatggtcagtttgctgcggtggctgaaattaccgttaataatgtgccgggtggctaa

SEQ ID NO: 34536 - DNA, 372 bp, Escherichia coli; identical to SEQ ID NO: 11381

SEQ ID NO: 34537 - DNA, 678 bp, Escherichia coli
atggaaaacaaggccgtcacaatatcaacacagctagcaatatttattgacagcaccatagctagaccagatcttctctttaatagcctaaactcagaaattggcgaagttatagacgcaatgccacagacgcttcccctgcctgcagatgcacccgcagatatccctcgcgttattggcacatcgtcctttggcaagttcaacttaaacatatcactaaacagaatagattttgtagaaaactacacccctactgaggagatcgaaaaatcagtaacggaattcaaattaaagtgcaatacgctaatagcaacaatattccaaaaatatggagtcgtaagaatcggcctagttggtaactattacatcccacataaaaatccatctcaactaatagctgatctgtatttaaacgaaaacaaaagaaatttagatgaaataacaataagaataaataaccgcgatacattcaaaaatatacaaataaacaatgtcatcaatttaagccaaggacaagtaaccgcacagaactacaatggaaatgcggtgatagttcaacttgactacaactcaaccgataataacacaccacttgaagaagggttaaccttagccctatttaaagaaaaatccattgcttataactccaagcatgttgaggatgtgagtggattatga

SEQ ID NO: 34538 - DNA, 696 bp, Escherichia coli
atgaaatttttcaaaccaaaaacagatgcgattgaatacattcgtgtagaaccatcattctcaaaaacaagtagcaatataaataatgcgaaatcaggaagtgacacaaactcacagcctggattcattttaagatctcaaatagaggaaatgataaaaaaccacagaccgaaaacagaaaaagaaataaaggctgaaagcgaaggtcttataaggctttgctccatggcctttatatttttaatagttttatcaatttttatgttaatcgtttatttcggaataaaagatagagaactaccagattttgcaaataacctgatggcactaatgacaacattagttggagcgataggtggttttatatatggaacaaaaaaaataacacagacaaaaacacaaataaaaaaaacaaataacacacaagcacaccagccccatacttcggggcttttacaaccgttacctgacaccatttaccataacgtctcattacgcgcaccgccaaaacgcgctgaacgcgattctgacgcagacaccgcaaaaagagatgttttccccgggataaaccggaaaaatgcgtcaggatcgctttcagctcactgcatagctatgcatgaaagtgaatggcgatcggtttgggggcttacggcgttcataccgtctgttttcgacagtttctctccgggaagctaa

SEQ ID NO: 34539 - DNA, 1293 bp, Escherichia coli
atgagtaacgtttttctacctaatacaatgatgggcactctatgttacaaaagagtttatgagttcttcgaagagcctcgcttcttttcagttgaaaatgaagttagtacactttttatcgtttactggattggtgaggatgatgaatgtgatagttggtttatcataccaatttctccagggcgattagagttgattgaaagaaaaagaatatgtatccgtgatgctttgattaatcaggagcaaaactttttctatgaagcccatataccatacgatcgtacaggcaaagtgacttggctgagtaaaaacttggttgatatatttgaaatacctttgcctgtttctgaactatatataagttcggtagttccagtaatgccaaatggtaaactgggcgaggctattacttactcaactcatgagatccatttagaaaaaagctcaaagaaaagtgcaaaaaatttggttttaagtcatgtgtcaaacgtatgcgacagattcagcgatctttatgacagaatgctggagatggcaaagtgcaaagataaattacgtcctgtcgatgcgcggcctggttcctttatcatttcttttaaagctgagaaattacattcctttgaagacacttttaaagaattaagcaggctgatagaacttagagctgatattattccttttgttttcgaaaagggtattgatgttccagctttgacagatctcttacaatccatagttgaaaccggaacgaatatggaactcaaaagcaaccagacaggtgaattagcttttgttattacaaaagctggtgctgagttctatttaaaaaaattatcacgtctttctacctcattggttggagggcatcaaatacctcaagcagatgtcctcgagacagtttataaattagtggaaattgtttggagtggcgaaccacttactcctattaatactggtttgcaagatagacatatctactattataagcatgcagctaaagttttgggattacttgatagctttggtaatgtcacaacgtctggtcaacaactcgtacaaagtgatgagatgactagacataaaattgcagcgagaaaatttgaagtgagtcatgtgggatgggcttggataaattgggccagtgttgaacatttatcccaaattgatcctgacagcgctttagacttcctattggagcaatgccactctttaagtcgtgatactattgaacgacgtgctacaactattaaacactggtgccgtgaattgaaaaattattatacacctctgtaa

SEQ ID NO: 34540 - DNA, 471 bp, Escherichia coli
atgctatcgtgttggcagtttttttctttgacgacacggaatgattttatgtcagaagtagctgttgaacttgaagaggattcttggcctgactttttcccggttggagtaccgccgaaatcagccgtccctgctgagggcgagtttttccgtttggtaaggtctaatccaccaacccctgcatgtttcctctctacacatgaagagtatccgcagcggcacaaaaagtatcgtggggaagcacttcagtgtgtctatggaacatcattcttttcagaatcgcgcggggctacggatgcaaaagctaaatttcctgcagctcttggtcatcgactcgttgctagtggtcaggtcacccccgttttcggagtaatgaaaaaaacatttgccgatccagcgcactacacaatttggcttaagcgtaattgtgctattcatgaacattttcactgtataggagaaggcgtatga

SEQ ID NO: 34541 - DNA, 522 bp, Escherichia coli
gtgaataacatgtttgctaatgcttggttgaaagttgccacggtttcggctctcctcattgcctcatttgttgcagggagtgtgtggacggaacgagcatgggaaaagaaatgggcggatcgtaatagtgaagaatcctctcaggctgtgaacgctcagatagctgctcgtatgattgaacaagggcgagtgatcgctcgtgatgaggctgttaaaaatgcacaagaacaggctgcaaaagcggctgcgaatgttgctggcctgtctgccactgttaaccagctgcgcaccgaagcaacaaaacttaccgtccgcttggacgctgcaaagcacacctcaggtcttgccgttgccgtcggaagcaaaacaaccgccaccaacgccgcgatgcttgccgacatgctcggaagtattgcagaagaagctagatactatgctgggcgagctgatgaaagttacttggctggaatgacatgtgaacacatttacggctcagtgagggactcaagtagtgttaaatag

SEQ ID NO: 34542 - DNA, 177 bp, Escherichia coli
atgagggacaacctcgcgaaccataaccgcgctgatgacaggactggcccggcttgtattgcttccagccttcgcttttgtggcttttgcaatagcctgacggatctgtggtggtatggcggcagccgcgaactcggcatgcttttgaggttcgagggagcatatgtactccaatga

SEQ ID NO: 34543 - DNA, 189 bp, Escherichia coli; identical to SEQ ID NO: 23067

SEQ ID NO: 34544 - DNA, 297 bp, Escherichia coli
atgcagcacaggaaggacgtgttaaagctggcagggaatacgggcatgatgttactggggatggtcattttcctgtttaccgtgagttgcgggacgctctggtatcttggagggatgatacaggcgaacctggaagatatcaggaagcaggaagagacattgcagaaactgaacgcgaagacatggggcgtggagttcgtacaggacgggaacaggaaatttctggtccttccgtacgggaaatcagcagaggtgattccccatcaggggaaggactgggtacaactgatggagtga

SEQ ID NO: 34545 - DNA, 198 bp, Escherichia coli; identical to SEQ ID NO: 31982

SEQ ID NO: 34546 - DNA, 324 bp, Escherichia coli; identical to SEQ ID NO: 26247

SEQ ID NO: 34547 - DNA, 2961 bp, Escherichia coli; identical to SEQ ID NO: 30637

SEQ ID NO: 34548 - DNA, 234 bp, Escherichia coli; identical to SEQ ID NO: 28524

SEQ ID NO: 34549 - DNA, 234 bp, Escherichia coli; identical to SEQ ID NO: 28524

SEQ ID NO: 34550 - DNA, 168 bp, Escherichia coli; identical to SEQ ID NO: 30089

SEQ ID NO: 34551 - DNA, 294 bp, Escherichia coli; identical to SEQ ID NO: 30090

SEQ ID NO: 34552 - DNA, 621 bp, Escherichia coli
atgcctgttacagaagattgccatataggaggaacattaaatccatatggtacatcaaagtatatatcagaattgatgattagagatattgcaaaaaaatatagcgatactaattttttgtgtctgagatattttaacccaacaggtgctcacgagtcgggaatgatcggtgaaagtcccgctgatataccaagcaatttagttccttatatattacaagttgctatgggtaaactagaaaaacttatggtgtttgggggggattaccctacaaaggatggaaccggtgttcgtgattatatacacgtaatggatttagcggaagggcatgtggctgctttatcttaccttttccgtgataataacactaattatcatgtttttaatttaggtactggtaaaggatattctgttttagagctggtttctacctttgaaaaaatatctggggttagaattccatatgaaattgtttcgagaagagatggggatattgctgaaagttggtcatcaccagaaaaagcaaataagtatctcaattggaaagctaaaagggaattggaaacaatgcttgaggatgcctggcgctggcaaatgaaaaacccaaatggttatatttaa

SEQ ID NO: 34553 - DNA, 873 bp, Escherichia coli; identical to SEQ ID NO: 8321

SEQ ID NO: 34554 - DNA, 339 bp, Escherichia coli; identical to SEQ ID NO: 5805

SEQ ID NO: 34555 - DNA, 552 bp, Escherichia coli
  misc_feature (536)..(545): n is a, c, g, or t
atgactaaaagtgaaacatttatgattcccaatcacaaggcagcaaagctaagtgaattggatatgatgattgttaactcagtaccgccaggtggcaactggaaaaatattcctttagatgtaccgtctaaaagaatagagcaaattagggatagttatgcacaaggaaaaggaagccgttcaacatactacggtagattacttccagatatgcctgcatatactatcaatacatattttaaccgacctgggaatggttgccatattcactatgagcaagatcgtgttctatcccagagagaagctgcaagactacaatcgttcccggatgattttattttcttcggaggtcaaacagcaattaatacccaaatcggtaatgcagtgcccccatttttagcttttctgattgcgaaagaaatagagaaggcgataggtaatactggttattatatcgatttattttccggagctggagggctgggactaggattcaaatgggctggatggactccattattggcgaatgatattgnnnnnnnnnnatattga

SEQ ID NO: 34556 - DNA, 240 bp, Escherichia coli
gtgcgttatcagttagctaactgctatatgggccgggccgggttgataaactccggcggtgctgcaggcggtgaaactgacctcagcgatgcagtgcgtactgcggttatcaacaaacgcgcaggcggaatggggctgattcttggacgtaaggcgttcaagaaatcgatggctgacggcgtgaaactgattaacgccgtgcaggacgtttatctcgatagcaaaattactatcgcctga

SEQ ID NO: 34557 - DNA, 174 bp, Escherichia coli; identical to SEQ ID NO: 8853

SEQ ID NO: 34558 - DNA, 435 bp, Escherichia coli
gtgagtgccagttttcagcgccccgtcacggacagggtgtggtggctgaccagcgcttatgcccagtggtcaccggaccgtcttcatggtgtggaacaactgagcctcgggggtgagagttcagtgcgtggctttaaggagcagtatatctccggtaataacggcggttatctgcggaatgagctgtcctggtctctgttctccctgccatatgtggggacagtccgtgcagtgactgcactggacggcggctggctgcactctgacagcgatgacccgtactcgtccggcacgctgtggggtgctgctgccgggctcagcaccaccagtggtcatgtttccggttcgttcactgccggactgcctctggtttacccggactggcttgcccctgaccatctcacggtttactggcgcgttgccgtcgcgttttaa

SEQ ID NO: 34559 - DNA, 351 bp, Escherichia coli
atgatctcgctcccatcagacactcgaatctggctggttgccggcgttactgatatgcgtaaatccttcaacggtctgggtgaacaggtacaacatgtgctggatgagaaccccttctccggtcacctgtttatctttcgcggccgacggggtgacacgattaaaatcctgtgggctgatgctgatggtctgtgcctgttcaccaaacgtctggaggaaggccagtttatctggcctgcggtgcgtgacggtaaggtatccattacccgctcgcagctggcaatgctcctcgataaactggactggcgtcaacccaaaacatcccgccttaatgcactgacaatgttgtaa

SEQ ID NO: 34560 - DNA, 426 bp, Escherichia coli
atggaacagaaaatattatccgcagaaccctgcagaacattttcaaatgagtttaaacttcaaatggttaaactggcttcacaaccaggagcctctgttgcccgtattgccagggaacacgatatcaatgataacctcctgttcaaatggctcaggctctggcagaacgaagggcgtatatcgcggcgtcttccggtaacaacctcttctgacgctggcgttgaattattacctgttgagataacgcctgatgagcagaaagagcctatggcggctcttactccgcttttatccactccttcacaaagcacagtcagtgccagttcctgtaaagttgagttccgccacggtaacatgacgctggaaaatccttcaccagagctgctcacggtgttgatccgtgaactgaccgggagaggacgatga

SEQ ID NO: 34561 - DNA, 663 bp, Escherichia coli; identical to SEQ ID NO: 10068

SEQ ID NO: 34562 - DNA, 147 bp, Escherichia coli; identical to SEQ ID NO: 27485

SEQ ID NO: 34563 - DNA, 153 bp, Escherichia coli
atgaaaagaaaagttctggcaatgctggtcccggcgttattagttgctggcgcagcaaatgcggctgaaatttataataaagatggcaataaactggatctgtacggcaagatggttggtgagcgcattctgaccgaccgtgaaaatggttaa

SEQ ID NO: 34564 - DNA, 216 bp, Escherichia coli
atgtcaaatgctcaagaggcggtaaaaccccgccacaaggagacttcgcttattttcccggttctggcgctggtagtgctgttcctgtggggaagcagccagacactaccagtggtcattggcatcaatcttcttgctcttattggtattttaagtagcgcctttagtgttgtccgtcatgcggacgtattagggaaggtgcgaacaagtccctga

SEQ ID NO: 34565 - DNA, 264 bp, Escherichia coli
atggggtttataatgaataaagatagatctttaaatgaaatgatgttaagcttgtttaataaatcaactattgttgacttgtcaagtgagacaatatctgagagtaaatctctttcaggccgtatttatcaggatcctgaacataacggggaatttgaacttgatcgtgtattgacagatatttatgctcctcagttaattatttttttaccagataaaccaaatggaacaggaatattgattattcccggggggggctactag

SEQ ID NO: 34566 - DNA, 357 bp, Escherichia coli
atggtcgttggaatcaaaccatacggagctgtagcgcacgccagcatccagcgacagtttttcgctcagctgccactgtgtctgcaaatagggatcgacgttccacatcagattgcgttcgtcacggcgcaactcacctttttgcccgtattccggcacgccgctattcaggcggaagttattgtagcctttgcgattttcactcatgttttcgtagttcaggccggtagtgaacgtgagcggaacgcccagctcgccacggtgtgtccagcggctgtctatcccctgataatggcgttgcagagtaatcacgccgcccgcatgcgacgggttaagttgtggtgccatcgggattga

SEQ ID NO: 34567 - DNA, 1248 bp, Escherichia coli
atggcactgaatattccattcagaaatgcgtactatcgttttgcatccagttactcatttctcttttttatttcctggtcgctgtggtggtcgttatacgctatttggctgaaaggacatctaggattaacagggacggaattaggtacactttattcggtcaaccagtttaccagcattctatttatgatgttctacggcatcgttcaggataaactcggtctgaagaaaccgctcatctggtgtatgagtttcattctggtcttgaccggaccgtttatgatttacgtttatgaaccgttactgcaaagcaatttttctgtaggtctaattctgggggcgctcttttttggcctggggtatctggcgggatgtggtttgcttgacagcttcactgaaaaaatggcgcgaaattttcatttcgaatatggaacagcgcgcgcctggggatcttttggctatgctattggcgcgttctttgccggcatattttttagtatcagtccccatatcaacttctggctggtctcgctatttggcgctgtatttatgatgatcaacatgcgttttaaagataagggtcaccagtgtgtagcggcggatgcgggaggggtaaaaaaagaggattttatcgcagttttcaaggatcgaaacttctgggtttttgtcatatttattgtggggacgtggtctttctataacatttttgatcaacaactctttcctgtcttttatgcaggtttattcgaatcacacgatgtaggaacgcgcctgtatggttatctcaactcattccaggtggtactcgaagcgctgtgcatggcgattattcctttctttgtgaatcgggtagggccaaaaaatgcattacttatcggtgttgtgattatggcgttgcgtatcctttcctgcgcgttgttcgttaacccctggattatttcattagtgaagctgttacatgccattgaggttccactttgtgtcatatccgtcttcaaatacagcgtggcaaactttgataagcgcctgtcgtcgacgatctttctgattggttttcaaattgccagttcgcttgggattgtgctgctttcaacgccgactgggatactctttgaccacgcaggctaccagacagttttcttcgcaatttcgggtattgtctgcctgatgttgctatttggcattttcttcctgagtaaaaaacgcgagcaaatagttatggaaacgcctgtaccttcagcaatatag

SEQ ID NO: 34568 - DNA, 330 bp, Escherichia coli
atgaaaaccttccgctggaaagtgaaaccgggtatggatgtggcttcgactccttccgtcagggaggtgcgctttggtgatggctattcccagcgagcgcctgccgggctgaatgccaacctgaaaacgtacagcgtgacgatttctgtcccccgttgggaggccacggcgctggaatcgtttctggcagagcacggaggctggaaagcctttctgtggacgccgccttatgactggcggcagataaaggtgacctgcgcaaaatggacgtcgcgggtcagtatgctgcgtgttgagttcagcgcagagtttaaacaggtggtgaactga

SEQ ID NO: 34569 - DNA, 1059 bp, Escherichia coli
ttgtggaaggcggaaagtcagttcgcggtactggaggaggcggcgcaacgtcgccagctgtccgcacaggagaaatccctgctggcgcataaagatgagacgctggagtacaaacgccagctggctgcacttggcgataaggtcacgtatcaggagcacctgaacgcgctggcgcagcaggcggataaattcgcacagcagcaacgggcaaaacgggcagccattgaggcgaaaaaccgggggctgactgaccggcaggcagcgcgggacgccacggaacagcgcctgaaggaacagtatggcgataatccgctggcgctgaatagcgtcatgtcagagcagaaaaagacctgggcggctgaagaccagcttcgcgggagctggatggcaggcctcaggtcaggctggagtgagtgggaagagagcgccacggacagtatgtcgcaggttaaaagtgcagccacgcagacctttgatggtattgcacagaatatggcggcgatgctgaccggcagtgaacagaactggcgcagcttcacccgttccgtgctgtccatgatgacagaaattctgcttaagcaggcaatggtggggattgtcgggagtatcggcagcgccattggaggtgctaccggtggcggctcatcagcgtcaggtggtgcagccattcaggccgctgcggcgaaactccattttgcgaccggaggatttacgggaaccggcggcaaatatgagccagcagggattgttcaccgtggtgaatttgtcttcacgaaggaggcaaccagccggattggcgtggggaatctttaccggctgatgcgcggctatgccaccggcggttatgtcggtacaccgggcagcatggcggacagtcggtcgcaggcgtccgggaagtttgagcagaataaccatgtggtgattaacaacgacggcacgaacggtcagatagggccacaggcgctgaaggcggtttatgacgtagcccgtaaggcggcaatggatgttgtgaccgggcagatgcgtgatggtggtctgttctccggaggtggacgatga

SEQ ID NO: 34570 - DNA, 309 bp, Escherichia coli; identical to SEQ ID NO: 9907

SEQ ID NO: 34571 - DNA, 519 bp, Escherichia coli
  misc_feature (334)..(353): n is a, c, g, or t
atgaaaggcaaatggcaaagtaatactctttacctggaacgtggctggtcgcaaatattaagcacagttcagataggagaaaattacacatcctcactcatattcgactctctgcgatttagcggaatacgcttatttcgcgatatgcaaatgctacctgattctatgcaaagctttacacctttagtacaaggtgttgcgcaaagtaacgccttgataacggtttcgcaaaatggctataccatttaccaaaaagaggttcccccaggaccatttactatcgcagatttgcaactttcgggcagcggctctgatctcgatgtcagcattaagnnnnnnnnnnnnnnnnnnnnggtagtgttcgttcctttttggtgccctactcttccgtgcccaatatgctgcaacctggtgtttcaaatttcgattttatcgccggacgcagtcagatatatggtgtcaagaatcaggaggactttctcgaggcaaattatatatatggcctcaacaatcttttga

SEQ ID NO: 34572 - DNA, 489 bp, Escherichia coli
atggcgaagcccttctgcgcccacgctgaagtccacggtctgcgtttccagcagctccgttttaatcagccacagcccggcgcggtgtgcctgcccccggctggtacagccaaaggcatccatcttcgtgacgttacgaccgtaacgggcaatggcctgcgtatcttcaacaagctctgtcgccgtctcccagccgttatccgggtcaatccagttcacctcaacggcattatggcggtccttcagggcgctgaagctgtagcggaacggcgcgccatcatccggcatcaccacattactgcggttataggtccacaccttatccgacggtcggtcctgcacgaacgtcagcgtctgcccgttccataccggcatacagcgcatcgccgagcagaaatcactgagcacatcccacgccttgcgctgtgtggtcaggtacgcattacaggtgatgcgcggctccgtgccgccaaagccgtccggcactga

SEQ ID NO: 34573 - DNA, 846 bp, Escherichia coli
atgcttttcattcctggtgcaaaaaaaccttttttattcaagaagaatatcgctgatttgcggcttacccttaaagaacttattaaggatagtgacaacaaacaattactttcccaacatttttcattatatagtcgtcaagatggagtttcctatgcaggagtaaattctgttctacatgcaatagaaaatgatggtaattttaatgagtcttactttctgtattccaataagacacttagcaataaagatgtttttgatgctatagctatttctgttaagaaacgcagtttcagtgatggtgatatcgttataaaatcaaacagtgaagctcaacgagactatgctctgactatactccagacgattttatcaatgacccctatatttgatatcgtagtcccggaggtatctgttccgcttggactggggattattacttccagtatggggatcagttttgatcaactgattaatggtgatacttatgaagaacgtcgttctgctatacctggtttggcgacaaatgcagtattgcttggtctgtcttttgcaattccactcttgattagtaaggcaggaataaaccaggaggtacttagcagcgttataaataatgagggcaggactctgaatgaaacaaatatcgatatatttttgaaggaatatggaattgctgaagatagtatatcctcaactaatttgttagacgttaagcttaaaagttccgggcagcatgtcaatattgtaaagcttagtgatgaagataatcaaattgtcgctgtaaaagggagttctctgagcggcatctactatgaagtggacattgaaacaggatatgagtga

SEQ ID NO: 34574 - DNA, 204 bp, Escherichia coli; identical to SEQ ID NO: 28033

SEQ ID NO: 34575 - DNA, 369 bp, Escherichia coli
atgtcagcacaagaaaaaacagtacagattgattcttttgatgcgaaatttttagatataaatacattaagcaggcttatttatgaacgtaagagttttgtgagcgaaaatgtttccgatgttagtgaaacggtaaaaagagtggagcatgaaatagagaaaacgaaattaagttgtcgtgtatatactgagtacaggagtacagctttagctggttctttatggtcaccaaccgtaattctgggagtggcgagtgcagtagcaataggtgttcataatttatctacatggaaccccgattatgaaatcggtaagaactatattaaacggagattatcggtaaaatataaaaaggcagaagtattgtga

SEQ ID NO: 34576 - DNA, 492 bp, Escherichia coli
atggtaaccagcgcaccggaaaaattatccgggcaggctgctgacaagatgcaggctggtgtgattctgctggactttatgcgccgggagttaaacctgtctaactcttcagtgcttggtgcctgtcagaaacttcaggaggctgttggcttaccgaatctggcaccgcgctatgccattgatgctcctgctgacgcgcctgatggctcaagtcgccctacgctgtcgctgagtgcactgctgaaacagtatggtatccgccttacggctaatcaggcatatcaccagatggcgaagctggggatcgttgaacaacgcgaacgatacagccgtaccgcgattaacaacatcaaaaaattctggtcgctgacggcgaaaggctgcatgttcggcaagaacatcaccagtcccgcaaatccgcgcgagacgcagccgcatttcttcgaatcccgattccctgagctgttaaagctgctcgataccgttcattga

SEQ ID NO: 34577 - DNA, 348 bp, Escherichia coli
atgagtagaaataacgaaacaagcggcgttgaactggttgtcgtgggcgtatttgctttctgtctggcagttgttgcctggctaatgaaaactttcgatgttgaatggcaaacagcactggaaactgcgcctggcctgatagtctggctgcttgttgttggggcggggatctttttcgggatcaaaatggaaactggccttattcgctggggtgctccactggcgatcgcccttctgattccgtggtatggaactggctggggaatgtctctgatgttcttcgggattcttattgtcgggtatggcctgctttattggtggcacagaagaaattcatattactggtaa

SEQ ID NO: 34578 - DNA, 651 bp, Escherichia coli
ttgtgcaaggcgaataaccggtgcaacaatctgaccagcaagcatattaaaagcacattaactaaattaattcaacgtttttatattcctgaaaatggccaggtcttaattgatggacatgatcttgcgttggccgatcctaactggttacgtcgtcaggtgggggttgtgttgcaggacaatgtgctgcttaatcgcagtattattgataatatctcactggctaatcctggtatgtccgtcgaaaaagttatttatgcagcgaaattagcaggcgctcatgattttatttctgaattgcgtgaggggtataacaccattgtcggggaacagggggcaggattatccggaggtcaacgtcaacgcatcgcaattgcaagggcgctggtgaacaaccctaaaatacttatttttgatgaagcaaccagtgctctggattatgagtcggagcatatcatcatgcgcaatatgcacaaaatatgtaagggcagaacggttataatcattgctcatcgtctgtctacagtaaaaaatgcagaccgcattattgtcatggaaaaagggaaaattgttgaacagggtaaacataaggaactgctttctgaaccggaaagtttatacagttacttatatcagttacagtcagactaa

SEQ ID NO: 34579 - DNA, 525 bp, Escherichia coli; identical to SEQ ID NO: 29346

SEQ ID NO: 34580 - DNA, 291 bp, Escherichia coli
  misc_feature (196)..(205): n is a, c, g, or t
atgatgaactataacgacgaagtaacccgcacacttcccctttctcatatgatttatcgggacagtgagatcgaccaggagaaagctgaaaagctgattgtgtaccattatccattaagcaaaagttatcgctggaagcagtgggaaaaccatcttgatagcgaattaggcaatcgataccatccttatctgatgnnnnnnnnnnttcctataaagagcagtttggattatttgttgctgttgattcagatcaggatactcctcccgttattaaaaattccgatggaataa

SEQ ID NO: 34581 - DNA, 531 bp, Escherichia coli; identical to SEQ ID NO: 12243

SEQ ID NO: 34582 - DNA, 333 bp, Escherichia coli; identical to SEQ ID NO: 5855

SEQ ID NO: 34583 - DNA, 261 bp, Escherichia coli; identical to SEQ ID NO: 28282

SEQ ID NO: 34584 - DNA, 396 bp, Escherichia coli
atgacgaaagatgaactgattgcccgtctccgctcgctgggtgaacaactgaaccgtgatatcagcctgacggggacgaaagaagaactggcgctccgtgtggcagaactggaagaagagcttgatgacacgggcgacactgccggtcaggatatccctctcagcccggaaaatgtgctgaccggacatgaaaatgaggttgtatcagcgcagccggataccgtgactgatacggctgatctggtcacggttgtggcactggtgacgctgcatactgatgcacttcacgccacgcgggatgaggctgtggcatttgtgctgccgggaacggcgttccgtgtctctgccggtgtggcagctgaaatgacagagcgcggcctggccagaatacaataa

SEQ ID NO: 34585 - DNA, 423 bp, Escherichia coli
ttgggatttaaaatatttgaaactgttcatgattttcgagcaaaagatgagtctgaacttacgctttctaatcttagtttctttgacgatgctgtattgacaccagagcagtatgacactctattgacgacatggtgcgtgtatgatggtagcttgctaacaacaccaattgaagatattgatcttaatggctacaaagcacacttgtgcgatggtcggctatatctaattgcgcctaatttcacaagtgaggctttgaaagctttacttcaaaagctggatgcagacaaagactttgcccctaacaaagttgtattttatggcagcaacttcgaaagtgcgaaacagatggaactcaatgaagcactacaaagttatgctaataaaaaatctattgatttagatttggtggtaaggaactaa

SEQ ID NO: 34586 - DNA, 240 bp, Escherichia coli
atgcgcggctatgccaccggcggttatgtcggtacaccgggcagcatggcggacagccggtcgcaggcgtccgggaagtttgagcagaataaccatgtggtgattaacaacgacggcacgaacggtcagatagggccacaggcgctgaaggcggtttatgacgtagcccgtaaggcggcaatggatgttgtgaccgggcagatgcgtgatggtggcctgttctccggaggtggacgatga

SEQ ID NO: 34587 - DNA, 603 bp, Escherichia coli
atggtggagagaagtatggatatttggagctttgataaactatttatttttattatttttgtggttcctggatttattagtataaaagtgtacgaagcacttcatccttcggttaaaaaagagtcatccaaaataattattgatgctgttgcttatagctgcattaattatgctatttggtttttcccgatttatttcgcagagcggaataacttatttgattattcattgtttttatattatctaatgtacttcttagcgttttttatatctccatcgttgcttcctgtagctctgtataaattaagagaatcgcagttttttagaaataaattgccgcatccagtggggcgtccatgggattttttcttcaggaatgctcctgcttgttgggttattatcaccctaaaagatggtaaaaaaataggggggctgtacgcaggtaatgcctttgcctcaagcagcccagaacctgagcaaatttatttgattgaaagttggcacatcaatgattacggtgggtttgatagacctaaagaacgaactttaggtgtgttggttctgactacagatgttcttaccgtagagttttattcaatttaa

SEQ ID NO: 34588 - DNA, 2262 bp, Escherichia coli
atgtctgataacaaaccatggggagctacgcccgatgagtggttccacttcgatctggtgttggggatgacagacaggcttttacctgtggtgtccaatccctgtgcagaactgtcgcctaatagcaagctgtctcataatttcggcaaaactcccagtcgctacaatggccaacgtaaggttgttggtatccccgactgggctaactatgttgttacggaaaacgattttgcccggtggtcgaacgaacccgattacggtatttgcgttcgtactggcgacggggtggtggctctggactgcgatatcaatgacgccgggatgcaggagatcgtacgcaatattatcctgtcatgcttgggggaacttccgccacgtcgctggcgggctgacagtcataaatgcctatacctgattgctgttgatggcgactaccgtaaacgtggtcaccgcctggaaggcgaaaacaaacaaatagagctgctcgctaagggccagcagtttgtggcttgtggtacccatccggcaggcgaacgtattcagtgggactgcggtttgcccggcgaacctctgaaaattacatctgaacagctcgaaagcctgtggcagcgtctagcggataacttacccgtgaaagacagctataccgcaggtgcgggacgtcagcgtgacctttcctgtgttgatccttccgcgacagatgatgtcgctgactggcttgacgcgaacgggtggactctgtcagtcagctctgatggttcccgcaatctgaaaccgtttcgggatgagtcagaatacagcaacggttgcagcgaaacatccattaagtatttcccaaaagggacggggggatttgaacagggacattttaaaagcatgcacaacaccgatgcggggcttactgatgccgactggctggaaggctacggctatacgcaatccctgttcgaagatctcacggtggttgaagatggcgataagcctgaatttaccgatattaatacagatatgacagctcattttctggaacgctttatctacgtcatcgagggtgaccaggtatgtgatcttagccgaccgccatatcagtgcatgatggatatgaagtcgttcaaaaacctgatggcgccttaccagttcccgccagaagggaaagggcaaccaactcccgcaaccaaacggtggatagagcatcggcataagaagattgctgagacgacaggctataagcccggtgcgggacgtattatcgagcgtttcgacgggcggtttgagataaacgaattttatatgcctgagcatccacgtacagcggatacaagtaaggtgtccacgttccttaatcatatggcgtatctggtacctgatgcctggcagcgcgagtttttcatcgcccgtctggggtggatggttcagcatccggagcgtcgatgcccgatttctattctgcatgtggctaccgcacatggtacgggcagaggatgggtcagccagttaatggagcgcgtgctcggcccgtggaactgtgctcgtactcgcatgaagatcctgtgcgataaccagttccatgactatctgtacaatacgcttctatgcaccattgacgaggtgcgcgaaaacgataagcggtatgaggtgaacgataagatccgcgatgtgctgacagaaccacggtttgaagtgaaccgcaaatatggcagcaaaaaaacgatggatatatacaccggctttctgttctacaccaaccactttgatgcgctggcgctgccagaggaagaccgacgtatcgctgtgctggggggccctgacttcgccgcaactgaagagcattacgccagcctgtacggtgcgctaagcgacagcgactttatcgcccaggtgtactggtatctgatgggcgttgacctgtctcgctttaactggcagcgcgcccccgagacgaaagaacgccttctgatgattgaaagcaataagagcgatgtggaggctgctcttattgaaatcctggataatccgcctgtgccagcaatgacttatcaacaaattgttaacgcaatactggcagaagcaggaatggatgtagaaattaaccagaagcatattactcgcattttgaaagaaagaacaaagcgggaacccgtacgcgtaaaaattgacgggtttgtatataggatttggattcttgtaaaaaataacgatttcagcaacgaagaattgcgcgaaatatataaatcttgcgaaattttgcaatctggattgtaa

SEQ ID NO: 34589 - DNA, 231 bp, Escherichia coli
atgaaagtttcaggattaaaaaatcatatcgacggaaataacgaaattacctgcccacgttgcgctagtaacagcgtgtttattcgcgatgtcgccatgcgagcgcataaacacgacaaaacggtagttattgacctcggctgctctgtttgcgacgacaatttccagcttgtgttatctgacgggccaaacgtcagtgttagcggccacctgacattcaacgagtattga

SEQ ID NO: 34590 - DNA, 153 bp, Escherichia coli
atgcaaggtattaaaatatatacaattctagcctcttctcttatatctggtagtgtttttgctcaaacggaaatttcgactgcaaattcgtctacggttaatgcaagttatgttgaaccttcagcggaaaaaaataatatcgccaagcgataa

SEQ ID NO: 34591 - DNA, 258 bp, Escherichia coli
atgctttacgcgctagtgtgtcgttttttttgtggcgaagagtgggcaagaagcggatcctcttgttatcccttcgatgtcgtcgtaatctcataccctgtaaacaaaaaaaccaccgctaccaacggtggttcgtttgccggaattcagagctaccaactctttcttccgaaggtaactggctttcacggagcgcaggtaccaaaactgtccttccagtgtagccgcagtcaggccaccacttcaagaactctgtag

SEQ ID NO: 34592 - DNA, 3642 bp, Escherichia coli
atgcgtattgtcatagatttacaaggcgcacagacggaaagccgctttcgtggcatcggtcgttatagtatcgcaatcgccagaggcataatcagaaataacagccgacatgagattttcatcgcgctatccgccatgctggatgagtcgattgcagatattaaggcgcaatttgccgatctcctgccggcagaaaatatagtcgtatggcatgccgtaggccctgttcgtgcgatggaccaaggtaatgaatggcgtcgggagagcgcagagctgattcgggaagcgtttcttgaatcattgtgtccagatgtcgttttcattacgagtttgtttgaaggtcatgtcgacgatgcggctacatcggtacacaaatttagtcgtcagtataaagtagccgtactgcaccacgatcttatccccctcgtgcaggcggaaacctatctgcaggacgatgtatacaaaccctactacttacagaaagttgagtggttaaaaaacgctgaccttttgttgactaactctgcttataccgcacaagaagcgattgagcatctgcatttacagggcgatcatgtgcagaatattgcagccgcagtcgattctcagttttgtatggcggaggtggcagcgagcgaaaaagagaccgtccttggccattacggtattcagcgcgagttcatgttgtatgcgcccggaggatttgactcaaggaaaaactttaaacggttgattgaggcctatgccgggctcagtgatgccttacgtcgcagtcatcaactggttatcgtcagtaagctttccatcggtgatcgtcagtatctggaatcccttgcgtcaggtaatggtttacagcagggcgaactggtactcactggttatgtgcctgaagatgagctgatccagctctatcgcctatgtaagctgttcatctttgcttcactacatgaaggttttgggttgccggttctggaagcaatgtcgtgcggtgcgccggtgattggctcaaatgtcaccagtattcctgaagtcatcgataatcctgaggcattattcgacccgtattctgtctcttccatgagggataagatcgcgcaatgtttgactgatgataccttcctcgcgcgtctgaaagaaatggcgcagcagcaagcgcgtaatttctcttgggataaggctgcggtgactgctctggaagctttcgaaaagatcgcggtagaagacaccggtactgcgcaggttttgcctgaagctttgattcagaagatccttgctatcccacaagggcagccagatgaccgcgatctgcgcttgtgcgcaacggccattgattacaatctgaaaacggcagaactttatcaaatcgacgataaatcgctgaactggcgtgtggaaggcccattcgatagctcatatagtctggcgttggtcaaccgcgaatttgcccgggcactctcagccgatggtgtagaggttttattgcattccactgaaggaccaggtgattttgccccagatgcctcgtttatggcacagtcggaaaatagtgatcttctggcattttataatcaatgtcagacccgcaagagtaacgaaaagatagatattcttagcagaaatatctatccaccgcgggttaccaaaatggatgccaaagtaaaattccttcattgttatgcttgggaagaaacgggctttccgcaaccgtggatcaatgaatttaatcgggaacttgacggagtgctgtgtacttcggaacatgttcgtaagatattgattgataacggactgaatgtgcccgcatttgttgttggcaatggctgtgaccattggctcaatatcccagccgagacgacaaaagatgtggatcacggaacattccgtttcctgcatgtctcttcttgtttcccacgcaaagggatacaggcaatgcttcaggcttgggggaaggcgttcactcgtcgtgacaatgttatcttaatcattaagacttttaacaatccgcacaatgaaattgacgcatggctggctcaggcccaggctcaattcatagactatcccaaagttgaagtgatcaaagaggatatgtcagccaccgagcttaaagggctttatgaaagctgtgatgttttggttgctccaggttgcgctgaaggctttggtttacctattgctgaagcaatgctgagtgggctaccggctatcgtcaccaattggagcgggcaacttgattttgttaattcacaaaattcatggctggttgactatcagttcactcgggtaaaaacgcactttggtctgttttcctcagcctgggccagtgtggatattgacaacttaacagatgcattaaaagcggcagcctcaaccgataaatcagtgctgcgtgacatggccaatgctggtcgcgagcttcttctgcagcagtttacctggaaagcggtggctgatcgttcttgccaggcggtcaagactctgcgtgcgcatattgatattgcacagcatcgggcgcgcattggctggttgacgacctggaacacgaaatgtgggatcgcaacctattcccagcatctggtggagagcgcacctcatggcacggatgttgtttttgctccccaggtcagcgctggcgatcttgtgtgtgcagacgaagagtttgtacttcgcaactggattgtaggtaaagagagcaactatctggaaaacctccagccacacattgatgctctgagactcgatgtcatcgtgatccaattcaactatggattctttaatcatcgagaactgtcggcgtttattcgtcgccagcatgacgccggtcgttcagttgttatgacgatgcactcaactgtggatccgctggaaaaagagccgagctggaatttccgtcttgctgaaatgaaagaggcgctggcactttgcgatcggttgttggtgcattcgattgccgatatgaaccgccttaaagatttaggcttaactgcgaatgttgctttattcccgcacggcgttatcaactactccgcagcgagcgtcacgcgtcaacagcagtctttaccgctaattgcgagctatggcttctgcttaccgcataagggcctgatggaactagtagaatccgtccatagactcaagcaagctggtaaaccggttcgtttacgactggtgaacgcagagtatcctgttggggagtcacgcgatctggtggcagagcttaaagcggctgctcagcggttaggtgttaccgatctgattgagatgcacaatgatttcctccctgatgcagagagtctgcggttgctttcagaagccgatcttctgatttttgcttatcagaatactggggagtctgctagcggggcggtacgttatggtatggcgactcaaaaacctgttgcggtaacgcccctggcgatctttgatgatttggacgatgccgtctttaaatttgatggatgcagcgtcgatgatatcagtcaggggattgaccggatcctgaattccatccgtgaacagaactcttgggcaaccaggactcaacaacgtgccgatgcatggcgggaacaacatgattatcaagctgtttcacgccgtctggttaatatgtgtcaaggcttagctaaagctaaatattttaaataa

SEQ ID NO: 34593 - DNA, 1278 bp, Escherichia coli
atgggttcgtcgttttatcgttcatttgaagaacgacacagaggttcggttgaagaaatcaagcgccgcttgagtttttatttaccttttcttgcaggtctgaaggacatttatcctgatggcatgattgcggatattggttgtggacgtggcgaatggttggagatcctgactgaaaatggcattgcaaacatcggcgtcgatctcgatgatggcatgctggcgcgcgccagggaggccggactgaatgtgcagaaaatggattgtctgcagtttctgcaaagtcaggcggatcagagcctgatagcgttgaccggttttcatattgctgagcatttgccttttgaggtcctgcagcagctcgtcatgcataccctacgggtgctgaaaccaggtggtttgctgatcctcgaaacgcctaacccggagaatgtaagcgtcggcacctgttcattttatatggatccaacgcataatcatcctctgccaccgccactgcttgagtttttacctattcattatggttttaaccgagcaattaccgttcgtctgcaggaaaaagaggttcttcaatctccggatgcagccgttaatttggtcgatgtactcaaaggggtgagccccgactacagcatcattgctcagaaagcagcgccaacagatattcttgaacgctttgacaccctgtttacccagcagtacggtctgacgctggatgctctgagcaaccgttacgatgcgattttgcgccaacagttttcgtccgttgtctcacggctggagacgttgaaccaaacctatatgcaacagataagccaaatgacagagactattcagacgttgcaaggtgaggttgacgatctgagtcatgtcatcgatcagaaccatcagcttcatcagcaaatggcggatttacataacagtcgttcatggcgtattactcaaccactacgctggttgtctttgcaacgtcaattattacgtcaggaaggggctaaagtgcgagcccgtagggctgcgaaaaaaatattgcgcaaagggatggcgctctcgctggtctttttccatcgttaccctaagtctaaggtttatctgtttaaggttctgagaaaaactggctgctatacattgctacaacgtttgttccaacgcgtaatgctggtgcaatctgacacgatgatgatgcagtccagaagatatgatgtgggtactgaagaaatgacaagtcgcgcgatgagtatttataacgaattaaaaaataaaaatacggagaaataa

SEQ ID NO: 34594 - DNA, 1215 bp, Escherichia coli
atgagttatatcagagtaaataatgtcggtaaggcgtatcgccagtatcactcaaagaccgggagactgatcgaatggttatcccctctgaataccaaacgccataatttgaaatggatcctcagtgacattaatttcgaagtcgctccgggcgaggctgtcggtattatcggtatcaacggtgcaggcaagagtaccctgcttaaactcataaccgggacgtccaggccgacgactggagaaattgaaatctctggacgtgtcgctgcattactcgaattggggatggggtttcattctgatttcactggtcggcagaatgtttatatgtctgggcaactgttggggttatcgtcagagaaaataactgaactgatgccgcaaattgaagagtttgctgagattggggattatatcgatcagcctgtgcgcgtctactccagtgggatgcaagttcgattagcttttagtgtagcgacggctatccgtcctgatgtgctaattatcgatgaggcattatctgttggggatgcatatttccagcataaaagctttgagcgtattcgaaaatttcgtcaggaaggcaccacgctgttgctggtatcccatgataaacaagcgatccaaagcatttgcgaccgggctattttattgaataaaggccaaattgaaatggaaggtgaacctgaagcagtgatggattattacaatgctcttctggccgataaacaaaatcagtccattaaacaagttgagcataatggtaaaacgcaaactgtttcaggcactggtgaggtgactatcgctgaggttcatcttctcgatgaacagggcaatgtgactgaatttgtttcggtagggcatcgtgtcagcttgcaggtcaacgttgaggtcaaggacgatattcctgagcttgttgtcggatatatgattaaggatcgacttgggcagccgattttcgggaccaatacgtaccatctcaatcagacactcacctccctgaaaaaaggagaaaagcgttcgttcttattttctttcgatgcgagattgggggttggctcctattctgtcgctgtcgcgttgcatacttccagtacgcacctcggcaaaaactatgaatggcgcgatctggccgtggtattcaacgtcgttaacacggaacaacaagagtttgtcggcgtgtcctggttgccgcctgaactggagatttcttaa

SEQ ID NO: 34595 - DNA, 795 bp, Escherichia coli
gtgagagatttactaacgacgatttatcgttatcggggatttatctggagcagtgttaaacgtgattttcaggcgcgctatcaaactagtatgctgggcgcactatggctcgttttacaaccgctctctatgattctggtctataccctggttttttccgaggtgatgaaggcaagaatgcccgataataccgggtcgtttgcctatagtatttatctctgttccggggtactgacctggggattatttactgagatgctggataaaggtcagagcgtatttattaacaatgctaatctgatcaagaaactcagttttccgaaaatctgtctgccgatcatcgtgacgttatcggcggtgctaaatttcgcgattattttcagtttgtttctaatttttatcattgtcaccggtaacttccccggctggctctttctctcggtgataccggtcctgcttttgcagatcctgtttgccggtgggctggggatgatccttggtgtgatgaacgtctttttcagggatgtggggcaactggttggcgttgcgctgcaattctggttttggttcacacccattgtttatgtactgaattcattacctgcatgggcaaaaaatctgatgatgtataacccgatgactcggatcatgcaatcttatcagtccatcttcgcctatcatctggcccccaactggtattcgctatggccagtattggctctcgccattattttctgcgtcatcggtttcaggatgttccgcaagcatgcggcggatatggtggatgaattataa

SEQ ID NO: 34596 - DNA, 1377 bp, Escherichia coli
atgacacagttaacttgttttaaggcttatgacatccgtggtgaactgggtgaggaactgaacgaggacattgcctaccgtatcggtcgcgcctacggcgaatttcttaaacccgagaaggtagtggtggggggcgatgtgcgcctcacaagcgagtcgctgaagctggcgctggcccgcgggctaatggatgccggtactgacgtgctggacatcggcctgagcggtaccgaagagatttactttgccaccttccaccttggagtagatggtggcatcgaggtgacagcgagccacaatcctatgaactacaacggcatgaagctggtgcgcgcgaatgcgaagcccatcagcggcgacaccggcctgcgggatatccagcgcctggcggaggaaaaccagttcccgccagtggacccggcgcgtcgcgggactctgagcaagatatcggtactgaaggagtatgttgaccatctgatgagctacgtggacttctcgaacttcacccgtccactgaagttggtggtgaactccggaaacggggctgcggggcacgtgattgatgaggtggagaaacgcttcgcggcggctggggtgccggtaacctttatcaaggtgcatcaccagccggatggccatttccctaacggtattccgaatccgctgctgccggagtgccgccaggataccgccgacgcggtgcgcgagcatcaggccgacatggggattgcctttgacggcgacttcgatcgctgcttcctgttcgatgacgaagcttcgtttatcgaggggtattacattgtcggcctgctggctgaggcgttcctgcagaagcagccgggagcgaaaatcattcacgacccgcgcttgacgtggaacacggtagacatcgtgacccgcaacggcggccagccggtgatgtcgaagacggggcatgcgttcatcaaggagcggatgcgtcaggaagacgctatctacggcggggagatgagtgcgcaccattacttccgcgatttcgcctactgcgatagcgggatgatcccgtggttgctggtggcggagctgctgtgtctgaagaacagctcgctgaaatcgctggtggcggaccgccagaaggcgttccctgcgtcgggagagatcaaccgcaagctaaggaatgctgctgaggcgatcgcccgcatccgggcgcagtatgagccggcggctgcacacatcgacacaacggacgggatcagtattgaataccctgaatggcgctttaacctgcgcacgtctaacaccgagccggtggtgcgtctgaacgttgagtccagagctgatgtggcgcttatgaatgaaaaaacgaccgagctgttacacctgttaagcggggaataa

SEQ ID NO: 34597 - DNA, 1416 bp, Escherichia coli
atgttacttcctgtaattatggctggtggtaccggcagtcgtctctggccgatgtcacgcgagctttatccgaaacagttcctccgcctgttcgggcagaactccatgctgcaggaaaccatcacccgactctcgggtcttgaaatccatgaaccgatggtcatctgtaacgaagagcatcgcttcctggtggctgaacagctgcgccagctcaataagctgtcgaataacattatacttgagccggtcgggcgcaacaccgcgccggccatcgccctggcggcccttcaggccacccgctacggtgacgacccgctgatgctggttctcgccgccgaccacatcatcaataaccagtcggccttccacgatgctatccgggtcgccgagcagtatgctgatgaaggtcatctggtcacattcggtatcgtgccgaatgccccggaaactggctacggttacattcagcgcggcgtggcgctcaccgacagtgcccattccgcgtaccaggtggcccgctttgtggagaagccggaccgcgagcgcgccgaggcttacctcgcctccggggagtactactggaacagcggcatgtttatgttccgcgccaagaaatatctcatcgagctggccaaataccgtccggatatcctggaaacctgccaggctgcggtgaatgccgccgataatggcagcgatttcatcaatatcccacatgatattttctgcgagtgcccggatgagtccgtggactacgccgttatggagaaaaccgctgatgcggtggtggtcggtctcgatgctgagtggagcgacgttggctcctggtccgcactatgggaggtcagcccgaaagacgagcagggcaacgtccttagtggcgatgcgtgggtacacaacagcgaaaactgctacatcaacagcgacgagaagctagtggcggccattggcgtagagaatctggtgattgtcagcactaaggacgccgtgctggtgatgaatcgcgagcgttcccaagacgtgaagaaggcggtcgagttcctcaagcagaaccagcgcagcgagtacaagcgccaccgtgagatttaccgcccctggggacgttgcgacgtagtggtccagaccccgcgcttcaacgtcaaccgcatcacggtgaaaccaggcggtgccttctcgatgcagatgcaccaccatcgcgccgagcattgggttattctcgccggcaccggtcaggtgacggtcaacggtaagcagttcctgctgtccgagaaccagtccacctttattccgattggtgccgagcactgtctggaaaatcctggctgtattccgctggaagtgctggagatccagtcgggggcgtaccttggcgaggacgacattattcgtattaaagaccagtatggtcgttgctaa

SEQ ID NO: 34598 - DNA, 285 bp, Escherichia coli
atgagtcgtttatcccaccagtcgcaacataacgccgtcgtcgtatgcaaagagctgtcaagcccgaacgcgcgctgcttctctggaggcgaatacgatgtctcttcttatctttcctcgtatcgtaaatgcccctttctgatggttgccggcatcggtaaatcacttgattcgttttttttgatggcggtgagagcatgtgttttgccccgcgtaaatgagaaggtcctgatggttactctggcggcaaatgtggaaattgtggagcgtttcgtggcctggtga

SEQ ID NO: 34599 - DNA, 474 bp, Escherichia coli
atgcctaatgacgatcggaagataggtgcaatcaatcaagcgatcaatccacatttttttctagagaacatggggttaaaccctgatgcattgaacattaaaccaaagagtgtatttatcctcactccatttaatgataggtatcttaatgattacaaagctattgaacaggcttgtatcaacattggtatatctgtttctcgtggagatgaagaacgcataaatggtgatatcttatcctatatagtttctcaaatttgttcatctcaattgattatcgctaatatttctggtagaaatcctaatgtgttctatgaactaggtattgcccaggcattaggaaagccggccataatagtcagtaaaggtgcaaaggatatacctttcgacttaaaaaatagacaagttttcatttacgagagtttatctgatttaacatcaaaaatccagaaagccgttgtgagtcttctttaa

SEQ ID NO: 34600 - DNA, 198 bp, Escherichia coli
atgcgccctctccaatttcgaggattcgcggccacagcagacacatacattgaaatcacacgcattatcatagcgcgtatcatccaaacctctttgaattccattgtcaatccagtattgccagatcattttttacttggtgcgtttcgtctaggaattactgccatactactgctcctcaagaattcagacagttga

SEQ ID NO: 34601 - DNA, 426 bp, Escherichia coli
atgaaaattgatcagcaatacctaaaagatttactgattgcatttgaagataccgaaggccctgacactatgttagacgagttagagtctgccggttacaacagagacgactccaactttatttttcacatgcggctactttatgacaatgggttaattattcgcacagacggtaaacaaggatttggccatgaatatcatgcctacctgggggggcatgactacatatggattcctgtgccattaaggttaactgcacgcggacatgattttattgctgacttaaggcaaaaagaagtatggcaaacaattaagaccaactttaaggacgagggaatcagtaccctgatgggactatctaaatcgcttgcaatgggatttgcaaagaaaaaaatcaaagaccttacaggcctggatattgaataa

SEQ ID NO: 34602 - DNA, 918 bp, Escherichia coli
atgtttgatgattttgattttaacttactaagctcagatgaatttaaagaggattcagtcagagaagagttgattttaccaattattaaagctcttggttataaagcatcgggagatagtcgtgtaatcaggagcaaaacgcttacacatccatttgtctcaataggttcacagccaagaaagatttcaatagtaccggattatgtttttctttctaacgaccgaccatattggattcttgatgcaaaggcccctaatgaaaaaataaccaaaagcatgcacgttgagcaagcctatagttatgctatacatccagaaataagggcagaaatgtatgcattgtgcaatgggaatgaatttgttctatatagtatacgggaactccacccaatactcagattttctttgaaagacattggtaattactgggaaaaattatttaggatattaaatccagatattaaagccaatccggatgtcttgaattatgcacctgattttggaattcatattcgaaaaatgggtttggttaaagatggttcttttagtgccccagctataaatactaaatttattagtcgattgagcgaacggtcatacacgtgcatatctatgatacccggagatattgatatggccatttctctagactttaataaaaaaacattcaaacagctacttaaagtccttccatcagaacaagcaaataaaattagacaggctttaggtcaacaaccttttcatatacatttctctgaaaacgatcctgacgtaaaattcggaatcacaagtaatatcagtaatgaaatacatcacaatgctgaagaaagctacattcctttcatagttaaagaggtatttccttataataactcaatcgacgaatgggaagaattagccaaaagagaaatggagtga

SEQ ID NO: 34603 - DNA, 729 bp, Escherichia coli
atgagctataataactatattaatttaacagatgaatcattggatatacctatttatagaattatgccaatacaccgttttcttcaattgcttgaagaaaaaaaattaactttagtaaaaccaagaaaatgggatgacccttttgagaacgctttattaaattgtgtaattgaaacttctgatggtcaaacaggaacagttgccgcaagagattctgtttatgggcaatgctggacatttcatagtgaaaccgatgcaatgtggcggatatattcccatgataaaaatggtgtaagagtttcaaccacaccaagaaaactattagccgcacttcaaaaagcagagccgacttaccataatttaaggtgttttataggcaaggtttcttatcttccggaggatactctttcggaaaaactcttgtcaattgatttattcaacactaatggctcaggcattgctgaatcgcttttatacaaacgcgtggaatttgaacacgaaagcgaagtccgtttaatatattctggtgatgataatagtgtcgataatgatattttccagtttgaaattaatccagttgaactattagacaccgtgctatttgacccaagaatggaaaaaaacttaaggcaggcatacacattggcaattgaggataagggttgtaaagccgaaataaaaatatctactctatacgatgctcctaaaagactaaaaattaaattgtag

SEQ ID NO: 34604 - DNA, 132 bp, Escherichia coli
atggatttcaatacgatcatggaaaaggcttacgaagagtactttgatagccttgccgaagacgaagaagcacttagcttcagtgagtttaagcaggcgcttttcagcaagattcttgttgttggggaataa

SEQ ID NO: 34605 - DNA, 255 bp, Escherichia coli
atgaattacacttcggtgctgctggccaatcaacatcaggtgcagttgatgtatcaacgcggttcagcaacacccgatactttttccagacttccagcaacgaagtttcttcctccgttgcgatttccagctcaacaacagtctgaacgtaccaggaacagcctccttcagggcttgaaggatatcaatgttcgctttctgttaactgccggacaagtgcaaccagttcgcttacctgattttccagagtggtga

SEQ ID NO: 34606 - DNA, 1239 bp, Escherichia coli
gtgtcaatcaagggccaggcttacttatataagcgaaaagacgggatctggatgtttcaaatcttcgttcctaagtatcttcgattcttatatccgtgtcggatgtggcgcaaaaccacctcaacccgcgatcttaatgaggctcgacggttcagaaaccacctgttgttagaatgggaagagctaaaacggaagtacaatccaagcaacccggatcagtggttgcagcaatcaatagccgccctgcatacggaaggcaaaaagaacaagagccgccctcagcctgtagcgcgatcctgttcgattcccactctgtgcctattacgggacgaatacgcagaaagctataaagatcgccgctcttattcaacattaagcaaatcagcgcgagccgttgagctatttcttgagagcgccaatcaaccggacattgccttagaaaggataggccgtcgcctggtgactgagttcctcgaagcacagaaggagaagggagccgccgatcaatctcgtcaaaactggctgacgtgcttaggctctctctacgaatttgcaaagcgccgctacgatggcataccagaccgcaatccttttcacggtcacaacctcgaagcacgtcgaaccatcgagagctaccagccattcgagcctgaccaggtgcaaaagctactgtatgcagcagagccggagatcaggaacattatagtaatgggactgttttcaggatgccgccttgatgaattggcaagcctccgcaaggatgagatccagacggtggaaggtgtgcgctgtttctacatcagcaagagtaaaaccaaagcggggatcaggtatgtgccgattcactcccggctatctgcgatagtcgatgaatacatgagccacagttacggcgaatacttgttcccacaggctaacaaaattaaccgcgctgacggtaagaaaggcccgttctactctcaagcgttcaccaggctacgccgtcgtgtattgcctaccgctacagatcggcaatgcttccacagcttgcgcgggatgttcatcacctgccttgaccgtgccggagtgcaggaaacacggatcggcagtatcaccggacacactgaacaaaaagccaaaacggaagcgttccgcacatactcccagggggcgagtatggaagagttagctgggtatgtggagatggtgaattatgaacaaattgcgatcaataaaaccagtgttatcaactacagatga

SEQ ID NO: 34607 - DNA, 459 bp, Escherichia coli
ttgaactttgatgatttatcttctgatgaacttgatcagtatgttatgcaacgtctcgtatttgaagaagaggagttatcgcctattttgaaggggcatctttttattgagaaagttctcgaaacattaatctcaagaaaccttgttgagccaaaggcatttttcaggtctacccgttcgtatgatctaaaggtagatttggcgtttgcaatgggtttgctcgataacaaatactactctgcattcaaagcgatcaacaaggttagaaataattatgcacataagcatgattacaaagtcagtcttgaagaattaaatgcttttaagtttgattgggaagatattcagaataaagcgtttgctgtagcttgtggaaaaagtattggtgagggtgcaagtattgccacaacttttttatgttggaaagcaatacatcttctcgacaaagaagaagattaa

SEQ ID NO: 34608 - DNA, 1833 bp, Escherichia coli
atgcttgatatcaacgtcgcttcaattaagacgaccgtttcctttgtggtggacaaacaaagtctggcggaagcccgtaaagctggcgatgacctgaaaaaatactttgagaaaatagcggatccgaagattcgttttcaggctcagaagcaacgtagacagaaagcgcgtgaacaggtggcagatgctaaggcggcttctcctaaaacgtccaatgacttaaaacagcaagccagggaagcggctaagatagctaaaagggaggaaacggcgaccctgaaacgccgctcatccatccttcaaatgaaaggtatctcaggtaagtacggcattgatccggcgaagcaataccagtttgcaaagtttgctcacgagcagacagagctcttccgtaaagggcagatcagcagtcagaagatgaactatgaacttcgtgaaagattggccttgatgcgccgtgaggctgcattgcaaaaccgtatcactgccagtacacagcaacaggcggcagcgctgaaacacgccaaacgaacggattacaagggtgcggcggctaatatcaaagagaaggggctgaatgttatcggcggcggcactggtttcatagctgttacagcggctttcgctgccggggcaggagtattggcccgtgtccgtgagacagccaatgataacctcgacttggtgagaaaaagcgacagcgtgaaggtgaatccaaacgccgttaaagcgctggtacaggcaaaccgtcaacgtgggattgattcaaactacgacaccataaccgacaatttcaaagatgtgcgcgagcgcctcggagaatccgtaaccaatagccagttcgatcaaaagtctggtaaatggaagtcaggaaatggggcgattgacaatatcctgaatcagttcggctggaacaaagccgatatttcgaagtatcaggataatcctctcgacttcgttcaggctgtccagaacgaaggacagcgtagagggatgagtgatgcgtccattggacacctttttgaagacctcggcaatgatatgtcctacctggtgccagtgctcaagaataacggcgaggcgttcaatagcaccctcaaaatgctggttgataccggacaaactctaaatgaccagcaagttcaggacacctatgcctggggcgacctcagtaccacgttgcaagcggttaacaatggctttaatcagaatcttacttccggcttcctcgaagggtttggtaacgctggtaaggatttagcggagaacaccgccgccctgaacgagacagcaaaatcattaggatcggggcttggaaacttgttagcgcaagtgacaggcttcacgaaggaaatcactgatgatctcagcaagtttaacggctggatgaaagaaacattcccttcactgtactctgaccctaacaagacagcgccagacgctatctatgataaggcggttaacggctctgcaaactgggttgccgatcatatccaggatgcaacgggcttcgatacccgttcagtggggccagctatcatggattggttgggcgttggtggtggcgatgctggaacagcggcgaatcaatacagcctgtctggtgactctctgcgtgattctgcaatgtcactaaccagcggtaacgcgccagcgtatacggtgaatcctacgttcaatctgaaccttgaggcatctgtaccactcaccattgccagcgattcgagcagacttgcggattatgtggatttcacggcgaaagcaagccaggccagcttcatgcaatcgctcacgttatcagcgttgagcggtcaatcttcaacagggggctaa

SEQ ID NO: 34609 - DNA, 204 bp, Escherichia coli
atgagtttacagcttattttaaagagcgccgcacacggtgcaatcaagattgatgatgctacggagcttttaaccctccgtcagatctgcatcatttacggtgtgtcttacgacggtgttcgccagcgtatgcaccgatattctgaaacgtctaacacggcgatcaactacttcgttcagaaacaaggcggtggtgatgcttga

SEQ ID NO: 34610 - DNA, 1041 bp, Escherichia coli
atggcaaaagatctattttctggtgtggtttatgactcgttcaccagcccgtttactttcagtactcagttaaacaccatcatttctaaccttgggcttttccgtcaggaaaaccacacggttaatacaattgctcttgagcagattacagatgttaaaaatctggtggctaaggaaaacagcccatacgcccaaagcgattggaacagcgcccagcgtcctacgttcactaatgccctgtatcagatgaaatattttgcgactctgaacagcgtcacttctctggatctgcaacagtacgccgcgcgtggaattgccgacactggcgaccaggtgagcattacactgaatgacttctccgatagtcagtattcaatggctaacaatgccgtagagattgaccttgttaatgcgctgcttggtctgcgtgttgattccgatttcgccggacagggtgatcttgatttcttagcaggtggagcacgtacagagtacacccttgacacaagcgacacggcgaacatcttcgaacaactaagcgaaattgcccgtattcagaatgtggcgcttggtgaagggctggcacaacagaaacaaggtgctgtgatcctggctgctggcgctgctgctaaagcacttcgctaccatccttctatcaaagatttcatggtgtacacgctgaacgttaacgccagtgacaacttctatacacgagcggtagcggataaccctgcttacgaggtgtggactctgaacgggatcacggttatggatgttacaggatatagcctgatcactgacaaaatcggtgtggacggcttcgcggttattcctcgaatgtctgacactgctaatgcgctggttctccacactggtgtgggtgttcgtcatctgacgcttggtaagagcgccaccttgcataatcaatatatcgtatccgatagcaaatggcagttcccatcaatcgcgacggaatccagcttcctaccaatcaacaatatccctacggctattgttttcggcagcgtttcagcaagctga

SEQ ID NO: 34611 - DNA, 378 bp, Escherichia coli
atgaattttggaacatttcaaacattaaacggggataacagccacgcccgttacaaagtggtggcatattgcgacgatgcaatcctccaggacaaattgatccgtgtggaatccggtgtatctgccgatcttattgttggcgaccttgtggacgctacaggcaatttagcaactgcctccggtgatatcgcttatgtagtggtggagccagccagcgcgggaagcaaagcctttattgtggcttctcctactcacgtcattctctcccttgcagggattgagtttggctctatggatgaatcattagttcaggcacagcttgcaacgcttggattcactttctctgatttcgacactgtagcgcttcgcactacgtaa

SEQ ID NO: 34612 - DNA, 234 bp, Escherichia coli
atgtttcttatgaactatgaccgtgtgatcacacataaaggcgcttctcttattctttcggaaaagatgatgaaacaagccgctgatgctttcggtgtgagtattgaagatattcgagaggctacagaaaaatactggcctacatccacgatcaccaaatcaaaagaaggttctcacccgttaaacgggcttgaacagcgattaaaactaatagcaaaaggaaaaaccaaatga

SEQ ID NO: 34613 - DNA, 264 bp, Escherichia coli
atgaataaacattcacttctcttgtttttgcttcctcccatagcaagatcttatttttcctccttggaaaatgagaatggctacacctccccttgtagggtagccctcttctctaaaatcattccttctttgatttttggttgtgttctttattgctacgtttctaacaaggtgagaacaccttccccattcttggatgatatggggagtgtcggggtgttctcttcctttccttatgaacgttcacaacgagtgattttatag

SEQ ID NO: 34614 - DNA, 123 bp, Escherichia coli
atgcaggatgaatatgcaatttgggggcaagatacgcttgacgctttccacgaccagcaccatatgccaatgctggcggcagtgaaagccgtctatcaggcaagccctgataatctcccttag

SEQ ID NO: 34615 - DNA, 210 bp, Escherichia coli
atgattgaagaaatcacaacacaaccacacttcaaagaacgtattgaatatgtggaatatatttttgaacaagcgttatctatcgaacaagagaataacatagaagaaattgatcacttagtcgatattctggctacagaggccgcgccattcctggcagggattcaggctatcaaggggatcagggagcgtatgcagaatgcaggatga

SEQ ID NO: 34616 - DNA, 375 bp, Escherichia coli
atgagtaagaaagagcgaaataatattctacgtattggtaaagccgcacgtagacaacgagagagattattaatcacctcactcgaagaagtcccaggaattttaattgaacacgtcgaagaagtgcattcacaaccgccctctgtggaagagtgggccgctttgaatgatatcctcacttcctgccctggtgcgtattaccgcccacgtaagcgcaaagtttattcctgggatgatagtagttataaacgttggcagtgtttgggctttacgtccttacgccattacctcacatacaactcaatgaataataccatagccggagttcgagaactggacggattattttttatggagaatgacagcaatgattga

SEQ ID NO: 34617 - DNA, 282 bp, Escherichia coli
atgatcaatctttactgcctcaatgaggctaccaagcaccaatttcaagttaatgacgtttgttaccgcatctataaccacctcgcaagcctccaccgtgaaaatggaacattccgttcctgcgtgaaacaactttcaactgctcttggatattcagaatcaggaatccactattggctgtctctgatgaaagatgcaaaggtgattacgttaacgcgccgtggtggatattacgatcttgacgttaaccacaacgtttctttcatcacctcgaacaattaa

SEQ ID NO: 34618 - DNA, 780 bp, Escherichia coli
atgcctgacattataaacagtaaggtttttagttttaccaatacagaagacgcattcaacgaatgcacccggatcaccaatcggaatactggtgttaccgttacattattatcatcaaacaaacagctatatgtgagaatgcgccaccgttatcacctctttgcgaaaaagaggggcgggaagtattacgacaatattgaacagcttggtgagagtgtcggggtaaagtatgacgcagcaagcgacgcactaaagaaactccaggctgtggggctaatttcgggaactattaaaggcagatcctacgagtgggaaagcgttgcagacctcacaccggaagatttcctctttgaacgtgatattaacgcgatgaaacgtaaaaccgcgcctgaatgggtggactgtctgaaacatcccgtgtttggctacgccaaagaagacgtagcgccagaagtgcaggaagaaaagcaacctgttccagaagccgatccgatgtgcgaatttgacgatacgccggaagaggaagcgccagcgccggaaaaagtgaagccagcacctaagccgaagataaagaaatctgtaacaccgtcagccgcaccaagcgacgataaggagtattctaccaaattgcgcgaattcgagaacgccggacattggtataaattctcggagtatcagctaccggatttggagcgctttaaacgtgacgggaatctaaccaacgaatacgccttggcctatcttgacaaacacacatcacagcaaactatgaatacctaa

SEQ ID NO: 34619 - DNA, 177 bp, Escherichia coli
atgagcgaaacccaaaagaagaaaccagccggaacattcgtaaaactgccggatgaagtgtttaccactttgttcaaagaagcacgagcgcgaggcttaacagtgcaggagatgttaattgacgctgcaaccaaactttccacatcaattcagagcggagaacgttctatcaaataa

SEQ ID NO: 34620 - DNA, 561 bp, Escherichia coli
ttgaacagagcaatcgtgttagacgaacagcaagccaaagcgatcagggagtggctaaacgctcataacaagagcctgatagctgacgttacgttaatgatgcaagccgccgtactgcgtgtgggggatgccgtcgcgttacgcttcgacgaagtgatcaacggtgagatagacattgaagagcagaagacagggaagcgtaaatccctcacccttccggctccagtgatgcagatgatcgcacgtcgccgtgctgagtttccgcatgacgtgcatgtgttcaggagccagcgtaaccgctcgatgaacaagcaagcgcctgtacgacgcgaggaagtgagcaagcagatcgcagaagccgctaaagctatcgggattcatggcactgtatcggcgcacagtttccgcaaagctggagggaatgccatttacaagcgttctgcaaacaatatcgcgttagctatgaccgtgctcaatcacagcaacatcaccgacaccaggcgctatctggatttagacaagcaagccgttagccgggtgatcaatgagatggacttataa

SEQ ID NO: 34621 - DNA, 405 bp, Escherichia coli
atgtctggaatgctggcaagcacagcggcggctgtaggaatcattgataaagctgttggtatcgcgaagaagctcgctgatgatggcggtgaactcgataaagcaacgcttaaacttgagcttgctaacctaatgagtgaacttgcaagtgtgaagatggaagtgatcacaacccaagctcttcttttcgaggctgaacagaaaaacaaacagcttgaagagcagcttaaggataaacacaccttcactttcaatgatggactttattggaaagagggcgatgaaacagccttttgtccaaaatgttatgaaacgcaggggattaaaacccatatgaaattgtttttaagtgatgggagttttgaatcttattggttttgcaatcactgtcgcttatcaacgtga

SEQ ID NO: 34622 - DNA, 603 bp, Escherichia coli
atgtctgacagttatgctgggctaattggtgcggttgtaggtgcatttatcacagggggatttgcctggtttaacgactggcgcaataaccgcaccaaaaatcaaaaggatcttgaagttttagctttgcagttaacctataaactggaactttatgttgctcaatgccttgaatgttccgaagatgatgggcacgagtattatgatgatgaagacgggtgtgctttaggttcttccttcaaaggctataaggtggaatttccagagtttactcttgggaagtttgaagatattgactggaagcttcttcccgtggggttaatgcacgagattttcacactaccttccaaggtaaacaatgcaagacagcgttttgccaaagagttaaatgagttttttgaacattggaacgacgattacccgacaacctttagagcgaaagaattaacagatttggcaatttatttttatgccatatcatgcaaattacgcactttagcaggtcttccgttacctgatgattcaattattatcgatactcttaacaaaaacaaagttaaaattaatgatgattatgaaagattatttattcgaaaggagtaa

SEQ ID NO: 34623 - DNA, 483 bp, Escherichia coli
atggctttcgtgattctaactttacctctgctctcaatcgctaagggtattggttatggaaatactaaatgggacatgaatccgtccgaagttgttgcggcccagggtaatggcgcacatctgatctcatcagaaaagtataaagataactttgggaaagtgcggattgataatgtatcgatcggcagcggtctttatactgttacattcctttttaatagcgctgatcgtcttgtacaaacgaacgtagcaagtaatgagaaaaaaaatgaaggtatcgctgcgagtcaattcagcacattgagtcaattgttaactcagaagtatgggaaacctgaattttcagattcagataaggcaacttggaaacttcctgataccacggtcgagttaagccagttggtcatttctggaatcatggcacagactgttgttcggtacatcccaaacagccgggtcgcaagcgatacttcgaatctttag

SEQ ID NO: 34624 - DNA, 228 bp, Escherichia coli
gtgctgggtaatgccgaggtaatgttgtatgtcgatagcttcaaagctaaccgtttaaacggtacatacctgctctcaccaaagctgaaaactaacggtaaattgatgatggcagatgataaaagcaaagtgtacgcctatgatccgtcgctgatgaactttgcaattagtgaccgcatcgcaagaagcactgagcaatgggataattgtaaactggttcacaattaa

SEQ ID NO: 34625 - DNA, 381 bp, Escherichia coli
ttgattgataaaagcaacattactgatggtattgtatttaaagataatgaaaatcaaggtgaagtcattatttttaatttctttacttgggtggaaataattaaggcaataatgatgaaatatgctggaaaaaatgaacaagaatctgataatctatttttttcttctgttcttttcaagaatttaaaaatagaaagctataatgatgtgaccttttatagtcatgaggttgaataccactgggctatgctaattgcttatggggagctctattgggagaaaggcattagttcccaagaacccgaaggttactttgaatgggaggctcaatatcgaaaaaatcataacttggcagaagaaagcttcgagtttaattattaa

SEQ ID NO: 34626 - DNA, 486 bp, Escherichia coli
atggatgaaaaaatcagagttttaatatctaacgaagttccacgtattgatgaccatattgatatacattctatatttatagagctaaacgcttatgttaagtctcttgagcctaatatcaatcttcaggatttaggtgattggcggcttttaatcaatgtacttgctcagagaacagatgcaatcggtattgcaaaacgtgttgtacgattcccctcggacaaagaatatgtggtctatatgtcaacgcctattcctgatgatgaacaggtaagttatgggatttctaatgtaaaagaggcattttttaaagaaagtaacgagaaatattcaaatattattgaaactgatttcgataaatacaatgatttgtttacttatatgttagaaaccagtaagaatacaattgattggattcttacacgaggtgttttctgtaacagaataaaaataaaattatcagaagatagaaaatataaatattag

SEQ ID NO: 34627 - DNA, 456 bp, Escherichia coli
atggcgacaagtttctttcccggaagacgtctcgcaaaaccgggaaaaagtggcagtgacagcgaactggtgcgttatgactatatcagccacggcgatgagcagcggctgagtgatgtacagacccgctttaatggtgcgttgcactatacctacaccgaacagggctggctgagttcctggcgcgacaacggcccgacacatttccacctgcgatatgacgatgaaggccgggtgactgccacaggcacacaggaaggactgtataacgacaccttccgctacttcccagaggagcgcagaaccgattacactgatgccaccggagccaccaccacgctgtggtttgatgagtcctggctgctgaaaaaacagcgtgacccgctggggcagggaaagaacatcagaagtacactttttgtactaaacaatttacattttatgtttaaaaattga

SEQ ID NO: 34628 - DNA, 258 bp, Escherichia coli
atggtattgttttataaggattttattctttttattgaaccaacactgaaccaacaacacggtattttgaaccaacacaatgtgactgaattgatgcgcacaacacctggctggcatcagagagtgttttacgagactttcgtaaaatcctgtgtacaagggcgtgacgtttttgaaagtgagcactacgaaattttcgtagttcaaaaaacagcctctgagaagttgttatgcctgttcagcaaaccatccgcatag

SEQ ID NO: 34629 - DNA, 3108 bp, Escherichia coli
atgaacgtattacccatcgggtcactggttatctctgagcaatttgaaggcatcggtaaagttgtcaccgtcgatagtgatacaaataacgccacggtcgctttttttgagtcaccggctcaaccttatgcacgacaaatgaaagttcctttagaacaactcaccctgacaatcccgcacgaagagacggtaatttattgcattgagccacatagccaacgatggactagagcccggtttggcggatcgcgccccaaaggggattttctcgtcatctttcgcgaagatgaaactacgacgctgccaatcgacgaaatttttgttctgaacaaagcgccggataccccgataaaccctgcagatttccttgccctccaagctaatgacgcaccgttctttttcccttaccgccaagcctttattgaaacctacatccagcaacgcgctgcatgccgcgcgatggcatccatttctagtagtgccgttgaactcgaaccccaccaattggcggtagtacgccgtgtacttcaggataaaaaccccaagtatattctggccgatgaggttgggctggggaaaaccatcgaagcaggaatggtcatccgtgaacacgcgttagaagcaactggccacgtcagcatgcttattgcggttccggcaccactagttagccagtggcgggaagaactggctgaacgttttcaactgaaacaacttattattgatgcttcgacggccctcgcaggtttgcgacaaaatgaggccacggaaggcatcgtgatttgcagtcattgcgatggctgtaccctgattgaacggggattcaccccttcacttatcgcagtagatgaggtccaccagattgcctcttggccgtggtcaggagataaagatgaacgttatgacttcaacctgatcgcagaggggtgccggaaagcccactacgttctgttactcacggggacccctctgcatgggcatgaaaggaacttcttgtcgatgctgcactgtattaatccggaagcctaccaagtggatgagacccatctgcaagactttaccgaactagtcaaaaatcgcgaaaaccttggcgggatcttctcggggttagtaccttccgtctcaaacgtcagcttacgtcgtaatctggaaacactgcagcagcagttcccagaagatactgttctgatgacgctctgccagcaactcattccgcttattgggacgttctcccccaatacgccggagcgtgaagaagggatccgggatattcgccggcacttgggggaaaactatcgcattcatcatcgactgttgcgtaatcgccgtcaggtttcactcagcttcgatgaaacgaaaaacctcaatctaaaccttctgtttcctgggctaaatggagcagaggagtgccgctggtattgcgatgggttagcattagacgaactgattgatgagtatcgttcattatctttactgccgcagaatacgcagtgggcaatgagtgaagacacgtacctcttctgggttgacgatctcctatccagcccactctgtgttatgcaacgcgctaaagtacatttgggtgaagcggaacgcactcaggaagaacgagatctgttagagcacattgtttcaactgcaaaaaatgaactacaggccattgattacaagcttgccatcacactgaatgagtggttgcaaaagaatccgacaggaaaagcaatcgtcttctgcgatcgtccggatcttgcccaacacttggcaataaagctcgaactactgctggagtacccccaggaactctatcagccgggtcatcccttgatgtacctcaaacccggcagccctattcggatcctaatttgcgataaaagcggcgaagatggtctgaatctccatggggggctgcgactagccgttcactacggtttaccgcgctcttgtagtcgtattgaacagcgccttggtcgtctgaacaggtacagtgcaaacctgaaaggcgtaaaacctgtccagagtctgatcctgaaaaatcacgccgactgtggattacgcaacgtgtgggcccgcattctgaaagactatattggcgtatttaataacacaatcgccagcctccagttcgtcctcgacgattatctagaaaatgcgtggcaaaatgtctaccaagaaggcccggtggcccttgaacgtgttgccagagaattccctggcgaacagggcattctggccaatgaaacgcataaaattaacatgcaggaaaagctgctggcgatggatgatgagattgcagaggcggcgatttttgcgcaacagatcagcgctgacgatcatcttgcagtagcgcagtgtaatgcactgacaagttggatcacgcgtgtgctacgttttcgcaccaccggcactgcagaaaaaggtatcaagtttcagttcgaactctctgatcgcagcacagggacgctggtcgattttaaaacctttctcaccacctgcatgctcagcttcgataaagaagggggcaacccaccgtcaacgcatctgatgagcgctgaacgcattccggcgatcgacggaacaaccgtttacccgctgcgttatgggcagccatttgtcgatacgatctggcaactgttaaaccaagatgcccgaggcagttccatggcggtactgcgagtgctccccaagccactgaatgagcccaattacttctttcagtcaacttggcttgtcacccattgccagacgcaggatacctacgcacaacgacgtattgcagacgagttgtacccgccgcgaattgtgcaacactggctgtcctctaatggtacgccggtgataaatccgcagttgctggaactgctcaatggcgagtacgccaaacatgaaacatcgcagaaattctatgcagatataaatctgcgccctaatctttggcaagaaatcgaagaacttgtctcaccggacacgtggaaagagatggtggaacgagtctataccagtgaccgagaacaacaacaggcaaccttcggcgaacaagccagacttcagttaatggccgtgaaagccgtggtggtgtgcagcagaaatctattagaggaaatcgtctga

SEQ ID NO: 34630 - DNA, 2481 bp, Escherichia coli
atggaagaggaatggtcacgcctgcagcaggcgctaaccacctattttagtcaaggggtcacctttaaagatggcatcgaaaatcagtttctgaacagactgattcagatcatcaccgatgcctcggcaggtcatggtgacatttttgccggctacgccgatgcgttacgtgccgctcacgcgagtggtattagcgagccgtggctacccctgccgccagaactgaccgatgctccggcacctgagtggggcatgacaaagttgcctgccgtgcaacaaattcaactggctgaagagtcggacctggcgctgaccagagccacctatcagcgtaagatacgcaggaacttgctgcgccccgagactgatccggcactgaggcgcctgttacccgaagagccatggctgactcactatcagggattcggtcaacaggccgccatccggacgctgctaacgtctgataataactgtacattgctggttaatctgcccaccagttgcggtaaaagtctgctcacccaactccaggcgctcagcgcaccgacaaacaccctcacgctggtgatcgtccccactgtcgccctcgcgattgagcaggctgacgatatgcaaaaactgcttcgcggtgctgaccaagatcatggtggaagttatgtttggatcggaggccaagatcagccctcgcgtcaggcaattaaggaaagaatcaaagcgggaacacagcgtgttctcttctgttccccagaatccgttcgctcttctttggttccggtgctgtttgagctttccagactgaatatgattggcgcgattgtcatagacgaagcgcatttgatcgatcaatggggcgcagagttccgccctgactttcagctaattgcccctatgattcgctcactgaaagccatgggcaaatgccgttttcgtacgctgctgctttcggcgacttacagcaaaagtacccgcgacattctggtcgagcagttccatgatgaaaacagtgaactgattgaagtatcagctaatttcctacgcccagagccggaatattttgtgcatcatgaggcaaatgaaaacgcgcatcgtcagcgggtcgaacaacttctgatgaccttaccccgcccgctgattttgtattgcactacccgcacagatgcggaaatgtggtctgcccgtctgaacgaactgggctactggcgaatcggcatattccacggtcaaattgacacaaacaatcgcaagaaattgatttcaaaatggaaaaatgaccaactcgatatcatggtcgctacctctgcctttggggtagggatgaataaaaaggaaatccgcagcatcattcatgctgctattccggaaaatatcgaccgctattaccaggactgtggacgtgctgggcgtgacggcagatcctgccaggtgcatctggtatggcataaggcgcaaatgaaaacggcaaaatcgctggccgttgagacgctgattggcgtagaaaaaggttttgcccgctggaaagcaatgtttgacgatcgtaagaaaagcccgatcgctgactacatgatttcactgaacaccaagcccgttcatatcgatcaccaaggcgataaaaacgaagcttggaatcgtcggacgttgctgttaatgcaaagagccggactcatcaaactggtctttgctgaaccgaaaattcctgacgacctgcgagataatctggatgacaacaacacgcaactgattgaatggttcgaaagctactataaccacgtacatatccgtcactgtgacgatgagcattattcagaagcgcactggaacacctatgtggagaagatccgccagtccgagttgaataaccgccgggcagcctttacggtaatggaaacgtggttggaggatcctggcaaaccactgtgtaaaattctgcagaaattctatgaatatcagagccatcctcccgagttaacctgtggtggttgtccgggatgtcgccagaaagggaaaagggcgttttcgcccaccgtgggcacagatgtacaaattttacgttccgagccgaagaaaaaagcactcttcgtaggtgcggaaaagaaagtttattacaacgaaaatatgaagttacattcgttgttgatggaacttcgtgtgacgttgcgatcactgatcacctctggcgaatacgtgtttattcgtgcagacagagcagtgttcctgcaactagagaacaacctagattcgctttcgcatttctggagcgcacagaaaatgacagcacctgcatcggatggaccagagatcgtgatcatccctaacacggctaatgcgttcccagatctacccatgacgcgctttgagcgaattattattgcacctgagcatctcgccgatcctcagttcccacatcgaacatggtgcgcaagtgccgctaatgcgctgtcgctggactcttttatcaggcaactacaacatgtcaataattaa

SEQ ID NO: 34631 - DNA, 876 bp, Escherichia coli
atgtcaataattaacaacgcaaacccaggaagcggactgatactgcttcctttgattgaacgcgttctgcaaagcgcacaggaaccgttgtctcaggacacactgctcgcccgctatcgtcctgataacctgcccgctaacgataacgcgtggagaaaattaaaagagaacctgagcttttggtgcaatctgggactctggccgatgctcgacggaaagatgttaccgcttgaagcaggtgtgcgtccactggcgcatcggttgcttatctgtacgattgatgcttgtcgtgaaaaaggcgttgccagtgggaatgattgcgaaccgttgtggcgggtactgagttgcttgttgagccttcagcaacactcggtcgggggccgggaacctctttcccctacgatcatcaccaacaaagtgcataaatggttacctggcgaaaccatcaatagcaacaccgaaaaactagtgagagaatttggtcgttttctcggttttctcgagttaatgccggacggaaattatgtcaccgaccctacccgggccatccaatattttctgccggagatctttgacgatacgcatacccttcccgccaaaatctttatggcaaacatggcggaggtcatgccgatgatggacgggggccagtacagaaactccgttcatgacgtgatgcagcaggaaaaagactggatcgcaccggaaggtgacaatatctgcaccagcacatctgttgcgctgcaacgacttgaaatcagtagacgcattatcctctccatccacagtgatgataaagacgccttatcacttcacttacctggcggtaaaattcgccgggttagccaaatcacgctaagagaggatgcagaatga

SEQ ID NO: 34632 - DNA, 3207 bp, Escherichia coli
atgagcataatggaatattggccatccaggaaaaatatcgtccaatgcattcgcaatgaagcagaagaattagaggatcatgtgcttctggccgtacatgaaccgatgctactgacccgacgcgacgtcaatgaaaatcatacaatattgcgtgatgaagacctgttccagcagttacttcatacggagcgcgcgatcccactgattggccgctcggggatggggaaatcacatctggtgcgctggttagactgccgattcaacatgtacctagcggaaaacaacaagaatgagcaatgggaaattgtccggatacccaaaaacgccagtctacggcaggtgcttttacgcatcctaaaaaatttgacgggggaatttttcgacaacgcacgcatgcgcgttaatgaagtgacagaacagtacccagcgaaagatctggcagacctactgttgaccatgatggcccatcagttgcaggacatgcaaaaagcggtcaaggaagaaggtcaaacattgctggcgcaaggtaaagacattcctgcagaccgactcgcctatatggaagctatcattgaagaggtcgaaaacggtatctgtgatctgatcaccgaccctaacttcaaacagaatcttctgaatccaggccactgtattttcaaacttgccagtcggatgagtagtggtctgaaagaaggagaagaagatcatgataaatatgaacttcttccggaagatctctattttatctttgaacctgacgatctgtccgcgcgtgcacgccgctatctgaaccattctcaactgcatgagtcagaccaagtggaggcgcgtgcccgagcagcgcgcgtgctcaatgaagccatgcatacctcgctgaaatcacttttcaagcgcctgttcaccttcaatggaggatcttttcaggagctttttcaggacatccgcaaggagtttctacgacttaatcgtcgtctggtgattctggtagaagatatggcggcgatttccgctattgaagatgttctgatcgacagtctgatcgaagaagcggcacctggcggcgtgcaagttctctgtcctgtccactcagtgattgcagtcaccgacaattatcctggctataaacgccgccaggaaacgttaatcacacgtgctggctacgagtgggtcattgagaacgtcgataaagacaataacgaagatcgtattgtctcgttctgtggtcgctatctgaacgccgcacgctttggatcaaaggagttaaaaaaacgtcctgagcaaggtaagtctctgtggccacctgtatggcacagtgatgagatccctgatgcactagaggattttggttattctgccaatcagaaattcccgctattcccgtataaccgtagtgccattctggcattggcggataagcattgccgcgacagcagcggcgagttgatttttaacccgcgcacaatcattaaccgcatcctgttagatattctgcgcgattgccgaatagaagcggaaaaaacacagttcccgccagcaaatttcgctggaattcatgccgttcccgagatcgaagacaagatttcacaactggttgtcagtcgggttggcagttcggtgacacttgccgccatctggggatatggcattgattcttttgatgaactacgcgtaaaactgccaagtagcgttgcgagtacctttggcctcgatgagctagccgcacaactgaatggcaaaggtcccacgatgaaatcggtggaaccagtaacaaagaacgcacacgaaacgactggcaagacaggcagtacgccggcgggtaaaaagattgacaatccggagttcgaaccgaaagaagaggcaaaatacactgccaaatccgaactaccctttatcagggctgtccgtgcatgggtgaatgataatgtcattctgccgcaggaggttgcccgtgatttgcgtacggcactgaacgcttgttatgaaattcatgcacagccagagttgtttggtatgtcttctcgaccaccgctgaaagaaggtcgttttacgttgatttttctgccaaaagcggcatctaacccctcaagtattattacgaacttttactctgagcaggacctgaccgatccttcccgacgggtagatgtgtataacgccgcggtagccctgttacgtatccagcattacgccgatttaaagcaaggttttaattatccagaggcgcaggaagactatactcgctatcaaaacttcatccagtggtgggtaccgcaggctacggaaagtgccattaatcacttccgggcgcgtaacttacgggatgcgctgaaaaagcatctgcaaaaagctctgctgcttggcctggtgaccggtaaagaagaaccggcggaaatcgtcaataccctctgcctcacccagaaaggcgtcggaagaactgaaggtaaaagtaccggtcgaacgctgacgaccgctccttccgagatctgtttcagagggattgaggcaacactgcatccgcacgccagtgccagagtcgccgaagctagggcgcaggcgctcgtaggatgggatgatgccagaaaagcgtggcttgaacaggttgccatcacggagcaaggctcaggcttgggcagcagtcgtgcgctggatgccgatgtaatatattctgcgctgaaaacagtgttaaaacagccgcttggcgcagaaattgaacgtgcggcgctctccgtcaaacaggaacttgccagcacgttaaaaaatgttcagctctttgccaacatcaaagatagtgacgatttcctcagacaactgaacgactggcagacgtttattgagactgtgcgggccgagcactaccccactggcagcgctcagtacaagccatcttcgtggctgctgggggaaattgaagctctcagaaccaactccgaggagagtctggcgacattaaatgcgttactttccattgaaaaacagaaagatagtgcgaaattgtggctggagatctgtcaacttgatggtgactacgtttcaagaatcagcagcatacttgcgcaatggcaactggtacaacccaagatcgcgttcacactccagcagatgaatgccaaaggggatatccagcaactgactcttgctctgaataaagtgaatgaccgtctaaaaacacttgcgagcgatatcatcgcctctggagttgatcaatga

SEQ ID NO: 34633 - DNA, 849 bp, Escherichia coli
atgaccaccttacgccaacaactggccgagatgcaaaaagaactcgatcttagctttcaggctggtaaggcctcacaaatcatcgataaatgtaatctggtgtgcagcaaaactaacaccattgcagataagtttgtattgcttaaacagcaatattcagcccagcaacaactcccgcggggcattgcggttacctggaatgacgagcagcgtagcgaactgatcgctgccgcgaacagcgtcaaaagtctcatgttgcagtggagacgctggctgaaaaaacagtcggtagacaattctggcgaggaggagaaccttgcagatcaggaagagtcaccacaggaatctctgggtgagactctgaccgcctcagaggaacctactgcctacgacatcatccagaatgattccttgacccattgcgtcaaccaactcggcgccctgcacaaggacctaagcaaagaactaaaagatgcttggaatacatggctggaagagttacatcatcaagttcacgtcgatgacaaaactctgaattttcagaaaaatacgaataaatttgatgatatcgcctccgactacgagcgtcgacgtctggatttcgaaaacttaacgcagagccagccagtcagcgatgaaaagattcaccaaattaaagcgctagccgagaaactgtattccctgcgcggcatgatgaaaacggactggcctgacgtggttcaggcatttttcaatcgcattaatggcccgcagaacttgcgcccgacgttaagcgcccttacgcctgaggtgcttgagtggttaacggttgaagagatgctggatgagttcgtgatcacaaggaaataa

SEQ ID NO: 34634 - DNA, 4437 bp, Escherichia coli
atgtctacggctgatttgtccctcctgcaccaagcgctggatctgctcgaagagcgggaagcagaactgctggtctggggggatacagatggcgcatttacccatgccgatatcatctcgctctttacccggcaccttccgtacgaagatgccgagtcgttactggcagaactgcagaaggcagccatgcttttcagcgtcccgaccagcaaagggggaactcgctaccgcacgcgtatggcagaagcggtatgcctgttccgccaccagcgtcaatggttccgcaatcaaccgcttcagcaagcccggacgcttgtcgccgactaccgtttcgtccgtcgcccgcgcaactatccgaagcgtgaacttccggcgcaaacggtgctgagcaaatgggtcgatgttccgtggatgaacgaaattaaacgccaggcgctttcccgactgatcggcgactttttcattgccggctttcaggaacgctcaaccgaacgtattttgcgcgcctggcactttcatagtcatcatgcccgcgtgaaagaagctaccgggaccattgtctgtgccggtacggggagtggtaaaacactggcgttctatctcccggcactcacctcgctcctcaatgatattcagcgcgacaatgcgcaacgggtcaggacgctggcactgtatccacgtaaagaactgcttaaagatcagttcatggaaacctggagtaaatgtcgtgaacttgataatcaggccctagtactgacaggacgcaagatccgtattggttcttttttcggtgataccccgttcaaccatcaatacgcaatgaaagataaagacaaggatatgccctttgatttactccgttgtaccacgccgaaatgttcggggcaaatgcactggaaagcagaagatatcaaagcgaaaaaagagattcttcgttgtagccattgtaatcacagcgtagacagtgacgaagtaatcctgacccgcgtctcgctgatgaaaaacccgcctgacatcctgtttaccactaccgaaatgctcaatcagcacctagggaataaccaaacgaatcacctatttggcgttggcattgacgtaacacctccgccggtagtcctgctggatgaagtacacacctatgtggggaataccggtgcacagacggcctatctactgcgacgctggatgcaacttgcgcgcagccaccctcattttgttgggctttcggcaacgctgagtgacgccgaacgtttcttcgccgatctggtaggtgcacataaaaaacatgtggctctgatcgaaccgaagttccacgaaatggaagatgaaggggctgaatatctgctggcattacgcggtgatccggtctcgcaaaccgccttgctatctactactatccagaccagcatgctcgctcggcgtattctggatacgaaaaggaaaaaatcatgcgggacatgggggcaaaaaacctttgtcttcaccgacgatctggatatcaataaccgactttatcatcaactgtgtgacgccgaaggctggcggtcgcgtggtcaaaacttatacgttgcaaaaccaccgctggcttctcagcgtctggaaacaccgaaaaacagccataagctgacactggcaggacagaactggcgtatcgcgctggatattggtcactcacttgacgaaaatgaccgagccatcgttgcccgcacgtccagtcaggacgtcggggtcgatcctagagcggaagtggtgattgcaaccgcgtcgctggaggtgggctttaacgacccctccgttggcatggttattcagcataaagcgccacgtaacgttgcctcctatttgcagcgcaaagggcgtgctggtcgttcaagaaccatgcgtccgtggatggtcgctgtcctatccgaatttggccgcgaccgagtcgtttatcaacgctatgaagagctcattaatccagagataaaaggacagttgttgccaatgggcaacatccatatccagaaaatgcaggcggcaatggcgacacttgactggctgagcatgaagatccccggaagtaatatctggtcattgctgaataaaccgcagacaaagcgagaatctcttgatcatcttgatcgtatgctccacctgattactgccgtgattgaacaacatgcgtggcagctggagctggagaagtatctgttttacgcgttgcgcatcactgacgagcaacttcagcgtgtactgtggtcgccgccccgttcgatcatgatggagttgctgccgacattaaaacgacaactcacgacccaatggtcgcggatgggccaaccggaggcagatcgttcgacgggacgttccccactgccggcctttattccttcagcgctattcagtgagcttaatctgccggaactggagatccatctcgagcggaagttcgagaagcgtgaacatttgccctttattcaggggctgaaagagtttgcgccggggcgcatttccaagcgctatgccgtttactccgacaatgaagcagactggcttatcccaaacaactttgttccggcgatgaattgcgtttcggatgttgattttgaaattgagcaggctttcggcaatacttggcagcccgagtgtgtcatcgagtgcgaaggtcagccccctattagggtcattcgcccgatgcaggtgcttacgcgcgcgctgagatttgatcaaaatctcaccgagaaaagcaactcgcaactgtactggcatacccgttttaacccagacgatcaggccgttccgctccccattcctaccggcccgtgggcggagatcctccgctccattacgttcttcacccaccagaacatgacacctctagatgtcacgcgttacgccacccacgcaacagcctcattacgcaataaaaccaagcaacaggcgcatgtgaacttcagatgggtcgagcatggcgagcctgtcggggttggcgtgcggcagtgggtggatggcgcacggctcagatttacgctgccacccaatctgctgcaacgcctccggcatgacccggccattcagcgcgcactgcgaacactctatttccagcatcgcatcaaacgtgaaccacgcttcgaatatgacacgtttaccgctgactggatctacgagtgctatctggctgcggttacgcgggaactggtcacacagtcgtctctggcagattctatcgcggaattaaaaactccggacggccgacgtcgcctcgctgatatcgcggacacactcttccaggcagataatatctttgaaaattgcgaggatggtgaagacgacgttgaaagtcaggaactgcagcaaaatttgcgcaacctgtttaaagagaccgacattctggacatgatagataggcacagcgcgatcctgactcaggatctcagtgatgatgtcgattttcaggactggctacaggagttactgacaacgacgctggccggagcggtcaaacaaaccagccacctgttgctgccggatgtcgatgaacgcggtctggtggtggataccgaactaaacgacgaagtactggacgtctggctgaccgaatcagaacccggcggctgtggtatcattacccgtatggaagacgtttttcatcaggatccggtctccgtactgaatctgtttatgcgtagttttgccgtcagcgattacgagcagatcgactacaacctgttcgagatgctttcgcggctctcatcttccagcgaacttcaggaggccttgaatgcgatacgtcaggccagcagtcatctgcagcgtcgccaggctaacgcccacctcagagcgctgctaaaggcgcagggatttgcacttagtcacagttttatgtcggtgctgcacacgcgggtattacgtccgggcagccaagcgtcacatgatgcgcagatgcttgcatatctcaacgcatggcgggaattggaagataaagccggatacgaaatcgctctgaatatttttgcccatacccaagcgacgcaagaactgcctgacgccagtgtgattaaagtttttgagcgcttttgcaaaattcagggaatgctctggcagcgcggcaatgccatccgtcggtcggttctcagctattacaatccgtttaagtccggtaacaacctgactgaacgactgctgctaagctcactgtttcaacagacggcgtgtagcatcagcatcagcgagagcgattggttagcgcagttacatcacgccattacccaacacggctttgcagaactgcatatcccgcgcgaggctcgccatcgtattgtggaagtgatctctctggtgcaggtgactccaattgagtactttggtttgcatctttatccccgcgaatccgccgtggattatcaggatggcaatctggtgttacgttttgaactggccgaagcgctactgtaa

SEQ ID NO: 34635 - DNA, 531 bp, Escherichia coli
atggaagaacaacgacaaattttcctgcatggcccactgggccagcgacatttgcgggaaatcctaagcgcgcagtttagtggcttgatcctctatccggaactgatctggctgatctctccgtggatgagtgactttgacgtgattgataaccgaggcggtcagtggagttttcttgatccttcatggggagctcggatgatcagctttcaggaattgctcgccaccgccgttaacaatggttgcccgttacgtatcgtgacacgtaaagacacgcacagcgtggtctttatcgagcgactattgatgcgcttatcgcccgatcacgacatgcaatacctatatcacgagaacctgcacgctaagggattgctgaccaaacatttctttctgaaaggctccatgaattacacttggagcggcgcaaacgtgaacgatgagcatctgttgttttcaaccaataatacggtgatttcagatgcgttgattgaatttagcggccagtacacctttggagacacccatgactaa

SEQ ID NO: 34636 - DNA, 2184 bp, Escherichia coli
atgactaatgttcctcaatggctgcgtgacttctttggcaacggaaatttactgaagctggacaggttgctggacaacgttgaaaacgcctaccctgcagacttaaaagccgtattactgccgctttacgagagcgcgactgatgctcagtggccactcattctgccctggtgtgatgctcatcgctgggtattttttgccgcggcagatacagctcgcaccacgcaggaactcagcaatgtgttgaatgccaggctggggtctgcagatgttattgctgacagaaaggtgacctttgtccccgcacagggagcgacgtccctgtctgaaacggcgttgctgacgcactgtccagccggatttatccggatcgaattattgcccacaaagcttaaagataaaccagcaaaagagcgggttttcgccgcgctcaaagacgttatcgtcctatttcgtgacaggccatcaatcgtacgcacggtcaaacgccccttcgggcgaatcttgagtgatttcattctggcgaatagccaaaaagacgaagccacaagcgacgctttactacaggaactgaagaacaacggtacgctttcgcgacgtaaccttatgctgctcgaactccagcaggcgggtaagttagagaagtgggacacactgctgaatcacgattctcttgctgatttggttcggggacgcattcctacaaccctgatgcggatgctgctgaaagcataccagcagcgctattttacacccgacagccatgggtatccgcaagcctcaccggcggatcttcgcccgcaatgtctggcactaaaccctctgtttacgcagataccttttttatcccaagatgaaactgactttgcggcgtggaaaacttgggccactggagtgatgcttattggtgaagtcgacctgctcaacgcgttgccagaacgcctaaaaaccgactggttgaatggattgcacacctgggctagtcggccgttcaacttagtgagtccgtcagcgacgacagcgacgacgtcggtcccggatacgctgcaacagcttgcggcatatttacaaacctccctgaccgcaacgcaagaggagattatcggctacgcacaaacgctccacacgcttgaccagcagttgatagaggaagcgatggcggtaccgctactgaaaacactcatcgaggagatccgccatctgaccaatccgcaaatcgtgggctgggatatttgtttttcccgactatgtcagtcagaagtcgacagcaacagccttgtgcaactggttgcgctggaaagtgaaaactggcccgctgactcgttccatgaagcgacgctgctccagttactatcaagtcagattccaccagacgcgttcccgctccttcgtaacgtgatgcctgcctttattgaatggcttgagcgtcatcatttcagtctgagtagcaggacgtggctaaagtggctggatgttcttgcgatggaacaaagcgtcagtcaggcggatatcaagctggccacgatggcgacggagcgcttcctacaaggctctgttagccaggaagcatatcaacagttcggagccatgttggaactgatcgtcgaacgcgccagttcgttccgtaacctgtcagtgctgggcgagttgatcgaactcttccttgattctccggtgcaggatcaggcgacgctcacctcgctgtggctcagcgttcagtcttttgtgagcggaatatggacgcgactggatccgactgctcgtaccgtgatgcgcaacttggcggctgacgtgctaggggaaggtgcagagagtgtatttccggttgagcaggatagctgttcggcagatgcagaagatgaattgccggacttatccggagccagagtggcgatttatagcttgacagaaggtgctgcaagacgcgcgaaacggatgctggaaacgctgtttcccgggatcggagtggagatcagccaagcacacactgcaaccgataagttgattaatcaagcaaaacaggctgattacttcatcttttcggcaggcagcgccactcatcaggctttttacgcggtctcagcgcagcgcagagatttaatctacccgacaggtaaaggtgccgggtcaatgctgaacgcgtttattacgcacgttcagcaagtctcaacagtagtggtataa

SEQ ID NO: 34637 - DNA, 291 bp, Escherichia coli
atgtacgtactgagttacgttctgatcaccgttcagcaccatgtcccgaccactgttgatggtgacggttttacctttgtcgagggtcgtttcggtccattcagcaccgttgccttttgctgcattaacactagcaaagacgttgataccggcaccgacgccagcccgtcttggttgttctatgtcgattctatctggcgtcagggggattatataaaccagtatggtcccggcacgccggtgcagcagtggatgactactgtgatgccgagacatacagctctattgtaa

SEQ ID NO: 34638 - DNA, 504 bp, Escherichia coli
atgagtaagttcaccacgcctgccgtactggagctgctggacaattatcgctggcggctgatggagccttttgaattctggctcacggacaacccgcaggatgtgatcagggtaccggcgggttatgtgaccgacctcgccagcgtgccgcgtatattgtggtccttactgccaccggctggtcggtacgccaaagcagccattattcatgactggatgtacgacaacgccctgcggtcgaagaaggaggcggacctgatatttctggatggtatgcgcgtcctgggtgtctctcgttggcgtcgcgggctgatgtatatggccgtgaggctgtttggtcgagaaaaaatacagcgaagagtgcacgataaaacagagggccgactatccggccccgaaagtattttcacagaaactcttaacgggtttctgttcttcagtttccgtaatcagatcagattatcactaccactgacgtcaatcggattgggcggtgagacgtag

SEQ ID NO: 34639 - DNA, 579 bp, Escherichia coli
gtgaatattattcagattttaaatccacgctatctcgaaaacggcgcaattgattgtgaggtgttattcgagggggacgctctcccggttccctatactgcgatggcaacggattcagcggaaacagggcggcaaatatgggaagagcttcagggggggaaatggggcgaagttgctccctttacggtcacgtcggagcatctggaagtcgccagagcggcgaaacacgctgagatcattacctggcgcgatatgcaggaaaaaggcaatgtcatcttcgaacttgatggccatcgatgggatgcagggaaagcatcccaggagcggctggcaccagtggtgtcggttgccagggcgggggcgttgccggaaggcttcttctggacggatgcggacaatcatgacatccctgtcgacgcggcatttttagcccgacttgaggccgggatgactcaggcgatggtgctccagggattcaggatccacgagcgccagcgacagatgaaagaagagatcgccgcgatgacggacatgaaagcgatcagggcgtacacagtgggctggggggcagatgagtaa

SEQ ID NO: 34640 - DNA, 1386 bp, Escherichia coli
atgtctgtattaatttcgggtgtgctgattgatggcgcaggcattcccatgtccggatgccacattattttgaaatcccgtgtgaatacttcagaggtggtgatgcgtaccgttgctgatgtagtgacgggaaataacggtgaatatgcgattgatgtccagactggaaaatatgatgtttatctgcggtcgtgcattgaaagagaattttgcgtcgggaatattgccgtttacgatgactcaaaaaccggcacgctgaatgacttcctgaccgccctcgatgagggcgattttaagccggatgtggtgaagcgatttgaggagatggtgaagactgtggttcagctgtctgatcaggtagccgctgacaaggtggtgacaacagccgccgcagaagccgcccggcagtcagagcaatcctcggcaatcagtgcggaaaaatcgaaggcttcggaagaggctgctaaacgcagtgaggcggaagccgcatcttaccgggacgaagcccggcaatttgcagaacaaagtcagaaaaatgccgacgccacaaaacaggacagagatgaaattgtcaccgttctgggagacaccctgaaaacatcccgttgcctcggtgaaattgctgatgcgggggaagaagcgcaaagtgaatcgctgcgcaacctgggggctggaagtgcagccagacatgatgtgcagtccgggttgtatgatcgcaatgcgggtgtggctcttcccggagcttttggctatggcgctgaaatttcttacaaggacaggataagctggagtgggaaaacggagcctaatggatttgtcaaaaacttcaccagtgcatggcctggtcgctacagtgtaactgaaaccaatgcaaaggcgactattcccggtgtcgtgttcaatgacacggtcgatattatctgggttgagagcagagtcgcaaacgaagacctggctacagtaagcaaaactgccattttctatggcgtaaacggggaaatttatgccactcgctgggctggtggaaaatttaatacctggataaagctgaacaacaccccgctggattacgtaactccccttttttcagtcctgacctcacaaacaaatttttcgaggatcccggatattggaggattgattcttgccgcctacaaaaaagagggggcaacagcgccttttatgcttaatcgctacgactacgcaaaaggctcagagctgaaacgcgtggcgcttatcctgccggaaggagagaaaggactcatctgtgaggtggagccagaaaacggctataacccgttacctggcacctacaggacattatcaggacatgtggatatctccaccaacgatcgatttgtcagtctctttgtgaggatctcgtga

SEQ ID NO: 34641 - DNA, 219 bp, Escherichia coli
atggcgaaaaactggcggaccactgacggcgatatgctggacgacatctgccgcagatactatggcagcgccgggcttaaccagtcactggcagcggtacttgaggctaatcccggacttgcagatcttggtccgttgtatccatcgggggtggaaatcgtcttgccggactggacatatgaaccggaagagaaggaggtgtttcagctatggagctga

SEQ ID NO: 34642 - DNA, 1260 bp, Escherichia coli
atgaatggactgattctgacaacgtccggcgctgcagaaattgaagcggcatatcagaacgggcaaaccgtgaccgtccggcatgttctgcttggtgacgggggcgggcgggcattgccatccacgccggatgaaatggcagcaatgacatcgttgtacggcgaattcgggcaggaacccttttccgacggtgcggtggaggagggcttcatcagcggggatattgtgattgactgtaaatcataccccggtaaaacccttcgtgaactggggatgatcagcgacagaggtacgcttatcgcgtacggacgttatcccgacacctttttaccagatcagacggactccgttatcaaggaagttattctgacgctggttcttgggctgacgcacgcacaaaacgtggtgctggaagttgatccggacagggcaattattactcaggaaatcggagacagacgctatctgcaacgaaaaaagaatctttcggatgtggaagacaaggatgaggctgttgaaaacctcggattaaaacccacggtggacaaggcaaaaaatgccgttcagcgtgatggtgacaccatgaccggggaactgaaaatccgtggtgttaatgcgctgaggattttcaacgaagtctttggtctgatttttcgtcgttcggaagagtgcctgcaccttatccctaccagtgaaggtcagggcgagaatggcgatattggtccacttcgaccgttcaccataaatctgcggacgggtgaaatatccatgtcgcataaagtgtctgttggcggcggctctcaggtcaatggtgcgctgggtatcggcgttcagaatgcgctgggtggaaactcaattgctttcggggataacgataccggcctgaaacagaatggtgatggcctgctggatgtttatgccaatagtgtgcatgtgttgcgttttcagagtggcagtatccagagtaataaagccgtaaatgttacaggacgggtaacaccaactgattacggtaattttgatgcgcgttatcaggctaaaacaggcggcgtgcaggatgtgcggtatggttccgaaatgttttataaccccggaggtaacgagatatcctggatatttcgctcaccttcaggccacgggttatccggtattaatgtgcaggaaaccggaagtgattcagcagataacattggtggtgtgtattaccgaccgcttcagaaactgattaacggcacctggtataacgtggcgagtgtttaa

SEQ ID NO: 34643 - DNA, 1617 bp, Escherichia coli
atgcgtcgtaatttatcgcatattgccgccatggcatttaatgagccgcttttactggaacccgcctatgcgcgggttttcttttgcgcgctgggtaaagagatgggggccggcagccttgccgttcctcagcaggctgttcagcttgatgctgatggtatgcaactggctgtgactgactatatggcgggcggtcagcgtccggcaaagagttaccaggtgaagaatggcatcgccattctgccggtgagcggcacgctggtgcataaactgggtaccctgcggccttactccggcatgactggctatgacggcctgatggcccgccttcagatggcggtgaatgatccggatgtgcgtggcattttgctggatatcgacagcccgggcggtcaggctgccggggcgtttgactgtgctgacatgatttaccgtctgcgggaacagaagcccgtgtgggcgctgtgtaatgacatggcctgttcagccgccatgttgctggcggcagcctgtacccgtcggctggtcacgcagacggcaaaaattggttcgattggcgtgatgatggcgcataccagttacgagaaacaactggcacaggaaggggtggacatcacgctgatttactccgggcagcacaaggttgacggcaacagtattcaggcattgccggcaggtgtgcgtgcagattttcagcgccgtattgatgaggcccgccggatgtttgtcgacaaggtggcgctttatacggggctgagttcagaggcggtgatgaataccgaggctgccgtttatgacggtcaggcaggcattgatgcaggcctggctgatcaactgattaatgctgcagatgccgttgaagtgatggtttctgcactgaatgactctgttacgaaggagaatgcaatgactgttaaaaatctcaccgttgctgaagcggtggcccaggaaaatcagcgcgtgatggggatcctgaattgtcaggaggcgaaagggcgcgagcaactggcgcaaatgctggcaggccagcctggaatgacggtagagcaggcgaaagcgttcctggctgctgtgcctgctgccagtgtggcaaatacaggtgatcagattatggcgctgccggaagcaaaggggcgtgagcaactggcacagatgctggcaggtcaaccggggatgacggtggcacaggcgaaagcgtttctggcggcagcccctgctgccggtgctgcaggcacaggcgatcagattatggcattaccagaagcaaaagggcgtgaacaactcgcgcaggcgctggctgaacagccgggaatgaccgttgaccaggccaaaacattactggcggcggcaccggttgcggggtctgcaagtgtcggcgagcagattatggcgctgccggaggcgaaagggcgcgaacaacttgcacaggcactgacagaacagccaggaatgacggtggcgcaggcgaaaacgctgctggcagccgcgccggcggcatcgcaaccgtcacaggaaacactttttgatcgctttatggcacagcatgctgccagtgcggtttccggtggcggaactgccgggcgcggggaggaagatctgctgatgagtatgccgtaa

SEQ ID NO: 34644 - DNA, 216 bp, Escherichia coli
atgcggggggtagagtgtatgcaaatgataatcactcccattttcacgggtcctttccagaatctgaaacaccgggggtctggggacgcgcaaaaacgcgccatttatgaaaattttcagggaaaaagcagatccgttcttctcctggctaacctgttgtttaatagaaatttcttaaaaaaaagaaaggatctggcagcggtgatttttcgctga

SEQ ID NO: 34645 - DNA, 582 bp, Escherichia coli
atgcccagccgcacaataataaaatttctgattatatctttattcgttatattagttttcttgtcaatcatatatatagcaagaactccggccagacttgatatgaatgacgtcgctgaaattaaccagaagcatcagcttatttttctcatcagacacggagaacgatgtgatcgctccacaaatatatgtctgtcagaacgtgatggcatcacaataaatggagccaataaagctcaacaatatggaaatgcattcagcaaaatgtttccggactacggtctctattcaacagatacagtccgaacgatacagacagcctcttttttttcgggtggaaaaacagcaaccattcctgatatttcaacctgtgatgatgacgcagtaaacaacatactggaaatatcacaatctgataatattactgtaattttcacacataaccactgtctgtcgaaaattgcaaaaaagatgaacgactggagatttaaacctgattatatggatacactggttcttcatcgggagaatcacgatctggttcttgacggatattcaaaaccgaacgattttacccagtaa

SEQ ID NO: 34646 - DNA, 468 bp, Escherichia coli
atgagcagagtcaccgcgattatctccgctctggttatctgcatcatcgtctgcctgtcattggctgttaatcattaccgtgataacgccatctcctacaaagaccagtgcgataaagcgaaggaaaaactcagccaggcgaacgccaccattactgacatgcagcagcgccagcgtgatgttgctgcactggatgaaaaatacacgaaggagttagccgatgcgaaagctgaaaatgatgctcttcggcgcaagcttgataatggtggccgggtgctcgtcaaaggcagatgtccagtgccagccacaacaaaaggctccggcaccgccagcatgggcaatgatgccaccgtcgaactctctccagttgctggacgaaacgttctcggtatcagagatggaatcatcagagaccaggcagccttgagaacgctgcaggaatacatcagaacgcaatgtctgaattaa

SEQ ID NO: 34647 - DNA, 273 bp, Escherichia coli
atggcgcaaaatttcaatccccataataatccagccgcctttgcccacaggcgcaggcggggtttatgtgtatctgaaatacagcatttttactatccgaactgcacgacacatgagctcgaggagcttgaaaagttgtacggccgtcgtggctacacagtaaaaaaacaactgaaccctgactgtgtgacgtggtttgtttcggtggaattgccagtatcaaatcacctgccgcacaccccctattgttatcgccagggcatctggaggtaa

SEQ ID NO: 34648 - DNA, 342 bp, Escherichia coli
atgctttattgtatgctggataaacgtacagtatttctaatttcttcatatgtcagtgaaaaaattcatttcaaagattaccccgacatcatttgcgcattgcgtttatatatggttcacaacggctttatattcttttgtctgtcaggaggtattgtgaaaataccttctaaccttatcccgggatttcatgagagcacacaaccggttgttgtgtaccgtaacagggatggatcttttaaatcaggatttgtaatgcgtcaggatgaagtagttgtcagtctttcgcttcttcgggaagcccgtaaacttgcgggcattgatgattatcgaaaacgataa

SEQ ID NO: 34649 - DNA, 330 bp, Escherichia coli
atgcaaaccttatcatcacacccgacacgggcgactcagcccaatctgtcacccgttgaaacctggcaacggctgctgactcatcttttatcgcagcactatggcctgacgttgaatgacacaccgttcagtaatgaaaccaccatacgagaacatattgatgctggagtatcgctcagcgatgcggtgaactttcttgtcgaaaaatacgggcttgtccgtatcgaccgaaagggattttcgtggcaagaacaaaccccgtatatttccatagtggatattctgcaagcaaggcgctctaccggcttgctaaaaactaatgtgaaataa

SEQ ID NO: 34650 - DNA, 366 bp, Escherichia coli
atgaacaatcactccgaatccggtaccaagccggagaatcccgcctgccagcagtggggactaaagcgcacaatcacaccctgttttggcgctcgtctggtgcaggaaggcaaccgggtgcattttctcgctgacagggccggattcaacggtactttcagcgacaacgatgcattgcgcctcgaccaggcctttccgttgatactcaaacaactggagttgatgctcaccagcggagaactctctcatctgcatcagcactgcatcacgctataccacaatggactgacttgcgaagctgacacactcggctcctgtggctatgtctacatcgctatttatcccgaccagcctgaaccccattaa

SEQ ID NO: 34651 - DNA, 222 bp, Escherichia coli
atgaaaatcatcagtaaacgccaggcaatgaccctataccggcaacatcctggctcccggctgtttcgcttcagtacaggaaaatataaatggtcaggcagtatctgccattatgctggccgcgaggtggaagatatacgcggcgttctggccgtatttgctgaacgccgtcagggccgcaatggtccctatgtcattcttcgaagtgtcactctcaattaa

SEQ ID NO: 34652 - DNA, 444 bp, Escherichia coli
atggatacacacaaccctgagttcgctgagcaggcagcaattactgcctcggtggtccctgacgagctacgcatcggcttctggccacagcactttggctccatcccacaatggataacccttgagccccgaatctttgcctggatggaccgcctgtgcactgactatcacggcggtatctggaacttttcgacgctcagcaacggaggcgcttttatgtatcctgagtcggaggatgatgaaaagtgggcattgtttaacagcatgaacggcaatggagcagaactcaccagtgaagcggcagggatagtcgcctgtctgatgacatacagtcaccacgcctgtcgcaccgagtgtgatgcaacgactgagcactattatcgcttacgcgacttcgcgctgaaccatccagagtgcaactcaattatgcatctcatcgactga

SEQ ID NO: 34653 - DNA, 840 bp, Escherichia coli
atgaaggcactaatttcacgactcaccgtcatttcagctctgctatttcccgcgttaagctctgcagtggttatccccggaaatatacacccaggacgttacacgttctttctgacagaggaaggtggcgaaatgctacgcgatatgaacgatgctgcagtgagcgtcaagctcaacaataaagcaggcttcactgttgaggcgcaaagaatggccgctgcagcgaatatttcgcctttgctatatgccgcatcaccacttgaaggaaactttatccgctacgacagtaaacccgttaaggccctgacctgccttatcacttcccgtaatatgccgggcaccaacaagaattattcatgggaggaaacctactgtctggatgaaaccggtgcagcttacattggcacccaaggatggccgtcacgcacaatattcgacaaacgctgtggggtgggtgcatctgactgcccggtctatctgagcctgaaaaatgatccacccaccctgcgcaacgactccgcacagtatgtgccatacagcagcgctcaccgttctgagacggtgcccaataaaactcagaataaagtacccgctgacgaaattgtcgctgaacaggatggatatgcggttcacttttcccgaagcaacaactgttctgacagcagactcaccgttaaaaatatcagcacagggaaaactgctgcgatcacaggtgtcaacgggtgcacatttaatccgaaaaagaacgctgtggttatctatccggttaatgaatacgtgagcgtttacagcggtactaccaatacctctgaagaaatagcgactgccgatctcccttaa

SEQ ID NO: 34654 - DNA, 414 bp, Escherichia coli
ttgaacattcgcacagttctttttctctgctcatcgctgacagcgactgctgcacaggccgttactcccgaacaacagtggggtgactggtatggctacatcaatgccatggagtttgaaattagcaccgacaatgccaccggagagcgcctgacgctgacctgctcagacgagcatatgaccctctcctacagtgtacctgcaaaggactatcgggcctcagccaccggtataagcattaacgcaacctcatacgctacaggcgaaacggcctttattgcgctcaaaaataccagtgatcagcagcagatagagatcacgttgaaagataagccccttccgggaacctttaaaaccgcggggttgcgcgaagcgttgaatgacctgagctggcaggactgtatcagccattaa

SEQ ID NO: 34655 - DNA, 624 bp, Escherichia coli
atgagcaacaatatgggttataatcagtatcacatcaatcgtattcatgaaacgctgcagagttccttgcgtgaatacccaaggacgtttattctgaatattattcttaggtttcctgatgccaattatgaaagctataaggctgaccatgcagtcataactcgctttattgagtccttaaaatcacagattaaattcacgcagaagagaaagataaaacagggaaagcgagttcatctcagcaaagttcgctatgtatgggccagagagtttggtgaagaaaaagggaagaaacattatcatgtggcattgatgctaaataacgatgcttggtgtagtgctggtacctattatccgatagaaggacagtacattcactgtctgggattgatgattatggaggcatgggtcagaacgttgaaccttaatgctcagcaggattatcaaaagaattattatcccctgatagaatttgtctttgaaggtgatttccgtctgaatacctatgagaaaaatttcttatgggattacgaaaccatcatgagaagactgtcttatctggctaagcgatttagcaaagataattctgacgagcacagaaattttggttgcagccagtcctga

SEQ ID NO: 34656 - DNA, 186 bp, Escherichia coli
atgtatcactgtgtattttttcagagggataaggctcgcgatctcctccggaccacgagcctgtgtattgttatgttatccaaaatagtgctcaggtatgaggtagctattctggctaagcagggttctgaggcgaaggcggctgtttatcatcataaaatggcatatagcgaccatcgttcatga

SEQ ID NO: 34657 - DNA, 1533 bp, Escherichia coli
atgtcatatttaccccctgcacttccaatggttaattctgccattcctttccccgttgatgcattgccattgataatgcaaaacgccatcaactatcttcaggatggtggaaaagtaccgacagtacttgccgtgaacgctgttttagcggcagtatcattggcctgccattcgcatatcaatgtactcaatccttacacggacatagaggagcattgttcactcaacatcctgacgctcgctgattcagggacgggcaaatcgtccgtcagcaaacaggtaatgaagccctttgatgctttcagggctgagttggctgaatcacatcgggttaaccaggctgtctggcgtgaagattatgtcgtatggaaaaccagtttaaaggcactggaaagtaagttgcgcgatacagttaaaaaagacctgtgcacagacgaggcccaggcagccctgaaatctcatgcatcgattgaacccctcaagcccttactacccacgctggtctataatgacacctcgcttgccgcgctcatcgctggcctgaatgcctatccctgcgcaggtctgatttctgatgaagccagcaacttctttgacgcacgtcttaaagataatctggcgttcttcaataaagcctgggatggcgatgtgtatgagcataatcgtcatcagcgtgccacccagtgctttaaaccgacgctgacggtgtccttgatgttacagccttcgctttttttcgattacatgaaaaaggatggcgataaagcattagagagcggttttttatcccgcttcctcttttcaaatatcaccccgaacaacacgctaagttcctgtgtgtttagctaccattatcgtccggataccgcataccgtgatgaaagtgctttaacctgctttcacgaccttattggtaaattgctcgggcagcagcttaaacaaattaattcaggtgaaggtaagaagaagattctcaagctttcacctgaagctgaagcacactgggagaatatacgtgagaactggctgacatacacactcccgggttgtgcctggtcgtatatcaaacccatggtattgaaagccagtacgaatgcgttacgtatcgctgcgctgctgaattacttcaccaaccaggaggacgacattattactcttgatgctatttcgcgggcatcagcgatgatgaactggtatctcaaccataccgcggcctggttttatcagttcacggatgagtataaatttcagcaggatgtacaggtgctgacccagtggatccaatataaattcaggtccactaacggcttaccgttcaaaaagaacgatgtaattaaatatggtccgaacaaatttcgccgcagcgaaagactggaaccgttgctgaatgccatcatgaacacaggtgctttcacttatattgtcaaatctcctgagaacccggcgatttatattacctggctcatgaacgatggtcgctatatgccattttatgatgataaacagccgccttcgcctcagaaccctgcttag

SEQ ID NO: 34658 - DNA, 213 bp, Escherichia coli
atgaccatatcaacagtaaaagtactacgtttacccgcagttgtcagcaaactggggatcgcccggtccaccatctacgactggcttaatgccaaatcaccgcgccacgatccggcgttcccgaagccttatccgctgggcaaacagtctgttggctggcttgagtccgagctggatgaatggatattgcagcgcaaacaggcactactctga

SEQ ID NO: 34659 - DNA, 372 bp, Escherichia coli
atgaaaccaaacgatatcgaactgctgtttaaagaaatgcgtggggtctatgaaaatcaactaaatggtcttaaggcaatgagaccgtctatcaaaatgttggaacagtacaacagtgaagctcagcagtggttagataacctgagggcacgttttgaaaatgagaaagacctttgtcttagtgaatgtgaaagcttaataagagaagatggagatgatatttggcgtagagcagcatggcacggagagtttgataaatatctttatttatcattgtgttattatcattttgctatatttaagcaatttaaccatcgattgagcgaagcatgtctgcatctccagaatgcacagtattattgcgggatatag

SEQ ID NO: 34660 - DNA, 204 bp, Escherichia coli
atgcctaaaaatgggtggattgatccaactgaagcctttgattgtattgacgatgaattgtggttctttattgaggaacaaacaaaaaaaggtgaagaaccagtactgatttatgatgaattagagcgcacagtgcttaggtggttagcagaggatgaaaatgtgaaagccgcttttgaagaagtgattattggcaaacagtga

SEQ ID NO: 34661 - DNA, 3783 bp, Escherichia coli
gtgggtaggaagtcacgtgaaaagcgggaaagaaaactaacagagcaaaaggttgattatgattctttgctacacgatatgtccagatatcgtgaattgtttacgaatggggtaggtgaagacacatacttttgtaagcatctggaagccacccagaatttatttcgccgatacaaaaccctcgacgtagcagttgcattatttacttccgaactctggccagccaatacaggtagccccataaagcatatttttgcttggtgtgtccttttagagctgccatttgagtctcaggtaggtatatcgattgatagctatatagattttaaagtatttacaaaagaattatacgcatcatggcctgaattcccaatgcttgaggatttttcccccgaggctgattgggggcaaatcaaagtacggcttggtcaagacttcgtccctatgttctacgggagttgcattgagagaatgtctgacttcgtagaagcatttcgcattacctatgcgcatattccagaagcacaagcccatatggatcttgccattgcgctgcaagcgcagatcatcgaatcgattcctgagttgatgctctctgtcaacaccgaggcccaatgtgctgatgttgaactagctactgaagacttctggttgacttgcaagtctttgcttcaacaacttggcaatgagctagcgaaccgccggaagaaagcagggtgtacgttcgatactcttgttggcaccttcaaagcaccgctgaaaccggatgcgttcggaaatgcagtgatgcaaggcatggcgctacccttccttgctgtcgagatggatgggttatggataccaatgtcagtacgcagtgctccgggtctcattattgaccattgggctaacaaaaatctgaacgggattagcccctctacacacaggaaacttgcagagttcgtcgctgagcgattccaaagaacccttatggggcctttgactctatatgttgacggcaccgcctgcaaagacctgcctatcagttgtattataccgggtaattctgggatatatctcatttgcacatgtgaccacacatcgaatgaccgtctgtcaaacgcagcggaaagcatatacgccaaggtgagttgtggatcgccgattttcttccgtcttgatgatggacgtttcctttctctatctagagatggtgcagaacctggcgtcgacgagcttcacatcgttgttgtcgttacactcgcgggtactgcgtttaattccatcaatctcccctcaaagccaactcgtttgtttccattagcggatttcatcacgatttttgatagtctcaaagatctggaggaattagaaagttattggaaatttgctgatgctcaagaggggacgctcagcccattttcctgtggaacagtagacttgtttgcatcattcaaagacatgcatggtgtacttgtcgaaggtgcgattgcacctaacttcattgggctagaccctcactggggtacttcttggcgcttcaagatattgacagaattctggtctcgcgcacccaaggtatttccagacagctctatcggatgggcgttgagttcttcaactgaaggtgtcgttcgacttgaatcgcgtcatcacaaagcgatggcatactcaacatcgattggttcctgtaccgttcaaacattaatagaaatacccaaagaattacgctttgaagatggacgtttgataggcctttttgcccaacttctggccgactgtagctatcgctgcagaaaaatgatgtctgatatctctctatttaggcagccgcatgttttgttttcctgctcccctgatccatctagtctggttaaagctgaagagagtccttcttctttagacgaatttaaacacgtggtgacttcagtcatcccggattcccacaaccccgatgtatttcacgttcaagttgatacacgtgcagtgcttgccgggttaaatctttccaaggatggatcattcgaggttcgttgcttactggaaacgcttgaaaaatgtcatgcagtacttggtttgcagatgcctgatgaatttgctcaacgatttactcatatagcgtcgcaagcggctcgttatcatttaaaagtcatgacccgtaatattgatgtccccgactatgtataccctataattccttcgcctaccgattacaagcttgcacgtagaagactggccgcagaaatcatggggcttgggtttattcctggcaggtatgaactgtcagatgccaaggccaggattgatccttccagtgctcgcatgcgtcttcacattgagaatcgacttgcagcatttgataggcatcagcttctgcaggcattcatcgagcaacacgatgccctccttgttactgagaggactagaatccaacgagcccggttgagtcttgctcatgaagttgagtacgacagacttgatgcgattgaacaggcacgcaaagaattcggagatatggctcggcattatcgatatctgttggaaaagaccgtcagtttatcttcaaacggtgtagatgacgttacagaggatgtactacgggagttagtaggtttggttgattggttcatggtgctgactggtgccagtgatacccttcacaatggcatagatgtggggggagttgaaatcgacgactcgtatattccagaagttttctattcggcaggttttgatgatcgtgaggcggtttttgcaagggagtacgcaaaatccagactgggactcggtgcaaatgacaaggatgcggtagaaggtgaatcggtagatttactgtcgtcagagaaactcaaagaggcttttataaccgatctgggcttcgaactgcagaacatgctcactgctctcgctgttttatcgcaagctcaacgatatgggtttggcgacgaactttcactgtcttatgttgctgcaccggatcgcctcgcgcaagtattgtctgacagtatcgatagacttgactattctgaggcccaaaaaatcgttgcttttctgactctttcggaaacaggtgttcgcaggcttgctggacgggatatcgatgagggagatatcccatactgggagcgtaacaagcgaatcgaccgatacacaattaagccactggtaattgatggtaccgacctgcgttggggggccgaatcagcaagccgggcaatgtatatttggatgtcggcggtacgagacggttatttgccagcagaatttgattggcctcatgttaagcccgtcattcgcgatgttaaggaaagcattgaaaagcgcctcgagcttcgtacagaggagatttttcgcagacatacaccatatgttctgcgaggtatcgatttctttagaagattccgtggagagaaatttgatgacgttggcggcttcgatgtcttcgtatactggccggaagataatttgcttgtgacggtagagtgcaagtacaaccagccgccatatacaatgaaagatagccgtcgtcttcgtgatcggatatttggcaaggcagagaatgacagggcaggacaattcagtcgtattttagaccgcagaaaatttctcgaaactcaccgttcaaggttgcttgaactgctccagtggccacagcatgagagtgtacctttaaggaatattgaactctatgtaagccgcgatgtgtactactggatggttcatccgccatatcctgttccgacccagtttgtacgtgtagacactttggacacttggatcaaaaccgaactaaacatcccttga

SEQ ID NO: 34662 - DNA, 4428 bp, Escherichia coli
atgagtgaagatattaagaaaaccgccatcactgcagctggttatatttatcaaaatcgtcagggccttaaggtcctgtgcgattggcttgatgcaccgacgcgctatagccgcgtgaaatttgaatgtgataatgaaaacgaagcaccacagggactagatgatatcgtcatcgaacgaagtgatggctttgttgaccttcaacagatcaagttcactccagattctgacacgcatcttctatcttgggattggatgctagagaaaacgggcaaaacggaacggtctagatcgatgctacgtaaatggttcgatgctttcaaacagctcgatccagcacgtattggcgaaatctcgctaataactaaccgtcgacctgatgcagcgattgaagcttgtctggggctagataggattcatttttccaagatccctgagcctcagcgctccagagttgaaactgaactcggtagcattgaggaatgcgaagcgtttttcaaccaattacgcattcgacacagcgataagggctatcttgcattggagcatgaagttgatgctcgccttcgactgcatggtacgccagagggaatcgctaatctaaaatatgtggcactgaattgggcgacgcaaaaaaatctccctgcgccggatggctggatcaaactggcagaggttggaactatcttgcgagcttcacctccagctcctttgccagaggattttgttgttccagaaggttatgaggttcctgatgagatattccatcaagaatttgtccagagcacaattaatgctaccgggaaggcaattgtgctgactggtccaccaggacgcggaaagagtacttacctgagcgcactgtgcgacacgcttgcagaaaaaggtatcccaacggttcgccatcactattttctgtcgacaaccgagcgaggccgcgaccgggttaatagctacgttgtcgagcaatccattctggcacagatccaacagtttcacgaggatgttccgaagactggtggaggcttacatacacaattggaggcatgtgctgcccactacaaagtactgggaaagccatttgtgctcattcttgatggtttggatcatgtctggcgtatcaacgctgaggataaacggccactagatgaccttttctgtcaggtaattccctgcccggaaaatatggtgctgctcgtcggcactcaaccggtaaatgatgaacagttgccagcggatttgctcgcctttgcaccaaaatctgagtggcacacattgcctgcaatgtctgagagtgcagtactttcttatctacgtagaacagttcaggaaggctggcttacaactggttttgaaagtgaaggacaaattgaagaacaactgcagagtgcagcatctgctcttcgtaagaaaactaatggccatcctcttcacgttatttatgcaacttcagaattgaaacattcgggccgcagactatctagttgggatattgagcagttgaagggagacttgagccaagacgcccgattttactatgcatctctatgggaacgtctcgctccaagccaaaaggatgcgctaaggcttatctgtgcctttacttttttctggcctaagacagccttctcagagattgctaccaaaattaaggcggtggaaccagatgtggataaagtagagcacttgctccattcgtctgtggctggtcttaaagtcttccatgaaagtttggctgttttcgtacgtgcaactgatggctttgagagtcgaatcaatgaattaatgcctgttattgcagactggcttgaacaccaggcacctacttcactacgagtgaactggttatggacagtccaagcgaagcttggtaaccccaacaatcttattacaggtttaactcgtgactggatcatgagtcgcttaaaagaaggatattcagaagctttatttgagatattattgtcagaagccttgagcgctgcgcttgaaactgcaaatttttcagatgcctaccggttagcgcatctgaaagctcgtatggttgatggtagtcaatttcagatgcaggatagcgatctagctaggctcatatcttttacactgacactaacctcagaggaaagtgtgatacgagagtctatagcctccaggcatgaaacggatattttacacgttgctgcacttggtctggccttactgtctcgaggggatattattcaggcagaaatttgcggtgaagaagcctttcatcggttcagagccctatgccaattttccaataaatataattcaagggctggttctgatgaactcacgttttttgccagtgcatttacacagcttggcgttatcgctgatacatctgaaaatctcgcttggttagtcgagaaaaatagcccggacatatggttacctcgcgttcaaatgctgattcaaaaaggtaatttggatgatttaatgttgctcgcagcttctctacccgacggacagaaaaagaacataattagcgatgcttgtatacgtgcggctgcgactgcaggagtggtagtgaccgagcgagaggacttcgacgaacttgtcagaactccatttgtggctgcaatagaggccgcgttaatcaaaacctcaactcctttgagccaaccaatcccggtgaattggataagcgacagctattacaaacaaaaagataatttggcgactctcacgcatcactggctatttggcgccgtacatctgaatctttgtatgattgcagaagggcaaacaaacttcgagcacatcaaagcccctgtgtacgaagatagagaagatattactgattatctcaatgtactgtccggaattggtgcacaaatagcccaacgatggtggcgtggggaattcattaacttccatgagctgtatgaattactcgagcctgttgaatcgcgacgatttagacaaagttattttagaaaatcggcaacagaggactttcaagcggcactacaccgtattgcttgcgatatacatattggtagtgttctgctttcgggaactagtgctgcgacactttccccagcgaccattgatgttgcgttgcaatgcgcttggttcgatagtgcgtcattccgcactcagtacgcatctggttcattgatcagaatggccgacgaagcggctatcacatttattggcgctcaacgtttgttacttgatgcagacattcaaaatgagactagtgtacatcttcaaataccattacaactctgtgcgatagcgatcttccatcgactgtattcggaggctcgtgagctttgcacgcagacgtgggaattgaccactggatacggacatcgtaaagacccgacactgagtaatacggttgatgccatcgcttatttggttgatgtagtgccgaatgaagcttgtcgattactggctaaaattgctccgcagatacatcatgttttggattacaccgatggtaagggtacgagacatgttcttgctgaagcagatcggctactggcaaagctgaagccttccgcattggtaataaaatttgaagagcatatatgtgtgggtgactgggctttggctgagggcagcatgcaggcctacatcaaacaaggaatcatcgaagagtggcctctggatgctctaatgcgcacaggccttcatcccgaaattcgggatgcactgcaacaacttgtagaggatggttgtgcagctgcttccgagcggcttcgcattcttgataagcacaatggatgggatattggttgtttactgcgccacgaaaattcaagtagtgatgctgacaacaaaccttatgaaggtgatgtgacggtctttagacctgagcaattagaagacttgctcaaagttctggaaccatattacaaagagcgtccaaaacttctccgtacttggtatcagcactgggaaagccaaaagcaggggcgaaatttactcgtcgaactggataagattctatttacagaaaacaacaaatggatgagggaagctctacaactttctgagtttgcctttcaaacaaaacgtagatcaagtggtttaacagcggcctggaagtatcttgttcatgcacagatccgtaatgggggatggattggttacatggagaacgtggatgtgacttgcaacagactcgacctggttgcccaaaattatccgcagcgctgtgatgaatttgtgaccgtaacaacctacagcatgtttgatgacccggtgtcgtcacgcttagccccatcggaagtcatggtctatttctacgttaagcaaaatcgcatagatgaagctataaaattcacggagacgatggtcaattgtgtgattgaggatactcgaacgttgcccttggaaccaccttgctggatgtcagagctgctcgaacctgtcggcctggaggttaaatga

SEQ ID NO: 34663 - DNA, 1449 bp, Escherichia coli
atgaacgatcttcgcattcttattgcccgtcttggatggcctgctacgtccgcccggtggtggactattcaggaacttgccgctcgactgggagagcctgatacgaaagctgaaaccgaatcattgctgcttcaattgcttcgctcgcgcaaacttgaagctgaggttgtcgaagtattatgtattttctggatggcaattaaagagtttaactactttcctacgactttgttggcagagaatattcttctaccctcaccactctcagcattgttgatgaaagattttgggttatcgattctgctcgtgaatactgatttggaactagctccagaagacttcatcattcccgatgactttgatagtgttcaaggtacggatttgccgagaatcttccatacaaccattagcaagttggaaacttttacccgctgtccgtttattcgacaaatggccttcgaatggacaaaaaaccggacggcatatccaaatgcacagtaccaaggggatgcaggatatttcattcggcccttgggagagggctttgcccctcatttttcctctcgaacagcccttcgcgtaatttccgcttatcttcgcacgttagctgtggctagacacatctggaggataccaatggagttgaccgagcaacactctctcttggcgttgcctatccatccaactttggcttttcttcgacctaatcgtcccgaatggctctcagtatcgactgaattcaaaagtgatagtaaggcgatcgaggcttcattgcgaactttctttgctcaagtagaggcggcaaacccaggagacgagctaattgcatttagctcgcccatttcaatgtcaatggaacagtgcgtagagttgtcgattgttcggtggtcacaaactgtaagtagtgataaggaaggagcggactcgttgacatcccatcttgaatctttctggacacgtgaacaaatgctttctagccaagctccggatccactcagtacaacaaccttaataactccaccaacttttgaacaactggtgaataaaacttgtatggcttggccattggcgggaacgctcgattttggtcggataggatacctacaacatgatttgtatccatcccggctatttttaccgacgatgccaggcatagaaaattctcttgaagtcatcccgcatgatgggcgtctacaggctaagataaaggaccaggtcgttgcagagctccattattggaatgctggatgggggcctgctaggctgtggcagattcaaggtaattgtgggacagccctcatatcgcgaggcactacatatcgcgagagaaacataacaaataccgggtcattgcactcattttactcttggcaagtacgtagattacatcgtaatggaagttatggcagattcagtgaaaaaattacgagaggggtggtgtttgtttga

SEQ ID NO: 34664 - DNA, 1698 bp, Escherichia coli
atgagccaatttaaattcacagaacttcatgctatttcggaaaagccacagaatgatgatgccgcttggttaatagaggctgaaagttccattaaatttctgaaagaaaatgctcaaaatgatgaagtagtcatctacgcgattggaagtagtgtcctaattcatggcgctctagccctagagaaaagtgttactgcagcagatagatgggcattgcagaatatgcgtatggatgttgagtattgttggaaaattcaaaagtcatggggtggaggtcaaggacatcgtatttatcttgagccacctttagatggggtgttcaaagggggagaagcattaatttatcgtcgtaggtttcatggtgttgaagaaggccgtacacctatcgaattgagtcagaaacttgtgcatagccttgggttatattacttgccagaaagaaatgcatattgtcgtctcgatgatcggggtgatattgaggatgtaatcaggataattaacaaaaacatttcatctccctttaaatatctggatatagttactattaagcgaaaggacttggatacatttatggctttatccaaaacatgtcttgttttaaagtttgattttacgcgtgtcagatggggtaattttgctggctgggggaatatcaacagatatactaaagatgaaggggatcttttttatcatggtggtattaacgtggaagccagttactgtaatggtgtaatgattattcgccctcaagtaactgtacgcagtctggtaaaagcatggaaggatgaagataatccatctaagaggaaatacgcaacctttaaaatatacgatcgtaaaaatagctgcaacgttgaaacatcttgcgggccagactcaatatctaactattttcaagaaaataaattaccatgggaagtttcacctgccttttttagagcagaagtgttacatcgtttcaaggcggatccagaaaaatatactttagaagaaagaagtattgcttgtcgaaatgcttggtatttaaaatcctatgatattaatgaggccgggcaagttcatgtatacattggtgatttggctcggttaccatatgaagagcagctttattggcaagccttcaatgaatggccaaaaggaacaatttctaagcgtgcatttcagactgatattgttggggaatggtatctgtcctatgaaccattgttggcactcaaacacaaaatttcgctaatggacaagaatcctcccatctggtggaagccacggggtacagtattgagtgacgctgttcagtatcctgcaacggattcaatcaaagagtggggtgatgaaatccttgcgcttgatcagtatttagttgagggctttttaccaaagccactgagtgaaattgctaaatatgagggccgaaccattgaacccaaatggggatccttacgcatactacaagaagctcttattgctaaaagcgcaacagtagatgaagcgaaaatgttagttcagcctatgcaaaaactgcatactctacgaaccgaagtacgcggacatgcttctacagaaaaaaagaagaaggcgatattagaagcgcgtaccaatcatgaaaatctacgtgcacacttcactaaccttgtggggcaatgtgaagcatcatttaatgatattttaaggatttttgattttaaaatagatgattag

SEQ ID NO: 34665 - DNA, 813 bp, Escherichia coli
atgaaacagaacgataccgaaacaaggatggccacagcaaaaattattgatcatctgagctttggagttacacttatagctagtcctgagagagtcaaacaagaattatgtaatgctacgtattcgattttgggaactaaggacagcattccaattgatcaattagtatggaccaaactaagctatattttcggcgattaccatccatacaatacttctttcgatgcagctgaagaactgatcattcagaaatctttttttgaccatatgtgggatatttcactcgttgaaatgatgaaccatatcaaccatgaaagctgggaacaatttgattggcagaaaaccgcagaaatgcttaacttggctaataaagagcataccaatgagcttagaagctatcaacacgcatatcgtattgagttcgacggagtgttaagccttttcaacgaacaattaatccagatattcaaagaggcttacaaggccggatataacaatgatgaaattaataataagaaaaaatcaaaaaatgaaaaatttaaacaatttgcacaattagtccgtactttacatattggtgcctcttgtcatgctgcagtaagatgggatcagaaacgccagctcaatggtaatgatcttttagattttcatcatgccgaagcagctttaggatattgtgatttatttttgactgaaaaacctttaaaagttctagtgagtcaagaacatttgggattaagagaattattctcatgctctgttgagtcatcagctagtgaagggctcaagatacttaacatgtgtaaaatataa

SEQ ID NO: 34666 - DNA, 516 bp, Escherichia coli
atgaatagagtattgaaaacactcgttattggattgccacttataggtgttttttacggaatatactttggatattttcctaatgcaccagatatgcaccggaaggaagatataatcggaacgtgggcaacaaatggttcgtattcatataatgaacaaggaattatagtaagtacaaaggtaaaaacatcatatttttcaaacggaaaatacaatgttagtggcgaaatgtcttatagctccgataaaatcaataatactaatttgtttgtatcttatagagtaaagaaatcaaccccgaacaaaattatttataatggcgaagaagtcgatcttcagaacctatcgcttgtggaaaaattcacaaacaagagattccctgctgttgaagatatgatggctgatggtgcaagccaatcgtatcaaatcataattgataatcataactataaaaaacttgacgttataaatccctttggaaataattttaacatggaaatgtttagagagaagtag

SEQ ID NO: 34667 - DNA, 219 bp, Escherichia coli
atgtctcaatacaagatagaagaaaaaatcgaatacgatccagatggaaatgtcatatcaaggctatggaatgtctaccatgaagacgggcgactcgcggaagggggactgttatcgaaggaagtggcacagcaaacggcgaatattttgaaagaaagagaaaatttaagaaaaattgaaataccaccgtcaagcaggaatgagaaaaaccttaaataa

SEQ ID NO: 34668 - DNA, 429 bp, Escherichia coli
atgattaatacggtttaccttagtctgaagaaagtatttaacaatgaggtatcagtagaacgcttttttgagaaaggtttttcatatttgcattataagcatatagcagcattatcagcactggcttttgttgaagacaagataaacgctaacaagttaaatacatacagcgatattattgtaaaattggatcttgatgattttgcgtttgctgtcgtatgcctttatgagatgtacgaggataacgatattccattcccacttcagagaaagaaagaagtaatgttatcaatattgcagtctctggttgataatgataacgctgatttggatgaatatcgaagaagaacagaacacgttctgtctggtgcttataaacttgaccaatactggaagcaagaaactccattatatggaaggaagcattaa

SEQ ID NO: 34669 - DNA, 825 bp, Escherichia coli
atgaaaacagatcttgcttatcgctatgcaaatgctgagtcgttttttaaaatgatcgaaagtcaggagttgtggtttactgatttgcggaatatgaatgattgggatgaatattctgccggatttaggattgcccatgatttgataatgagtgaatttccagattatgccagcgtgttagagaatatctcacgcgagaaaatgcacgactatttcatgatgctaatctgctctttttcacatgatggcgactgtctgagcatgtggcgcggttatggggataacggaagaggcgctgcggtcggctacagtacaatcgacatacagaatggtcatttggcgcaaaggtatctaaaaaaacaatctcctattcaaggaaaggttatgttccagcccattatttattcggaagaagaatataaaacactgataaggtattacataaaaaaatttttcaccattcctgacaaccttccacaaagtgaaaaggaaaccttcctaaatgttcggtctcgtatgtttggacatcttcttataaggttgtttacctgttataaaaatgattttttcaaagatgaaagagaggttcgagggtttattgaaataagtgataccgtagatccatacgatattaataaacgcaatactgattttggtgaggcatcatatcataagataagttcttccttttgtggtgagccatcaatcagagaggttgttctaggaccgctctatgaaaagtcagatgaggatgttcgctcaaaactggatgctgtagggttaatggacgtaaaaatcagacgttccaggggcacttatcgatag

SEQ ID NO: 34670 - DNA, 609 bp, Escherichia coli
atgagcgttatccaaacactacgagaactctctgagatatggcagttatttggtgatatgcctgacgacacaacattaagtgtagatttagctgctctctatctcggtatcagtgttaaatcattagcgagatacaggcagaatggcggcggaccacactacattcaataccagtcagaagacagtaaggcccggaatcaacgggtaaattatctcttaagagatctccgttcctggcgagatagtcacagggtaagtagcacaatgcacgccgcccaggttcgagggttagcctttacctctctttccgatttttgtgaacctcaacctttttggtgcatcactaacggtagtggctctgcaagtaaaatcatatcccatgcattgacccttcctgatgatgatttcaagctacttctgtctgagcctgatgcagaagtcgtttggatctctgtagaagaagctctttttgttgattggactaatgtggatgaaaggaaggaatggaatgatttgttcaatgaggttttaacctacttaataaaaagctcaaatgtggctctggaaaagcaacatattgaaacagctcttaaatcaaaaggaatgtaa

SEQ ID NO: 34671 - DNA, 330 bp, Escherichia coli
atggctgaacacgatattacgccagaagtcaccctttccaaaacacagcgtcgccttaaagtcggctatgtaggcatttcccacaccaaccgtaagaccaaagcccccaccagatattcgcgcagcccaagcctgcaccttaagggcaactggctgaaagaggccggatttgataccggaacgggcgtcactgtgaagatctcggagggatgcctgaccatcattgctgacagtgacgaggtgcagaaactgcgggaggaactttatcaggttaaacagtcagttaaggggatgcggaacgggatgtttagtgtgctgaacgagagttaa

SEQ ID NO: 34672 - DNA, 585 bp, Escherichia coli
atggccactcaaccatctgataataaaaaattagtgtttgctgtagtgaacagtgattttaatgatatagaaagaactatccataatggattgaactggccgagtgagccaataagtaatcgaaaacttattgaggaaatacacttgactattcaacgtggtgggtccttgccgtccgagggggttttctattatccgtgtataaatgacagcaaattaatttttttgtctaatttatctgatggatgggactctttactttattgcatgtcaaaacagaataaatctagctatctactgtttaggttattgatgggggaataccctctgatggaaatgagttttattgagtcagggaaaacaatacgtttaattagagtgataaaagaaaataaatggattttttatgaggtcggggaaccgttatggtttgaagaaaaggaaaactattcaaaaagaagaatcgcagatagaattacttatgatctcttactctcctattcacggaaaaatggcattgactttgattcccccgcattttttaaaacggaaaaagaatcactatggttgaatgaaatacgatag

SEQ ID NO: 34673 - DNA, 345 bp, Escherichia coli
atgggcctgactccatgtgcaaatggggggaatgccaaaaaacatggtggcacaggacataataattttattgataatcttattgcggatgctcgcagtcagggtgctacaaatatcaggaaaaaccaatggcaggtagatgttaatggaaatgttgttggtaaaaatagaccggatgttcaatttgatttaaatggtaaacattataatattgaggtcgatacaacaataaaaggcagcgttggtcaccaaaatactatacctatacttgatcccaactcaagaaatacattttggctaattgatgacttagggaatattttaaatggccactcaaccatctga

SEQ ID NO: 34674 - DNA, 174 bp, Escherichia coli; identical to SEQ ID NO: 8961

SEQ ID NO: 34675 - DNA, 450 bp, Escherichia coli
atgtctttttctgaatatgaagatttttttgaaaaatggcgttttgaggagtgctctgaactaatgcaagctgttcagtgcggagatataatattctttaataaagaacagagtaaaattctttggtctatgtttgtctcaccaagtgtgaaacatctgatgagaatggatatgaaagtgttctcgaatatagaatattgcgatgtcgatttcgacagaaaggaatcggctgatgatttattctatagatttaatgaattatctgactgtcctcaatctgtttttttattctttggtgagaaacatctatgtataactccatattctcttttgcagaaatactggaattattattttttaccatcagatgagacaactataattatcacacctcaaaataagtattttcttttctcttatgaggaacgtttttttattgtaaccagataa

SEQ ID NO: 34676 - DNA, 186 bp, Escherichia coli
atgcaaagacaaggtgctcctagcgatccctataatgagatgggggaaccttacaagaaaggatatgaagttcatccaaatgaatcacatacgcagaatgcgcctgaaaatgacacaccccatgtcaaatggaaagattgggaatcgggaaaatctagcggaggaagaggtcatgtctttttctga

SEQ ID NO: 34677 - DNA, 579 bp, Escherichia coli
gtgggagcacagagcgggaagaatgctgttgagaataactcactcagtgctggctggaacaatatcctgccatcaggaacacaggattacggacaggccgtagcctcgtggaatcagtatgctcaggacaataatctgacaccggagcaggttcaagaagggatgaatcgtatagctattggtgaagggccttcttgggggacaacatataaagtacacccggtagttcaggctggcggtgatgttagctttatccggggttatactttaagcggaactatagatgacaatcatatttcagttaatcaaggggatatttatagtataggtgctcatggcggagcctcgatcggattatcctttggcccgtatttcccgggattaataaattcaaatgataacgattattcgataaatggtggttttggcgttggtgcagtggggctttctacgggtaaagatggtgttagtttcacttttggttttggcccaagttggggttggagtgcaactgaaattaaaggcgttgacgttaatggcacttcaacaagtgaggtttatcgatatgattttaaataa

SEQ ID NO: 34678 - DNA, 447 bp, Escherichia coli
atgcgcttccagggaaaaataattgctgaagcatgcagtcttgccctgtcagacaggcagatgactgtggatatggggcaactcagcagcaatcgatttcacgccgccggtgagtatggggactctgtgggctttgatattcaccttcagggctgcagcactgtcgtcagtcagcgggtggggatttccttttatggcgtgtcagatattcacgagccggagttgctgtcggtggatgaggagaatgatgcctcagacggaatcgctatcgctttatttaatgaaagcggagagctggtaaaacttaatcagcctccggagaactgggtgcatcttacccgcggagatatgaaactgcatatgcaggcgaggtataaggccacacattatcccgtcaccgggggaaaggcaaatggacaggtatggttttctctgacctatctgtaa

SEQ ID NO: 34679 - DNA, 618 bp, Escherichia coli
atgaaagattttctgaaaagtttatatgaagattacaatggaaagtattcagaactgatagatcagatgaatagagaaaggactacttgtagatgggggtatggtgttatgcctgccttctctatagaaccgtatgcatccgagcttttaggttataagcctgggcgaatgttgaaaaataactcaaccccaggagtaaacaaacaatgctattatgttgatgaacaaaataggataatagaggaaataacatacgccagccatcgtaagaaagataacgaatggattgtgtataggaatttttatatttaccgtgaaaataccattcttggacttttgtatagtagtgcatttgaaaatagtaaaaacaccgggttgaataagattatattcataaatattgaaaataaactaataaagaataagtataccttcatgtatgatggagagtatagtgaggtggattatatttataataatgataaaataataaaaatataccaaagagtatggtcttcattttattttgagcgaacctatctgatagaatcaaatgatccattgattattaatgaatacttaggaaatagtagaggcatcaggatctaccctacttaa

SEQ ID NO: 34680 - DNA, 150 bp, Escherichia coli
atgatccgaaaactcgatggacaaaagttggtgaagggaaaaagtctgtttggcatagattccaaagtagtgcggcagatggttctggtgcttttcattggaatggttctacagatggtgttgatattaaaggcagaccgagggcaatag

SEQ ID NO: 34681 - DNA, 348 bp, Escherichia coli
ttgaaaattcatccagtaaggtttcgctacactttcgggacgttattagccagaagtggggggaacttaagcacaattgctttcgcaatggatcattcgtctgataccagtgcaggttattatattaaaaacttatctgataacgtcaatgttatagacaaagcagtagaacgttatctaacaaatctatcagatgtatttcttggtaaaagaggataccagggagatttattacaaaaagccctcacaatggacataaaaaaagaaaataaaaacaatagaaactgtgatggttgccaacattttaaagtatggaataggagggggaatgacagtcttaatatttaa

SEQ ID NO: 34682 - DNA, 1818 bp, Escherichia coli
atgacagtcttaatatttaaaccagctaatgatgagcaggagaaaaatttagaacaattcatatcatttagtaaacagcaatttaaccatcaaaaaagaatgcatacatgggatgacaatatttggtataagttgggcacattcaccaaactaaaaaccaaacattgggaagatggtaattcaatgaatttggagtttgttgactttgcgaagtcttacattatttatcaaagaggtctaacaaggaagaagcaatttcaacgagagatggttgttttgaaatgcatcgaagaatcactaatcaaattaaagggaagtgcatgtataactaattgcgatactatggtttttgatttggctttaaatgtaatgaaaaaaagtttttcagaatactctgtatacaaactatcaaaagtattagaaaggttttctatattcttggttgaaaagaaattagtcagaaagttttttataggatgggtgtctcctttaaaattaaaacaggtcgaaagttataaaccgctttctgaagtaattggagaaaatggtaaattatcaaatttatctgccattgaagcattagcaagtatttttgcaaaagaagattcgaaactaagtgaaaaggatcagtatgtaagttctgtattcgctcttttgatgtgtgctccgagtagaatttcagagatccttgctttaccggccgattgtgaaatcgtagaacacgataaagatggtgcagagcattatgggcttcgcttttattcagcaaaaggatatggagcagatattaaatggataccttcgataatggttcccgtagctcaaaaagcagtggcaagactcaggagactatcagcgaacgcaagagccatcgcgttatggcatgaaaacaaatcatcagtttttagactgcctacttgtccagatgtagatgaagaacaacctctaacaagtgctcaggtttataaagctttaggctatgatgttaatttaaaatggaaacatggttataaagccaaaatagaatctttgttattaaatgataaaaaaacattcttgggtaaaaagtactcctatacactgaaaactctattccaaacaattcataattctccgccgccagatttcccatattacgatagggaaaaagggattaaatattccaatgctctatgtattgttaatggttatcaacttaatgaagatgcacaaactaatctgtggcaaattcacaaatattcagctaatagcctcatattggaaattggacacaaaaagataggaggaccaaatatatttgaaagacatggtttttttgatagagatggcaaaccattgattgtatatagccatcaggcaaggcatttacttaatacgttcgcatatcttggcgggatgaatgattttgatatcgcaagatggtctgggcgtaataggattacaagcaatagagattacaatcatgtttcagaagagcacatgaagagttatgccatcgacataagcgaacagaagcaaagtaccattgagcctttcttaggaactgatagtgggatctctgactcgaaccttgatcctaacgtgcatggtgctgtacttgctacagaacatgggtattgccaacatcactacgccatcaaaccatgttccaggttccctggattagatggcataacaggtagcagtagcgtcgagttgtccgagcttgtagacaagctggcattcaagactgaacaagacaagaacgatggcgtttatggtgccgagcaatggttagaactacatcttaaatataaagaaagactcaataaaaaatag

SEQ ID NO: 34683 - DNA, 426 bp, Escherichia coli
gtgctctgccgtcagccacccgcagcggtcatacgcaaagcgcaccgtgtccgcctgcatgtggtgcagccgttccccttctgtcgtcggggtgagcgtcacttccgttatctggtcaagacggttgtagctgaaggtccgtgtactgtgctgcgtgtcactgcgcagcaggcggcccagcgcgtcacgctcctgccgctcattacgcaccccgccttctgtaccctgtgtctggatgatgaccgggaacccgcccgcattcagcacaaacatccgtatcagaccgtccgggcgctgttctcccgtcagccgtccgtccgcatcgtggctgaaccggtactgcgccccgttgccgttgctcaggctggcgacaataactttacggattcatttctaattctgtatcagaaatatgtagcccgataa

SEQ ID NO: 34684 - DNA, 180 bp, Escherichia coli
atgaaaactaacttttcagttatacctaaaaaaatagtaacaaatgttttttatgatattgatgttgttagttttcagggtaaggggacttttttttcagatagattaatagatgcggtgcaagatgttggaattatcgggctacatatttctgatacagaattagaaatgaatccgtaa

SEQ ID NO: 34685 - DNA, 501 bp, Escherichia coli
atgaagtataaaaaagtaagtgtctcttttgaccctgaaattaccggcaatagtaaaggaggatattctgtagagataaaggataaaacatcctttaataatcagatagagaaagaatatttttacgatttttttgaaaataatgatgaaaactataatagagtgttcattgattcttttaaggaaatagataccagtaaattaactggaataactttttatccaaaaacaaaaaagataaaagaaatagatttaatgatattttgtccacacaagctggggttgaactttataatgtcaaagaagatgtttgacattatggtgagttttaatcttccactaatgaataagatccctgtgcaagttaactcatttaacacggagtatttattggtcggttttcccatgatacctcaagacaaaattgacttaagcgaatctctttttttgatacaaaaggaaagggtttatttaattttaaatcaaatgatgagtacatga

SEQ ID NO: 34686 - DNA, 1059 bp, Escherichia coli
atgtacgaccatgaccattattattacgacaaagcgggcaacctgctgacggacgagtatcagggagcggtgatggacaaccgcctgccgggctacgggcgtgaccgttaccgttataacgaatggggcgaactgacagagcgcagggaccagcaactggagtggaacgcgcagggccagttaacgcgggtcatcagcagcaacagcgagacgcggtaccggtacgatgcgctgggcaggcgcatcagcaaggcgaccagcaatctcgataccgaccggggagaacgaagccggacaacgtttgtgtgggaagggttccggctgttgcaggagacaacgtggcagggaaagcggacatatctgtacgacgcggaacagccgtacacgccggtggcggtcatcacggggcgcggagaaagccagaaaatctggtattaccacacggacctgacgggcacggtacaggaggtgaccgcggcggacgggacgctggtgtgggcgggctatcaggcgggatttggcgaaaaccggggcgacatcagcaacagcggggcgtactttgagcaggggctgcggctgccggggcagtattatgatgaagagacggggctgcactataatctgttcagatattatgcgccggagtgcggaaggtttatcagtcaggatccgatttcgatccgtggcgggctgaatctttaccggtatgcgccaaatccgctgagctggattgatccattgggattagatttgcatcatataattcctcaagagatctggaaagaatttaaatctgatttgaaaaaagtttctggatatgtacaaaatgttacgaaaaaagcagcagatatgacgaatttaattgatttagacaagccttttcatggtaatcatccagcatatagtcaatatgtaagagaggcagttgaagacctaaaagctagaaagaatctgactcttgatgggttaaggaaattgcaagaagaattaaaaggaaaaattagtgatgcgaaagcatctgggaaaaaccttaacgattattttaaatcggagtgctag

SEQ ID NO: 34687 - DNA, 1185 bp, Escherichia coli
  misc_feature (1131)..(1141): n is a, c, g, or t
atgaaggggatgcagaatataaaacgaggtaaatgctttgctggcgtaatgctttatgcattacgatccgcttctcatcacaaagttgctccagttgttataggtggcaatatgatggggagcttcgctaaagagctaatagctgagtttgatgctacaaaaacgcttcgctcagatgttgcaaaaccagtgtggcacaattcgcttcgtttgccgaagaacgagacattgactgatgctcagtggtctggaatagcagatgactatatgaaacgcatggggttctctgaaacgcatctacgtgcatacgtgcttcatgatgataaagatggccaacatatccatatagtagcaagccgcattgatgcaacatctgggaagctctacttaggtaaaaatgagaaccttaacagcacccgtatcatccaggatcttgaaaaagactaccagctaacgcaaaccaaaggaactgatgcaccaaaaccctcttcatcaccagtaaaacgcaaaaaaactcgtaatgaagcaatgcaggagaaaagaactggtgagctatgccctaaaacaatcattcaagaagctatagatacactgctcataagtcagatttcagaacacgagtttgtgcagcagcttgcagctctgaaggtaaaagcaattcccaacagggcttcaaccggaaaaatgaacggtttttcctttgagtacgccaaaatttcattcaaggcatcccaattaggtaaaaagtattcatggaagaacttagaaccatttattgttatgagttctcttcctgataaaaatgagtcttgtgttttgaatgacattagagaaaattttaatgaagccaaagaaacaggaaaaattgatttatctttagaagaacatcaaacagtaattaaatcttgcttacccctgttaaacccaacagatattttattacccttaccagagaaagcagtgtctgaaaataataatgtttatacaggaaaagttaagcccaatagcaagagttatatcgacataacaatgaggtggttagaaaccattccctttatagatttgatagccaacaccttcaaaaagctaaacaattcattgttaaaagtttacaaaaagcccttcaggatnnnnnnnnnnngccacgttcctttctttagaaccaccatctcttttatctgttga

SEQ ID NO: 34688 - DNA, 372 bp, Escherichia coli
atgctgcccgtctggcagggtaatgtcggtgggattgcccagcgcgtcgcgctgatattttatactgccgtgcacgctgtgctctgccgtcagccacccgctgcggtcatacgcaaagcgcaccgtgtccgcctgcatgtggtgcagccgttacccttcttccgtgggagtgagcgtcacttccgttatctggtcaagacggttgtagctgaaggtccgtgtactgtgctgcgtgtcactgcgcaacaggcgacccagcgcgtcacgctcctgtcgctcattacgcaccccgccttctgtatcctgcgtctggatgatgaccggaaacccgcccgcattcagcaccaaatggctgagagaagcgggatttga

SEQ ID NO: 34689 - DNA, 444 bp, Escherichia coli
atgaatgaagaattgttagcaagagtcagagatgagataacatctgaccaagatatggtcctatatggtataccagcttctgatgaggagatcattcaggctgaaaaagtattaaatatcaaatttaatatacaatatattgagtttattaagaaatttggtggagcctttggtggcatagctatacatgcctttaaaaatggttccttagtaggaaaggctactgtagttgatcttactctgaagtttagggaaatatataaagatcttgataaaaatatattgaatttattttatgttatttcagatgatggcggcggaaaccctattattatgaatacagatggtaagatatttgtttttctgcatgattcttatgaaatggaatttttatattcttctttggaagaattactgatgaagtcattccccttgaagcattaa

SEQ ID NO: 34690 - DNA, 636 bp, Escherichia coli
gtgtgggcgggctaccaggcgggatttggagaaaaccggggcgacatcagcaacagcggggcgtactttgagcagccgctgcgactgccggggcagtattatgatgaagagacggggctgcactataatctgttcagatattatgcgccggagtgcgggaggtttatcagtcaggacccgatagggctgcttggtggattaaacttataccagtatgcgcccaatccaataagttggatcgatcctctgggtttaacagttacttttactgatagcagaggattaactttagatgtatcaggttacacggatttaagtcacttaagtgattccgagcttaatagaattatttttatgaacagtaatgatgctcctcatccatttggtttatctccgcgcgataggcaagggaatgtaatagtattgcaccatgagaggcagcaatcacaagggccaattactgctatgccagacaaacatcatagttcaagtacaaataacaccggtcagcacccaaatggaaataaaaaaggttcaggtataaataatcgtcaagaatttaacctgtggaaaaaagaattctggaaatcacaagctgaaaaagttttaagcaatagagggggcggttgcgtatga

SEQ ID NO: 34691 - DNA, 738 bp, Escherichia coli
atggccgaggatcgcctggatgtgccgtgtgtctgcgccattgtccagcatctgcgtcgccatcgagtgccggaagatatggcacgcgcccggtttgtcgatccgcgccgtttcccggatcgcggtgcctgccagccacgtcagcgtatttcgtttcaggccgctgccgtatttcgtcacgaacagatgaccgctgtcccgctggcgcgtcatctgtggccgcacgtctttcagataccgcgccagccacgccagcgccacatggcccaccggcaccacccgatccttacgccccttaccctggcgcacgttcatcacgccacgcccggcgtccacgtcccacagcatcaggttagccagctccatccgcctgatcccggtactccacagcacctcaaggatcgtccggttacgcaggccaacgggagtgctcacatccagactctgcaacacctgccgcgtctcgtcctcactgaacacctgcgccggaagccgtttgtccggctttggcagttccagcagatcggcggggttgtacaggatcacatgccgcttcagcagccagcggtaaaagatttttatcgcgctgctccggcccacctgaccactgaccgccagcggatggccgtccgccttacggtagccgtgaaggtggcgctgataactttcaagctgtggctggctgacctgcggcgcgtacatcagcccgcgctcctcgcaccacgtcacgaacggtaa

SEQ ID NO: 34692 - DNA, 648 bp, Escherichia coli
gtggagcatcgcgggcaggtggtagagtacatcgaggtgacgcgggaggatatcgcgctggccaactatctggcacatgaaatactcgggcgcacgctggatgagatgccgccgcagaccagaaagctgttgctgctgatccagacaatggtcggtgaactggcagcggcgcagcactgcaaacccggcgaggtacgcttcacgcgccgggagatccgcgacttcacacagtggagcgacaaccagttgaaggtccactgcatgcgccttgcggaaatggaatacctgttgatccacggcggcagccggggtcacctgctacaatacgagttgctgtgggacggcagcggcgacggctcgcacctgtgcggcctgatcgaaccggaggataatcaggtgcatgactccggcaagttggggcatgatgcaggcaagttgcccttaagttgcccccatgttggggctaagttgggggcggtgaaatcccccacagaccgcgccatttctggcctgaacgccccgcaagttggggcagcacaaaaaccactgttccatcctctgttcttatccctgtcgtaccctaatctcaatcaggacaaccatcatgaccagacctatccctccggggccggaggagctttatcttag

SEQ ID NO: 34693 - DNA, 177 bp, Escherichia coli
atgctggttatgcagacggtctgtaaacagcttcaggttattccccgcataaatcagcgcactgttcagcagggtaccggccacattcattgtcagactgcctgccgtgccggtaaaaccactgatggtgatatcactccggctgttcagactcacatcgccaccggcctgaagtga

SEQ ID NO: 34694 - DNA, 372 bp, Escherichia coli
atggccgcaccaataagcaacgaagaacaggtatttattgccgaacttggcagacggataaccgcactgaggaaggacgccgggatgacgcagacgcaggtcgcacaagcgctgaacgtctcccagcaggccgtacaggcatgggaagccggacggcggcggatacagatctccatactcccagccgtggcaagactgttagcggtttctctggaggatttgctcggcgaagaaccggagaagatcgcccgtaagcgtggcccagcaccaaaatggcagcagcttattgaagagatcgacagcctgccgaaggcaaagcagaagatgatttcggagatgttaagtgccctgattgtgcaggcgcgtaactga

SEQ ID NO: 34695 - DNA, 219 bp, Escherichia coli
atggtcatggtcgtacatctgacccgtgcggctggtcagccagccgctccggtcatagctgaacaccaggcaaccgcgcagtttgtcattgatgccgccgacttcaccgtctgcgttccagaggtaatcccgcgccgtcacgctgtcgttctgcgccgggggtttaccggcctgcttcggattctggctgccgcctggcaggctgcgctgccagcttaa

SEQ ID NO: 34696 - DNA, 393 bp, Escherichia coli
atggttcttgataatgatacaggtccaagcgatttacttaattttctgcgcaataaagttaaaagctgcccagacgatgtaactgaaatgagaaagatgaaatatattcatgttttctataatttatatatagttctcacaccattgagtccttccggcgaacaaacttcaatggaggatcttttccctaaagatattttagatatcaagattgatggtaagaaattcaacaaaaataatgatggagactcaaaaacggaatatgggaagcatattttttccatgagggttgttagagataaaaagcggaaaatagattttaaggcattttgttgtatttttgatgctataaaagatataaaggaacattataaattaatgttaaatagctaa

SEQ ID NO: 34697 - DNA, 828 bp, Escherichia coli
atggcttcattcgcatatgaaaataaaaaattgaaaaaactcttcactttattagataagagagacatgtttttgaatgagttgcatcaacatgtttttttaaaaggcgatgcgattaccccttgtatcttccttggggatcatacaggcgatagatttagtactatttttggtgataaatatatccttactttgctaaattctatgcgaaatatggagggtaataaagatagtcgtataaataaaaatgtcgtcgttctggctggaaatcatgaaatcaattttaatggtaactatagtgcccgactagcaaatcataaactctcttccggtgatacatataacttaattaaaacgctcgatgtttgtaattatgactcagaaacgaaagttttaaccagtcatcacggaataataagaaatgaagaaaatgaatgttattgtctaggtgctttgcaggttccatttaatcagatgaaagacccaattgatcctgaggaattagcaaatatatttaataaaaaacataaacaacacatggatgatcgtcttatccatctaattagaagcaatgctatagcatccacacctgtatatgacaattattttaataacactactgctttcagaccaaaacctgaagatatcttcaaatgtgggcagacgctcaaaaaaagtaaacagaaatatggccattatggattaggggtagatcagcatcaaaaaattgataattatatcatggggctaaattcctggaagatagcacctaacgaacgtggtgataaaaaaggtgtcccagggtttagttgttttcaaccacattaa

SEQ ID NO: 34698 - DNA, 372 bp, Escherichia coli
atgataaaacatcttaccttaccgaaaaaaatggctgcaatggtacttcttgcaggcgctgccctcagcattgcgcctgtacaggcagcctcctacccaaccaaacagatcgagttagtcgttccctacgctgccggaggcggtacggatctggttgcccgtgcctttgctgatgccgccaaaaaccatttacccgtcagcatcggggttatcaataaacctggcggaggcggtgctatcggcctgagtgaaatcgccgctgcccgccctggcggttacaaaattggtttaggcacagttgaactgacccccttcccagcctcggaatggtgcgttttaaaaccagcgactttaaacccattgcccgtctga

SEQ ID NO: 34699 - DNA, 939 bp, Escherichia coli
atgtctgaattaaaaatttcccctgaattattacaaatttccccggaagtgcaggacgctttaaaaaacaaaaaaccggttgtggcgctggaatcgaccattatttctcacgggatgccgttcccacaaaatgcccagaccgcaattgaagttgaagaaactattcgtgaacagggcgctgtacctgccactatcgccattattggcggcgtgatgaaagtgggtttaagcaaagaagaaattgaattgctgggtcgcgaagggcataacgtgaccaaagttagtcgtcgcgatttaccttttgtcgttgccgccggaaaaaatggcgcaaccactgtggcttcaacgatgattattgcggcgcttgccggaattaaagtatttgccaccgggggaattggtggtgtgcatcgcggggcggaacataccttcgatatttctgccgatttgcaagaactggcaaatactaatgtcaccgttgtttgtgccggtgcaaaatctattctcgatttaggattaacaacagaatatttagaaaccttcggtgtgccgttaattggctatcagacaaaagcgctgcctgcgtttttctgccgtaccagcccgtttgacgtcagcattcgccttgatagtgccacggaaatcgctcgtgcaatggcagtgaaatggcaaaccggtttgaacggcggcctggtagtggcgaatccgatcccggagcagtttgcgatgccggaggaatctatcaatgcagccatagatcaagccgtcgccgaagccgaagagcagggcgttattggtaaagaaagtacaccgttcctgctggcgcgtgttgctgaactgactggcggtgacagcctgaaatccaacatccaactggtgttcaacaacgccattctggcgagcgaaattgccaaagaataccagcgtctcgcgggttaa

SEQ ID NO: 34700 - DNA, 990 bp, Escherichia coli; identical to SEQ ID NO: 6828

SEQ ID NO: 34701 - DNA, 1275 bp, Escherichia coli
atggccattaatgtgctttcccccaaacagatagaaaacgccaagccgaagaccaatgattacaaacttaccgatggagggagtttgtatctactggtacgaaagactggtggaaaatactggcgtatgaattatcgttttgatggaaaacaagtgacattggcattaggggtctacccagatgtctcacttgcaacagcgcggaaacggcgtgatgaagccaggcaactactagccgatggtcgtgatcctcgcgaagcaaagaaacccaaaaaggaagacccaatttcccccacgttcgagagtgttgccagagagtggcatagtggaacgatggggcatcctgagtggaaagagatcacccgtaaaaaaattctccgagaaatggaaaaccacctctttcctgccatcggttcaaagcctatcgatacgctcaaaacccgtgacttgatgccgatgctggttgagatgactgagaaaggaattggtgccacaacgagccgtgtaaaaaccactatgacgagcatcttccgttatgccgtgcaacgtggaattgtcgattacaaccctgcccacgatctaaaaggtgcaattacggcccccaaagtacgacatcgccccgcactacctctcgaacgtttacctgaactgttagcgaaaacgagaagttacacgggaagaccattgactcgcctagcagttctcttttccctgcacacttttgtgcgatccagcgaactacgacatgccagatgggaggagatcgacattgaaaatgggctatggacgataccaggacaacgtgaagagatcgcaggggttaaattctcagatcggggtgcaaagatgggggctgctcattatgtcccgctatctagtcaggctatcggggtactggaggatataaggaaaatcagtggtgaatatctgctggtttttcccggtgacagcaacccatataaaccgatgagcgaaaacacagttaataaagcactgcgaacgatgggttacgacactcaaactgatgtttgcttgcatgggttcagggcgatggcctgctctgcactgaccgaatcaggactctggtcacgcgatgcagttgaacggcagatgagtcaccaagaaagaaacgaagtgcgggcagcatatgtgcatcttgcgcagcacatgcaggaacgccgcagaatgatgcaatggtggtctaattatctggaactaaataaggacgaattccatgctccttatgacttatcaggtattaacattatcaattaa

SEQ ID NO: 34702 - DNA, 882 bp, Escherichia coli
atgcagcattcaacagagaatgaaactatattcttaggaaatctatggattgacaaaaaaataccaccattagaatattgttcatttgaacgcgcttcaagactattagaatgcgagattgatgatttattacatctatacgaaataggcgcttttaatatcgcattcaaggcggatggacttgcagttagatttaatgttaatttcctcaataaaaatcagaaaatggaaattgacttaattcatcccgtattaactaatcaatcactagagatggaattttcaacaatatggtatgaccttaaagatgattcctttgaacattttgaaaatgggcttcaaattataggatttgcctgtggtatttggtacgccgatgatatgataagtgacataaaaaatggattagctatagatccagattatgaattcaggcttaaaccggtaaaaatacgagataatgttttgatggcaacggcctcatatgaaggaaataaggtcattgagattccatttgaagatcttcttatcatgcgaagagatttagagttaatatggaaatcagtaaaaactggaattcctatgccaagtttacttacgaaaagaatttcatctgaacctaaaatccccaagcgatcaaataacactgctgagcatcatgcaaaaaatagggaggggttattaaatgcagccatatatatattagcaaaatacccaagcgaatgtcgtggtgaaagaaaagagataagtcctgaaaagtggactaacgccataattaaacatttaggagagctacctccaatatttatcactaatgaacaagaaatcttaagaaaattacgattagcggttaatcatgcgggattaaaacaaaaggggtag

SEQ ID NO: 34703 - DNA, 207 bp, Escherichia coli
atgacgcgacaggaagaacttgccgctgcccgtgcggcactgcatgacctgatgacaggaaaacgggtggcaacggtacagaaagacggacggagagtggagtttacggccacttccgtgtctgacctgaaaaaatatattgcagagctggaagtgcagaccggcatgacacagcgacgcaggggacctgcaggattttatgtatga

SEQ ID NO: 34704 - DNA, 546 bp, Escherichia coli
atggaagtcaacaaaaagcagctggctgacattttcggtgcgagtatccgtaccattcagaactggcaggaacagggaatgcccgttctgcgaggcggtggcaagggtaatgaggtgctttatgactctgccgccgttataaaatggtatgccgaaagggatgctgaaattgagaacgaaaagctgcgccgggaggttgaagaactgctgcaggccagcgagacagatctccagccagggactattgagtacgaacgccaccgacttacgtgtgcgcaggccgacgcacaggaactgaagaatgccagagactccgctgaagtggtggaaaccgcattctgtactttcgtgttgtcgcggatcgcaggtgaaattgccagtattctcgacgggatccccctgtcggtgcagcggcgttttccggaactggaaaaccgacatgttgatttcctgaaacgggatatcatcaaagccatgaacaaagcagccgcgctggatgaactgataccggggttgctgagtgaatatatcgaacagtcaggttaa

SEQ ID NO: 34705 - DNA, 147 bp, Escherichia coli; identical to SEQ ID NO: 23041

SEQ ID NO: 34706 - DNA, 192 bp, Escherichia coli
atgaatatcaacacggaaacccgcgaaattctgcgtaattacagggccgtgattaatgcgcggcgtcgtgacatggggcagaaaccgctcaccaccgcgcagattgttgatgaaatctgcgattttgtggcgaatcagcaggcggttttcctcggcggtcactatatccttcagggcagcagaaacaggtga

SEQ ID NO: 34707 - DNA, 327 bp, Escherichia coli; identical to SEQ ID NO: 5814

SEQ ID NO: 34708 - DNA, 780 bp, Escherichia coli
gtgccaattgtcggtgttcccggttggattgggtcttcggctgtcagtgtgacaggccagagatggatgagtgcggctcgaacggcggtgcaactgccagcggctggttcaatgtctcaaatggccgggcgatctaaagaagttcagtacagcatcggtgcgaatcataactacaacaaagacacactgatcaactatttaaaatcccagggggcgacgccagtcgttgttaccattacaggggatctggtgtcgtccagtagcggcgtgccatgtttagatttcccgagttcacttaccaactcttatatcagccttgtaatcaacgcaggtgtgactgtctatggacgcggtggcaatggtggtagtaacgctgccggtgctgctggtggtaacgcaattaataatggcatcggtacacgcttgcgtattacgaataatggtgcaatcgctggaggtggtggcggtggcggcggtaacaggggtaaactaatatttggtggtggcggtggttgcccattcggtgctggtgggtcttcctctcatatgagttccggtgcaactgctggtactatttccgctcctggtaaaggatctgttggtgaggggtctcttagtgcatatacaggcggttcgggtggtaatgtcggtgctgctggaggaagatgtaatactcaaggtaacggtacagaatataacggcggagcagctggtaaagctgttactggtaatgctccaacttggactaaagttggggcaatttacggcgctcatgtgtaa

SEQ ID NO: 34709 - DNA, 477 bp, Escherichia coli
atggagaggttgaaacagataaaacacgaagaaaacacaacatgtatagcgaacaagacaggtatgtataagtggggagggaaggaggggtgtcgcctcctttttcgtatttattcaactcctgattttatcccccgtaacacccctacggtcagccttcggtccatacagggaaaaggctgcatcccgctacagaaacggctgggttgccttcggggaacggctggaggttttcagggaaacggtcgagttgcctgtgtggatttcgggaaaaggctcgatgccggttcaggaacggcggcgtaccggtatagcgatagggagagttgcggctacccacctgtaatgtgcgggaagaagagaggcgctcacgtaggcggacttgcttaccgctggattcccgctggattcccgctgaatgcccagctacagcgtaattgtgccagacagccaacgggtcacaatcgatttcagtag

SEQ ID NO: 34710 - DNA, 303 bp, Escherichia coli; identical to SEQ ID NO: 8114

SEQ ID NO: 34711 - DNA, 645 bp, Escherichia coli; identical to SEQ ID NO: 20607

SEQ ID NO: 34712 - DNA, 924 bp, Escherichia coli
atgcacgggcagacccacgttaacaaaatctacgacccggcagcaggctccggttcgctgttgttgcaggcgaaaaaacagtttgatgaccatatcatcgaagaaggtttttttggtcaggaaatcaaccatacgacctataacctggcgcgtatgaacatgtttttgcacaacatcaactacgacaagtttgatatcaagctgggtaatacactgactgagccgcacttcagagatgaaaaaccgtttgatgccatcgtttctaacccgccgtattcggtgaaatggattggcagcgatgacccgacgctgattaacgatgaacgttttgccccggctggcgttctggcccccaaatccaaagctgactttgcgtttgtattacatgcgctgaactatctttcggccaaaggtcgcgctgcgattgtctgcttcccaggcattttttaccgtggcggcgcggagcagaaaatccgtcagtatctggtcgacaataactatgtcgaaaccgtgatttcactggcaccgaatctgttctttggcaccactattgccgtcaatattctggtgctgtctaaacataaaacggataccaaagttcagtttattgatgccagcgaactgttcaaaaaagagactaacaacaacattctgaccgatgctcatatcgaacagattatgcaggtatttgccagcaaggaagatgttgctcatctggcgaaatctgttgcgtttgagactgttgtcgcgaatgactataacctgtcggtgagcagctatgtggaagcgaaagatactcgcgaaattatcgatatcgctgagctgaatgctgagctgaaaaccacggtcagcaaaatcgaccagttgcgtaaagatattgatgcgattgttgctgagattgaaggtagcgaggtacaggcatga

SEQ ID NO: 34713 - DNA, 1248 bp, Escherichia coli
atgagcgagctgagttatctggaaaaactgctggatggggctgaggttgagtgggtagcattaaataaattagcaacttttttaaaagggaagtctttacctaaagaaaaaataactccagatggcaatagatattgtattcattacggtgagcttttcactcattatggtcccataattgacaaagtatgctcaaaaacaaaccaagcaatcaatgagtcaattctatctgaaaaaaatgatgttctaatgccaacgtcagacgttacaccaagaggtttggctacagctagttgcattcaagaaagtggcgttattttaggcggcgatattttgattattagatgctctggtgttgatggtagatatctaagtaatttcataataaataacaaaaaaaagatattgcaaatggttaaaggttctactgtttatcatttgtatgctaaagatataggtaaattacttatccccatcccttgccccaacaacccggaaaagtcgctggctatccagtctgaaatcgtcaggattctggataaatttactgcacttaccgctgagcttaccgctgagcttagcatgcgtaaaaaacaatacaactactatcgcgaccagttgttgagttttaaagagggtgaggttgagtggaaagctttgggggaaattggtgaagttcgtatgtgtaaacgaatcctaaaatcacaaacatcttctgagggagagattccattttataaaattgggacatttggtaaggaacccgattcctatatatctagaaaactatttaatgaatttaaagaaaaatatagttatcctaaagttggcgaagtattgatttctgccagtgggaccatcggcaggactgttatatttgatggtagggaatcatatttccaggatagcaatattgtctggattgaaaataatgaaaaaatagttttaaataaatatttattctatttctataaaatagcaaaatggggaatatctgaaggtggaactattaaaagactttataatgataacttaagaaaacttatgataccagtaccatttcctgattctcctgaaagatcgctagttgaacaacaaaaaatagtgaaattactggataaatttgatgctttgaccaattccatcaccgaaggtcttccgcgtgaaatcgagttgcgccagaaacaatacgagtactatcgtgatttactgttcagttttcccaaacctgaaactatcagtaactaa

SEQ ID NO: 34714 - DNA, 924 bp, Escherichia coli
atgcgcaagttaacacatgaagaacaagttgcagctatcgcgaaagttaatcctgatgttgaagtgttaggggaaattgttaataacagtacaaaagtattatgtcgctgcaaagtttgtaaccatgaatggtcggctacacctagcaatattaaatatggacgtggttgccagaaatgcgctgggaatatgaagttatcgcatgaagaacaaatatcggctattgctaaggttaatcctgatattgaagtgcttggggaaattaccggcgacaaaataaaagtattatgccgctgcaaggtttgtgatcatgagtggtattctacacctaaaagccttaagatcgggagcggttgccagaaatgtgcggtgctaaaacgagcgcaaggcaaaaaaatatcgcatgaagaacaaatatcggctattgctaaggttaatcctgatattgaagtgctggttgaaatagttaataacagtacaaaagtattatgccgctgcaaggtttgtgatcatgagtggtcggctaaacctagagacattaagagcgggcgcggttgcccgaaatgcgctaaatacgggtttttatcacactacaacggaaaactttacatcatggttgatgatcttgaagtgcctacacaaatgaaaattggtgtaagcgtaaaagagaacgaaaggaggaacagagtatttaaaagtgctcgtaaggcaggtgtaaggctgactgatttacaggtagttaaaacatggaatgggcctactgagattatgcaggaaatagaaagcaaaatgcacgatgctttcagtgactataaaataaacttccctgttaagtttgatggtagcactgaatttttttattacaggccggaagtattcgacatggtagaagaaacatataaagagattgtttgctgtcaataa

SEQ ID NO: 34715 - DNA, 897 bp, Escherichia coli
atgaataattggcatgatatatttgaatacgacaacggttttttatattggaagggaaagaaaggaaagtgtaacgctggtgatttggctggttgcatccataaaaatagtggttattgggttgttcgtgttaacgataaattacataaagtacatagaattatatgggaaatgcataacggaccaattccgaaaggatgcgagatagatcatatttggcacaacagaaatgataacaggatagaaaatttacgccttgttactcataagcaaaacggaagaaatcaggcaaaaccaaaaaataataaaagtgggcagcctggggttcataaactttctaacggatactatagagcggaaatatgtgttaatggtaaaaatgtgtatcttggtcagtttgataattttgaagatgcagtggatgtcagaaaaaaaggagaaaaaaaatattgtttccatgaaaacaatggtgtaagcaaggagattttgatgcgtgaatttgaattcacgttaccctgggcaccatcggttaattcttattacggcaacaataaaaggggtagtaagtatgtaacaaacaaaggcaaggatttccaaaaaaaagtcaaagaaataatagaatcactaaaacttgatcttaatattgattttaatgtttccgtttatatatatgtagcgccacctacactacgcccacacgatattgataattgcttaaaagcaatattcgatagtcttacttacgctcatttttgggttgatgataggcaggtttttagtcttaaggttgtaaagtgccataaaataaaaaacggccagatattcgtaaaagtgaaagaacattcaggggtgttacctgatattaacgaatatattcagaattattgggaggtgtga

SEQ ID NO: 34716 - DNA, 366 bp, Escherichia coli
atgcaaataatcattgattatctttgccatgctgcaaatacgctttttggtttttatcaacaaccattcctgaaagaatgggatgaaatgctaaatgacatcctcgacaaaggattaataatggaggttgacaagtttacaatcaaatttaattatgagggtgaaatttatctaatttgggtcgggaatagatggtattcatacggtcatatttattcaattggcgataaatacattaaaaggggtcaagaattccgaccacgcttccgcacaatgcgccgcctgcataacctgcatataaatatatttgaagatcaggaagcgcgggagctatccaaaatttacgggggtaaacaatggagttaa

SEQ ID NO: 34717 - DNA, 147 bp, Escherichia coli
atggtgagcaatgaagaactaaaaatggctgatgaaatcagaaaggcacttgacgcggcagaaaacaatgaaaccgtctacttttccgaacgggaagtagaaaagatgatggatgaatttaaattaaaatttgaaaaagataattga

SEQ ID NO: 34718 - DNA, 405 bp, Escherichia coli
atgtttaatgagttaattaactgtaaagcacacggtccatatcatcgtttattcaaagagaaagctttaaatacattagtaaattattgtgttagcaatgaacagattaatatggttaagttaatcgacttggcttcaggtcaaactccaaataatgaggaagcataccaaagacaaccattgatggtgacattatataacccagaggatttaccactacctgaattaatgtttagggaggttccgatagaatccgatgataaagaagatatgacaccaacgatcgcatatgaacatataacttgtcagggttatagcataataattccatattattacttggtgaaagaagatatgttggtgccatgtccaaaatgcaagaaagatatggctagtgacaaatag

SEQ ID NO: 34719 - DNA, 1515 bp, Escherichia coli
atgaatattagtgaattcatggaatcttatgtaaaccatccagtagtgtttgttggtgcagggtttagccggagatacctggtaggcacttactcatggtcagaacttctaaaaaagattgtttacgaaatgaaagggagtcatgacttttattttgactccgcaggcaggaacgctaattctttaggtgaaattgatctaccaaaagtagctagcgaaattgaaacagagttcaatagattattagaagctgataggaacggtaagtttaaaagaataaatgacaaatactacgagtatgctgcttcaggaaactactctgccagtcgcatgaaaatatttatatctgaacttgtagatctacatcaaataaatgatgatgataagtatgcaacagaaatggaattatttgcaaaagcaagtcgaaatataggctcagttattacaacgaattatgatagattcattgagacattgattgggtttaatccaatcattgggaatgatattctgctaagtaacccttacggatctgtatataaaatacacggttgtgtttcacatcctgaatctattgtgatttcagattccgattatgaaagatttaaaatcaataatcacttaattagagcccagctcatttctttattcattcacaatcctattatatttatcggctatagcataagcgatgagaatatcagagagattctgaaaactattttttcttatattcctaaagattccgatttagccgataaggttagaaagaattttctgcttattgaacgagacgcagacaacaactcccttgaagtgcttgaacatgatgtggttatcgaaaatattggtaatattaaaatcaacaagattaaaaccgataattttcaagggattttcgaggggttaataaaccttaaacttccagtatcatctatggatattagaaaggttgaaggagtaatgagaaaaataaaagaaggcggtactgttaaagtgaaaatagttggtgatttagataacttagctaatgacgaactagtcatggctgttggatctgtgcagaaaataacttaccattatcaatcagcatccgaaatggttatgaattattttgaaatcatggactccaaaaatgatgcgctaatcatgctattaaataaaataaaagtaacccgaacacagtattttacagcgcatggattttccacaatatgtaatgaaatacaaaatattgagcaacttaaaaagaatcaggaaacaaatcttaccacctattttaattctattgatgaatctgaaagaattaactgcgacacagtggatgaaatcatttccctcggattcaaaccgtacaaactcgttcgagttattttttacaacacatatgtaaacaatattgaccttgataatatcgaaggatatttgagggaaggagttacccttgaaatatcatcctcagattataaaagacttgttagcttatatgattttaaacggtactcgtcacaataa

SEQ ID NO: 34720 - DNA, 462 bp, Escherichia coli
atgaagttgagctataagctagttatcgctgctttcttcgttactattattggttctttcatctggtcagcgaatcattaccacaatcaagccattgaatacaaaaagcagcgcgacgaaaacgctatggcattacattcggctatggcgacgatctctgatatgcagaagcgtcaacgtgatgtagctgaacttgacgccagatacacaaaggagcttgctgatgctaacacgactctcgaaagtctccgtactgatgtctctgctggtcgtaagcgcttgcaattcgccgccacctgtgcaaagtcaacgaccggagccagcggcatgggctatggagaaagtccaagacttacagctgatgctgaactcaattattaccgcctccgaagtgggatcgacaagataactgcacaggttaactacttgcaggagtacatcaagacacagtgccagaaatga

SEQ ID NO: 34721 - DNA, 864 bp, Escherichia coli
atggaaagaggtgtggtatttagtgcatgcgaattacttaaaaccgaggatggaaaaggcatccgtacaggtaaatggattagtcaattagaaataaactatctatgtctttattgggataaactagtttcacccactaataatattatacatacagcattaaataacgaggatgaattagaaaaatgtggattgctaaccagaccggtatatagacatcatggttgttttgatggtcaatatatggcggatttttatgctgaaactcatgccaaaacaatagatatacttaggcatgcggattcttctgtcgattggcgcatgcattttttaagtgaccaaataaacttggtgcctgaattatctagaacctcagaagtgatacgttttgagctagcaaatttattacccgttcccacagaagatgtgcacctacatgatattcttgatttcaaggaaagaagaaaacctgaattaatcgctttacatgaatatcttgatgagctttacttggaaataaaacgttctggtgatatcaatcttcagaaagcaaaagctctttctaatcttaaacaagcaataaaggatatcgaacgcttaaattgtgaagtgtggaaaagtccaataaaatttagcatctctacttcctttgagttcgatttttcacaaatatttagtctggcgggaactgttttatctatgtcagtagattatccttataatgttattggaggggtaagtagtttggcttgttttttgggaggatgcataaaaataaagccgcaatttcaacaagtgttatcattaggtaatgataaattagtttacataagcaaaggaaaatcggagggtattatttcctga

SEQ ID NO: 34722 - DNA, 5286 bp, Escherichia coli; identical to SEQ ID NO: 30979

SEQ ID NO: 34723 - DNA, 486 bp, Escherichia coli
atgctttcaaatgtaattttaagtggagctatgtccacgttattggctgcatttctaatttttgtgtttaaggagtatataaaaaggccacctaatttttcaggggtgtttgagatcgagtgtaaaacgctaaaatcatcatataattcatatgtaaacctaactacattctatacattagtgttgatttgtgataataacactatagaaggacatattgaaaaaataaaagatatcgaaaatgatgggaatgaaagaaaatatattggcgtgcatcgcaatattggcgatgtcaatggtgtaattaaaagaaattacttaagacctaaccatgcttcgttgaatataaaaatgcatggtgataagagggattatactattatgctatattttaagaaggtgaatacgaaaaatatgaaaggaacttttttatctactgctgcagattcttctggagatgttaagtggcagcgaaaaaatttttaa

SEQ ID NO: 34724 - DNA, 435 bp, Escherichia coli
gtggcagcgaaaaaatttttaatttatttactgtcgttgccatatttaataatggcttcgattatcataaagcttaaagttaaaagtataattgatgattatgagaaatgtactacttatatttactgtaactcgaagaaatataataacatttctcctgttatgattgatatattaaggttagcagaggatcatcgacaattattgcatagagggattgaccccattgcaatcattagaactttttatctgaggatatttaaaaatatacaccaaggagcgagcactatagaacagcagtttgtgagaactataactaaaagatacgaaaaaacaatacgtagaaagataagagagcagatattggctatattgattagaaatgtatctgtctcttatacacatctgacgctgccgacgaatagagaggtgtag

SEQ ID NO: 34725 - DNA, 2370 bp, Escherichia coli
atggcagtacagatttcaggtgtgctgaaagatggtgcgggaaaaccaatacagaactgcactattcaactgaaggcaaagcgtaacagcaccacggtactggtgaacacggtggcctctgaaaatccggatgaagccgggcgttacagcatggatgttgagtatggccagtacagcgttatcctgcttgttgaaggttttccgccttcacatgccggaaccattaccgtctatgaaggttccagaccaggtacgctgaatgattttctcggtgccatgacggaagatgatgtcatgccggaagcattgcgtcgttttgaggaaatggtggaagaagcggcacgcaacgccgaagccgcctctcagagcgcagcggcggcaaagaaatccgaaactgcagcggcatcatcgaagaacgcggcgaaaacctcagaaacgaatgcagctaatagtgcacaggcggcagcgacctcaaagactgcatcggcaaactccgcgacagcagccaaaaaatcagaaaccaacgcgaaaaacagcgagacagccgcaaagacgagcgaaaccaacgcaaagtccagccagacggcagcgaaaaccagcgaaacgaatgccaaagccagtgaaactgcggcaaaaaacagccaggttgcagcagcccaaagcgagagcgcggcagccggttctgcgacttcagcagctggatcagcaactgctgcggctaacagccagaaagctgcgaagacgagtgaaactaacgcaaagtccagccagacggcagcgaagaccagcgaaacgaatgccaaagccagcgaaactgcggcgaaaaacagccaggatgcagcagcccaaagcgagagtgccgcagctggttctgcaagtgcggcggcttcttctgccactgcatcagccaacagtcaaaaagcagcaaaaaccagtgaaaccaacacaaaggcgagcgagactgcggcgactaactcggcgaaagcatccgctgcaagccagatggctgcaaaagcaagtgaagacgcagccagggagtacgcaagccaggcagctgagccgtataaacaagttttgcagccgttgcctgatgtgtggataccgtttaatgactcgatggatatgattacaggatttggcccgggatataaaaaaataacagtgcgcgatgatgtggtcactataccatccgacaaaattgtcccgttttcccgcgcgagttccgcgacctatatcaataagtccggcgctcttaccattgcagaaattaatgagccacgttttgaaaaagaagggctgttaattgaagggcagagaacaaattacttcacaaactcaaacgctccggaattgtggaataaaaatccaggcctgaagataagcgagacaaaaaccgattccaggggttttaaatatgcaacgtttaccccagaaaaatatttagatagttctggctcatatggaattatatcaggggcagcagcaaataagatagcggtagtcaaaaatgatgcagttacaatatcctttagagcaaaaggggataatgtaagatttgcggctagatttgataaaggggattcgccagttgctgtagctgccatttttattgatagcgccacactagatacattcacgtctggagcagatgcgtctaatattgctgtgaaaaatgttgttcgtgacggtgagtgggttgctgtagaggctgtttataaagtaacagacgactctacatatattaacggcgccattctgatgtcaaacaaactgggtgctaattttgataagactagttttatggatgtaaccacccctcaaatagagctaggttcttgcttatcatcatttattgtcacaccaggtgttcctgcgacaagggcgagtgatatggttattttttcaaccagaaataacataagttctgtccctttaagctgtcttgttgaaatacataaaaattgggactctacgccaaatcaggccccacgaattttaaccactattggcgtggcgactaatgatgaacaactggtattggctttcaggacgcctacaagtccggatgtagaacctttaccttatgttcagtttggagtgagatctgcatatcttagtccatctgtgaaggccgggcgcaaaatgattgctggttttgtctgtaatagctcgactgaatttcgttgctgttgtaatggttacctgtcacctgttcagacttcgtcatggaagaataccggagctgcacatgaaatacgtattgggggaacttctgctggaggagaacgtcacttgtttggtcacgttcgtaacctgagaatatggcataaagaattaactgatgcgcaaatgggggagagtattaaatga

SEQ ID NO: 34726 - DNA, 363 bp, Escherichia coli
gtgaatacttaccacatcacactaccctggcctccgagcaataatcgctattaccgccataatcgcgggcgcacgcacgtcagcgcagaggggcaggcataccgcgataacgtcgcccgaatcattaaaaacgcaatgctggatatcggcctggcgatgcctgtgaaaatccgcattgagtgccacatgccggatcgccgtcgccgtgacctggataatctgcaaaaagccgcttttgacgcactcaccaaagcaggtttctggctggatgatgctcaggtcgttgattaccgcgttgtgaagatgcctgttaccaaaggtgggaggctggaactgaccatcaccgaaatggggaatgaatga

SEQ ID NO: 34727 - DNA, 624 bp, Escherichia coli
atgccgttctcacaaaaaaaccgcttgccatgccgcaatcagtcaggttacatttccgttgcatctcataaaacgggtgccgggtttcgcagcctgctgatcaacaaagcgcacaaccgcgccagcggtttttttgtgcgtaccgcattgccgcacattttttcgcatcagaattatggtggggcgtacggggccgacttcggtcgggccgggttttctttgttgaccggtactgcgaacctcgtacgtctcgccacccacagtttcgcagctctggatggtgagtattcaaaacttaccaacaaagaggccacaccatggcaaaccgcaaacaacagcgcacatacgctgcgcgtcgtcacatccagactgaaatcaaccgcagacttttccgcgcattccgcgtcgcgcatatcatgcacatcaatatgctgcatgaacgcagtcacgcactatcgaacagctattccgcctctgttttcagctatctggcagatgatctgcgcgagcttcaaaagctcatccagcagcaaaacaaactccattaattcctgttccgggcctttcctgcaccttgcggcgggaggccttcgcacatctgtaacaagaggattgccgcaatga

SEQ ID NO: 34728 - DNA, 411 bp, Escherichia coli
atgaacgcaaaagaaaaaggcattgtaactgcgctaaaaaatatatcggagaccgcaaacagagccattcagaatgcaacaaatgcaggaatgattgggcctgccaccacggccatgatgataacaagagtaaccgccgaagcagccgaaatcatcgaaaaacaggatgctgaactaacggttctcaaaacacaaccaaccaccagactgaatttatctgacattggacaccttattcatattattggctcggagctacagcaatacatcattatcgccgaattgcaggacaaatacctgattaccccttaccccgtaagagagtcagaagttctgacaaatctccgcctgatagaacgcactcaggccgcattcattgatggcacgcaacgtgccgtatttaacgcatag

SEQ ID NO: 34729 - DNA, 255 bp, Escherichia coli
atggcaacaacgacaaaaaacatggtagagatagcctcggcctacactcttatcatacaccgactcatagataataatgcccgtgatgcattaaatacggtgaaacctttatcggaagcaaaaagcgatactatcagcggattaaagtcactacaggaatgcgcacgctatgcaggtgatcacgccgcatacatggccattaacgatgcaattgagcgcattgaatcaggtaaaccattaagagattttgtttaa

SEQ ID NO: 34730 - DNA, 258 bp, Escherichia coli
gtgcttaaagggaaacgtctgtttgcaatactgcgtcttgctgatggctctcagcccccgtttggtgccagtgtaaccagtgaaaaaggccgggaactgggcatggtggccgacgaaggccttgcctggctgagtggcgtgacgccgggggaaaccctgtcggtaaactgggatggaaaaatacagtgtcaggtaaatgtaccggagacagcaatatctgaccagcagttattgcttccctgtacgcctcagaaataa

SEQ ID NO: 34731 - DNA, 1386 bp, Escherichia coli
atgttgatgatgagtgacatcatcccgatatatctgaaacctacacgaaatgcatatggcattctgggggggatccccagaacggaattctcttctgattcgattaagcagaaaatggctgttacgccaggtgcaacatggccagttcatgccgttatcactaactctacttatgatggtctgttttataataccgactggatcaaagaacatctggatgtaaaatctattcattttgattccgcatgggtgccatataccaatttcagtccgatttattctggcaaaacgggtatgggtggcaagcgtattgaaggaaaagtaatatatgaaacgcagtcaacgcataagctgttagccgctttttcacaggcatccatgattcatgttaaaggtgatattaatgaagaaacctttaatgaagcctatatgatgcaaacctccacctctcctcattacggtattgtcgcctccactgaaatggctgcggctatgatgaaaggcaatcctggcaaatgtcttattcaggaatccatggaacgtgctctggcttttcgtaaggaaatccaggcccgctttgaaaacagtgacacttggttttttaaagtatggcaacctgagaacattaatgaggtagattgctggccattggataaaaacgatcaatggcatggattcaaagatattgatcaagaacatatgtatcttgaccccattaaagtaactttattgacgccgggtcttgataaatacgggaaaattgaagaacaaggtatacccgcagcattagtttcaaaattcctagatgatcgtggtattattgtcgaaaaaacaggtccatataacattttgttcctgttcagcattgggattgatgatactaaggctcttagtcttctgcatggtttgtatgaatttaaggagcggtacgatcgtaatgagctggtcaaagatattctgccagggatctgggccgaatcgccagctttttacaacaatatgagaattcaggagctggcacagggaattcataatctgattcgcaagcataatctgccggagttaatgttccgggctttcgatgtcctgccagaaatggtaatgaaacctcagcaggctttccaggcagaacttcgtggtgaaacggaggaatgtttcattgaagacttggtagggaaaattaatgctaatatgattcttccgtatccaccaggagtacctttagttcttcccggagaaatgattacagagagcaatcgtccggttctggagtttttgttaatgctttgtgaaattggtaaccactatcctggttttgaaaccgatattcatggtctgtatcgaaaggcggataacaggtatactgcaaaagtcattaaaaaataa

SEQ ID NO: 34732 - DNA, 234 bp, Escherichia coli; identical to SEQ ID NO: 13498

SEQ ID NO: 34733 - DNA, 240 bp, Escherichia coli
atgactgtcgctgaaaaaatcctgctgcgatgtacctggcttgacccggcagagaaagaggcccgtcgtttgcatctgcagggcatgacggttccggattatacggtgaaggtgagaaagtggttttgtgtgatgtgtgacgaagattatgaaggagaaaagtgctgcccgcgttgtggtaccggggtatacagcagggagggggggctgcaggaaggcaactggaaggataggaactga

SEQ ID NO: 34734 - DNA, 222 bp, Escherichia coli
gtgaataaagcagagttatttcagaaaatatcggctctcgcgactgaatgtcacgctatagcatctgagcttgatgttggcggtgaacgaaccgagatgttcgaaatatacagtgtgctgcgcaatctctgtcggcgtggctacgctactcaggtagggcgaatgactaacccactactttcattctgtgatgaggatgactcggatgaggatgacgaatga

SEQ ID NO: 34735 - DNA, 825 bp, Escherichia coli; identical to SEQ ID NO: 8349

SEQ ID NO: 34736 - DNA, 303 bp, Escherichia coli
atgcccgatattgatgattcgctaaaaaataaaattcaacaatcaattaatgccttgcataaacatggcatggtttctggcgaccctcatcgtggtaacttcattataaaaaatggtgaggtccgaattattgatctctctggaaaacgtgcttcagcgcagcgtaaagcgaaagatcgcattgacttagagcgtcattacggtattaaaaatgagattaaagatctaggctattatcttttagtatatcgtaaaaaaatgcgcaattttatgcggcgtttgaaagggaaaccagctcgctaa

SEQ ID NO: 34737 - DNA, 216 bp, Escherichia coli
atgaaatccatggacaaaatttcaacgggcattgcctacggcacctccgcaggcagtgctggctactggtttttacagtggcttgatcaggtcagtccgtcacagtgggctgcgattggtgtgctggggagtctggttctgggcttcctgacttatctgacaaatctgtacttcaaaatcagagaagacaagcgtaaggctgcacgtggagagtaa

SEQ ID NO: 34738 - DNA, 216 bp, Escherichia coli
atgagaaaaaccattggcattcaggctttgtttgatttattaaaagcgattgtaagtgacatcaaaaataagaaaggtattatttcatttaatgaaatatgtacttacctacgtaacatagacatacaaaaacttaaagacctgaatgttaattattcaggaattggtcgttcgcaaattagagaccatcttaaaaaacaatgtggtatagtttaa

SEQ ID NO: 34739 - DNA, 795 bp, Escherichia coli
atgggacaaccggtagacataacaggtaaacgttttggaaagttggttgcacttaaatattccggtatttcaaacaaacaagggcgactttgggattgcatctgcgattgcggcaacacctgcctggttagttacgggaagctaaatcacggggcgacaatatcgtgtggctgtgtctacaacgcacatcgccgtagcgtaaagcctcatggtatgagtaaaacgccaatttatcgtatatggctgggtatgcgggaacgatgtgaaaaaccaacccatcacgcctataagtggtatggcggccgaggtatcaaagtctgcgagcggtggcaaatatttgaaaacttttatgctgacatgggagagcgaccagaggggatgtctcttgatcgcaaagatgtgaatggtgactacgaacctgaaaattgcagatgggcgacttttgaagaacaggccaataacacgcgttcaaacttaattttggagcataagggggaaaagctgactctctcacaatgggctaaaagagccgggattcagacatcaactcttcactatcgaatcaagaaagggtggccattagatcgcgcgcttaacgccagcgtcgacacgtatgccaaccgagatagtaagcgtctgatcgagtgtcgcggcagaactcagcgaattaccgaatgggctagagaggttggcttgactgcgaccattatctcgcagcgaattttgagggggtgggatgttgaagctgccatcttcacaccgtccaaacgaccagtaaaaggagataaaaagtga

SEQ ID NO: 34740 - DNA, 144 bp, Escherichia coli
atgttttcatctaaaacactgttaattactggtggtactggctctttcgggaatgctgtattaaatagatttcttgatacagatattgcagaaatccgtatatttagtcgtgatgaaaaaaaacaagatgatatgcggaaataa

SEQ ID NO: 34741 - DNA, 435 bp, Escherichia coli
gtgttcgacggtgagctgagttttgccctgaaactggcgcgtgagatggggcgacccgactggcgtgccatgcttgccgggatgtcatccacggagtatgccgactggcaccgtttttacagtacccattattttcatgatgttctgctggatatgcacttttccgggctgacgtacaccgtgctcagcctgtttttcagcgatccggagatgcatccgctggatttcagtctgctgaaccggcgcgaggctgacgaagagcctgaagatgatgtgctgatgcagaaagcggcagggcttgccggaggcgttcgttttggcccggacgggaatgaagttatccccgtttccccggatgtggcggacatgacggaggatgacgtaatgctgatgacagtatcagaagggatcgcaggaggagtccggtatggctga

SEQ ID NO: 34742 - DNA, 651 bp, Escherichia coli
atgccaaagccagtgaaactgcggcaaaaaacagccaggttgcagcagcccaaagcgagagcgcggcagccggttctgcgacttcagcagctggatcagcaactgctgcggctaacagcgagacagccgcaaagacgagcgaaaccaacgcaaagtccagccagacggcagcgaaaaccagcgaaacgaatgccaaagccagtgaaactgcggcaaaaaacagccaggttgcagcagcccaaagcgagagcgcggcagccggttctgcgacttcagcagctggatcagcaactgctgcggctaacagccagaaagctgcgaagacgagtgaaactaacgcaaagtccagccagacggcagcgaagaccagcgaaacgaatgccaaagccagcgaaactgcggcaaaaaacagtcaggatgcagcggcccaaagcgagagtgccgcagctggttctgcaagtgcggcggctaatagccaaaaagctgcaaaaaccagtgaaactaacgcaaagacgagtgaaacaaaagcagcagccagcgagacagaagcaacgtcagccgcaacaagagcagagaatgcagcccggattgcagaagatgccgctgatcctgcttcagtccctccgcttcctgatatctggctacccttga

SEQ ID NO: 34743 - DNA, 849 bp, Escherichia coli
atgtctgatatcacagcctcccgtccgaaagtggtcaacgggcatacggacgttatctgctccacctcagtcagccacattctggctgtacgaaagagtacactgctgcaaatcgacacacttatccggcaactggctgaaatctcagcaatgacggaaagcattggcggcaaaaccgcccgggactgggccatgaaacaggattttcgctgcggctgctggctgatggataaaacggaaaccgcaatgaaagccatcacccgcaatcttgaccgcgaaatctggcgtgacctgatgcaacgttccgggatgctgtcattaatggatgtgcaggcccgtgatacatggtacagctcactggagtacgataattttccggaaatcagtgaagcgaacattctgagcacatttgaacaactgcaccagaacaaagatgaagtgtttgagcgaggggtgatcaacgtcttcagagggctgaactggaattacaaaaccaattgcccctgtaaatttggcagtaaaattatcgtcaacaatctggtgaggtgggacctgtggggattgcatcttatcaccgggcaacaggcagatcgacttgccgacctggaaagaatgctgcacctgttcagcggcaaaccgatccccgacagccgggaaaatattattattcggctggatgatcacatccgctccgttcagggcaaagcctgctatgaagatgagatgttcagcatcagatactttaagaagggctccgcgcatatcacgttcagaaaaccagaactggttgatcggctaaatgacatcattgcgaagtattatccagaaataatcccatacaatatctaa

SEQ ID NO: 34744 - DNA, 837 bp, Escherichia coli
atgagcactaaaagccctcacattccagaccacgaatcggtaaaacctgaagggctgtttgatcggctgatccagttttctattcataacgcaatctgggtcatgctgtttgttgcagcctggattgctattggtatttatagttatcaaaagttaccgattgatgctgtaccggatattaccaatactcaggtgcagattaacacttcagccaatggctttacggctttggaaatggaacagcggattacctatccaattgagaatgccatgtcaggcatgccgaaaatggaacaaacccgttcgatttcacgctacggcttatcgcaagtgaccatcatttttgaagatggcacggatatttactgggccagacagcttatcaaccagcgcttgcaagaagcaatgggagaaatgcctgaagatgtgcaacctaacatgtcgcctatttcgacaggtttaggtgaaatctatcaatgggtgattaaagccgaaccaaatgctaaaaagccggatggaaccccttattcggcgatggatttacgtgaaattcaggattggattgtaagaccgcaattacagcgcgtaaaaggcgttgcggagatcaacagtatcggtggctttaataaaacctatgtggttgcccctgatctgaaccgattgcaacaattgcaaattcctttgtctgatttacaaactgccttaacagagaataatgaaaaccgtggtgctggctatattgagaaaaatggacaacagctaacggttcgtgttccccactctattgtaaacaagacatttttatcttttatattcaatggcttattttcctgctaa

SEQ ID NO: 34745 - DNA, 195 bp, Escherichia coli
gtggtttttgtcgccactcagcatggacaaaaagttgaattcactccgcagccggtgaaattaggtcaatcgtctggggatagccagtggattgaagtggtaaatgggcttaatcagggacaaaaatatgccgctcaaggcagtttcttactgaaatctgagatggaaaaaggagaggcttcacatgagcactaa

SEQ ID NO: 34746 - DNA, 249 bp, Escherichia coli
atgggagcttacttaggaagtaaagttaaaggcgaagaccctacagtgccaatggtggggaatgcaataggtactgttctgggtaacaaagccggagagaaattcaccaaagaaatgctatcgaagggatactcgccagtaacttctgatgttattggaactgtctctggggggactatgactataggtacagctatcgacttcggcattgaagaatctcagaagaaaggagatagtaatgaaaaataa

SEQ ID NO: 34747 - DNA, 255 bp, Escherichia coli
atgaaaaataaatctcctgacttatggctgttattctatcttttttcaaggtgtatattgctaatatctatacttagcttttctgggattctttttggacaagtggtcagtttctttaaagccggtagtcatatatctttttctaaggatgatatatattttattgttaaaataggttgtggggtgggggggctgcttggtagtggtttgtggttgctagcaaaagtagagttttactttaaaaataaaaaatag

SEQ ID NO: 34748 - DNA, 609 bp, Escherichia coli
atggaaaaggagtacggtacagcggtggcacaggagcttgttactgggttactgtcaggacaggactatataaaacgtaaccctgatactgaagcaatggcaaaggctcaaagcattatgaatacctgggggtatcataaatctaatgcaagtattggtgatgctcctttgttgtttggaggaagcgtactggggttaacagtgaaaggtatggcgactaatgcagcaattggtatcagcgtaaactcagctgctcagcttgctggaaaagatcctttcagttatgtggatgcgataattgcaggggtaacggcagcagcaacaacaggaaaaggaattatagtttcaacccctatcaacatgagcggcgcggcaattggtagtagtattaaaggcgaggatccgacaaattcagttattgggacaggattaggttcagtatttggtggcggtatagggaaagtcatctcggggtcaatgggctctactgtcaaagagggaacatctgatattattggtaatattgggggatcaattactggtgaagctatcgggaatgtaacaaaaggaacactagatgaagttgataaatccattaaaaataaataa

SEQ ID NO: 34749 - DNA, 276 bp, Escherichia coli
atgaagttgataaatccattaaaaataaataagagtgtcaacttttacattcttatcatactaataacgcgctgcatagcttgcatcttttttatggcaatgttaggtacgattcttggtagactgatagttttttctaaaactcaagttttattttttgattggagggcggatattatttattctttaaaggtggggggaggggctggtatgttagcagggattggtatttggataaaagcaaagttacaagaaagaaaagacgataaaaaatag

SEQ ID NO: 34750 - DNA, 522 bp, Escherichia coli
atgagccatgatgcagagaagaaaataagactttgtattcaatgtgagaatgaagcactgaaggacagtgacttttgcgctgtttgtgaagaacgcgaatttaaaaaaattcgtggttggctatacttgcctgcaataggactggttttaacaattctcgctaatatgatctctattaatttcactatacgattcttaatggaaaatattgcgcagatcggtcacgcacaaaaggggattctcttttttgaactctttgctttcattggtatgttttcctatggaattttcgttagtagtttgttttttcgtaaaaagcgtcaattgcctcatcactatattgcacttgttgggataggaacgatatttgtcgctgtcgatttactgctgggccacatctatttagacgtgccttatgtttttgatacggtaaaaccattggtacgtaatgtgtttagtgcctgtatttggatcccctatttcattgtatctgagcgcgttaagcggacatttgtgaaataa

SEQ ID NO: 34751 - DNA, 285 bp, Escherichia coli
gtggaactaagccgcttcctggaagatggtgcggtgccgctggataataatgtgtgtgaacgggccatcaaaaacgtggtcctgggcagaaaatcgtggctgttcgccggttcgcagatggcaggagaacgcgccgcgcaaataatgagcttgctggaaaccgcgaaacgcaacggtctggagccgcatgcctggctgacagacgtcctgatgcgtctgccggagtggccggaggagcgactggcagagttgctgcctcttgagggatttaccttctccgggtga

SEQ ID NO: 34752 - DNA, 627 bp, Escherichia coli
atgaaaaaaataatatatactttttctttggttgtggctttattattggcgttaagatgtgccgcctatattgatttttctgaaaaagacatgctcaagtcaatcattcctgcttggattcaagccattggtagcattttagcaattattattgccggtatgatctcggccaatcaaattaaacatgagaaacagcttgaaaagagaaaggtagcagagtcagatttggctaaaatgcatatagtaagagcgctgataatacgttcgttaactttaatgaatgaggttcgtcaggcaattgagcgtggcgaagaaagcgactttcagcaagtgtctccttggactatgcgtaatacaaaacgtgcaattgataatttaaatttatttgaaataccagaggggatgttagctctcgatctgttggctataggtccatctctcgaggaaatagcaaccttatgggagcggtgtatggaggagtcactacatactgaaaataacaagccaactattgattcttacaatgagcttgatcaaggctctcaagaggttttgaaaatatgtgaagccgcttttaaattggctacacaagaggttaatcggcttgcagctatcgttaaagagtaa

SEQ ID NO: 34753 - DNA, 198 bp, Escherichia coli; identical to SEQ ID NO: 30226

SEQ ID NO: 34754 - DNA, 540 bp, Escherichia coli
atgaaattaactgtagatagcgttattaatgaacctagaagcgtagccattactattgatggttatattcccgttgatataaagattattgattctaaaaagcttccgcctttgtattggcggggcggggatggcaaaaaaaacctacttgaactggctgtactaccagaaaatggttttttatcatccatcacattggtaatgatagcatcagactcaattcataaaacagactccttgtcagtatctttaccaagcagtgagtgtggagttcctgtagtgaatacaaaactgtggagccactcagaaagtgatgattttagtcgtcgttttgttgacgattttagccttgatattgaggtgattatatcatcagagtctatgttattaacgattggagagaataaaaaggtaactagctggataaaatgtagcgataatttttatctcgggatagatgcaggaagaaatgtcgttcatttgtatttggataagttaacaccaagtgaagtggaaagtttttttgaggcagtaggttag

SEQ ID NO: 34755 - DNA, 450 bp, Escherichia coli
atgctgaaaattggggttgaggatgttgatggggagttgctgaaaggtggcggtggaattgctaatggacggccctcacatagacaatcagaaaaggatgttggtaaagacttaggcgcaggatggagagagcaggttagctataaagatgggaaagaagtaccttacggtacgaaaggaagtacccgacctgattggtgtaatggtaatacatgtggtattgaggttaaaaactataacattgctacaaatattaatggtttaataaataatgtttctaaacaggctattcatcgtgctgagaatctgccagcgggaatgcaacagagaattattattgatgtgcgtggtcaaatagttaccccaaatcaagaacgtactataattaaaggtatagtcgagagatcaaatggggttattgctccaacatctatcagatttaagaggtaa

SEQ ID NO: 34756 - DNA, 414 bp, Escherichia coli
atgaaaagagttggattttgtggcgggagttcattttttgagcttggttcagcttctgatatgcttaatttctttagctatctaaataaattatctcgaactgaaagagatagatatctgttggagaggatttatttcaaatatattaagtttgatgagatagatgaaagctgcgcccttttaaatgagttaaaaaatctttgctctgaggactttatccataaattttcaaagtattttgaaagtattaaatggtgttctgaatcagctaaagagttttatgaggactggaatgtatatcaagaaataaaaataataattacagaaatgccatattgtatatctgaaatggaaaggcctaaagaagaatatgatgcacttactttaagtgatgttcccttttggttacggtaa

SEQ ID NO: 34757 - DNA, 333 bp, Escherichia coli
atggaatatacacaaaacaaagggcttcatattcattttgtcggctacctggatgggcaacgtcacaagaactcttatcagatatccaggcaactgggagatatctggaggcagatcacggaaggggagggttactttcacctttgccgggctaaagacaaatacccggtgcgtatcgatcacgtgatgcactatagtgataagtccgcggtagacaacttacgttacgcccttagctatctggctaaacaggatcagaaagaacacggtattattctgggccgtagcaggcttcccgaaaaaagcaaccggggccgaccacgacacaactga

SEQ ID NO: 34758 - DNA, 741 bp, Escherichia coli
atgaatcgtaatgactccgtatatgttgcatggcaggctccagatacccatgactggcatgtcgtggggaatttacaggcacgtaatgctgaatatgtcttcaactatactaaaggtgctttaacttctccaaaattcatcaagtttagtggtatgaatgattttaacgaaacttatgtttctgaggaattattcccattattcaaaaacaggcttctgtcgccaaaacgacctgagtatccaaaattcattcattggctaggattggatggaacagaggcggaaccaattgagatccttgctcgctctggcggtatgcgtagcactgaccaattgcaaatgtttaagcgcatcgaaattgatagtgacggatattttgaacatttcttttttgcgcacggattaagctatatgccccattccgctaatgaacgcgtatctcacctgaatccgggagataaactgttcctgtgcccggatgtgcagaatgactatgataaagctgctgtgctcattcgaacagatagcccaccagaaattgtagggtactgtcctcgttattttgccagtgatatcaagagaatgcttcttgataacgatgattctattagtttaagtgtcgaacgtatcagtgccgatgcccctcataattacaggcttctttgtaaagcaaccgggaaagtgtcgaaaactttcattgatcagatgattctccaggaagaattccaaccagttgtgtaa

SEQ ID NO: 34759 - DNA, 930 bp, Escherichia coli
atggctcaatatcggttagaacgtctagctcctgtagccagtgatcttgagcaactcgggacgaaagaaaaattctggttttctatggatacggaacctaaattgtggcttttcaagttctcaagggctgggacaggcgaacattggtctgaaaaatgtgcggctgagctttgccatctactgggaatccctcatgcagaatacgaattagctctaattgatgggcgttacggtgtgatttcacctaatatgatccctcccggataccgcatggttatgggaaacgaggttcttcacactaccacaatgggttatccccagccattaccgcctggtcaaagtgccgtgagggttaaggaacatactgttactcgtgtattaggatgtcttgataatgatcacgagaaaatccatccacctgtaagtggctatgatttaaaagatttaaacgcaggagatgttttttgcggttacttgctgcttgatgcattaatcagcaatcaagatcgtcatcatgaaaattgggcaattatgctaaacaatgaaactggtgaaagaatgttgtgcccaacatatgatcatgctgccagccttggccgtgaaatgcgagatgttgaaaaggctgaacgtcttacaactaaagatcgtaatcggcaaatccctgcttttgtgaaaagagcacgttcagagctctttaaacttaaaacagacaagaaacctctgttaacagttgaagcgttcagacatgctatagaaaacagaccaagagcaaaagagtattggttcggtcgattaaacacgttaactcacgaggatattgttggcgtattcaataacgtaccagcggattgcattagtgaagtgtctcgaacttttgcgattgaaatggttttagaaaacagaagaaggttgcttgaagatgaatcgtaa

SEQ ID NO: 34760 - DNA, 219 bp, Escherichia coli
atggagggggaaggaaaaacagaggtccttgtatgccgtgttcagcgcagcccaagagatgtttatatagtttatataaaagctgtcccacaatttgcgggtaactgcctctgccagccagcttcggttatcctcttgtccagtaagcctgcctctgacaacgctgacaaaagttatatgaaattgttaatacttaccataataacagatagtgattaa

SEQ ID NO: 34761 - DNA, 138 bp, Escherichia coli
atgtctggcctggaagggtttgggaccggcttccggagttatgttcaggcccaggggacgctggtaaataataccaatctcactgatgaaactggcaaagtgctgaatccggcaacgccagaggaaattaagtactga

SEQ ID NO: 34762 - DNA, 570 bp, Escherichia coli
atgaataaactcattgaactcagacgcgccaaaatgttggcgctctctttactgcttatcgccgctgctacctttgtcgttacgctgtttttgccgcccaatttttgggtgagcggcgtgaaggcgattgctgaagcggcgatggtcggcgcgctggcggactggtttgcggtggtggcgctgtttcgccgcgtgccgattccgatcatttctcgccatacggcgattatcccgcgtaataaagaccggattggcgaaaatctcggccagttcgtgcaggaaaaatttcttgatactcaatccctggtggcattgattcgacgccacgaaccggcgttgctgattggcaactggtttagccagccagaaaacgcccgccgcgttggtcagcatctgttgcagatcatgagcggttttctcgaacttaccgatgatgcgcgtattcagcgcctgcttaagcgcgcggtccatcgggcgattgataaggtcgatctttccggcaccagtgcgttgatgctggagagtatgaccaccccctgtgtcagcatagttgtcgcctcaattttttaa

SEQ ID NO: 34763 - DNA, 309 bp, Escherichia coli; identical to SEQ ID NO: 18555

SEQ ID NO: 34764 - DNA, 225 bp, Escherichia coli
atggcacccgaaccggatgacgaaacatgggtgctgtttaacgtcatgaacggtaaccgcgctgaaatgagcccggaagccgccggcattgccgcctgtctgatggcgtacagccatcacgcctgtcgtacagagaattatgccatgacggttcattattaccggctgcgggattacgccctgcagcatccggaatgcagcgccattatgcgcatcatcgactga

SEQ ID NO: 34765 - DNA, 219 bp, Escherichia coli; identical to SEQ ID NO: 12331

SEQ ID NO: 34766 - DNA, 192 bp, Escherichia coli; identical to SEQ ID NO: 12354

SEQ ID NO: 34767 - DNA, 1500 bp, Escherichia coli
gtgacgttcaatacttctcaggtcagttactatatgactcagcgtaagaaaggtataactcagcatatctcggccatgaaggctggtatctcagtccgttctggtcgtcggatcgaaaaaggagagtgggcaaaaaacagtgttcggcactggcgcacacgcaaagatcctctggaagctgtgtgggacagcatgcttgttcctctgttgaaagagaggccggctctgacaccaacaactctgctggagatgctacaggataaatatcccggccagtaccccaacagccttcgaagaacaatgcaacggcgggtctgcgaatggaagctacagtatggtgcagagcaggaggtcatgttccgccagcgacatcagcccggtctgcgaggtctgtcggactttactgaactgaaaggtgtagttgtcaccatcgccggtaagttgttggcgcataagttgtatcacttccgtctggaatggagccactggagctggatgcgggttgtgctgggtggtgagagcttctctgctctggctgaaggtctgcaggaagccctcggacaactgggcggagtgccggtagaacataaaacggacagcctgagggcagcatggaaacaacagggcgaagatggacgccgcgagctgactgagcgttatgctgctctctgtcagcactacggaatgcagggcgtacacaataatgccggtcggggccacgaaaatggctcggttgaaagtgcccacggacatctgaaaaggcgtatctgtcaggcgctgatactgcggggcagtaacgacttcagcaccatagaagaatatcaggccttcatcactcagcaggttatgcggcacaaccgtaacaatcaggatctggtcaaggaagaacgtcttcatctgaaaccgctgccgcttcgtcgcagtgctgactatgatgagctgactgtgagggttagccgcagcagtaccatcaatgtgaagcacgtcgtctacagcgtaccttcccggcttgtaggtcaactgttacgggtccggttatgggacgatcgtctgagctgttacgttggcagcagcgaggtcatgagctgcccacgtgtcagaccagaaaaagggaagacgcgggcccgtcgtatcgacttccgacatgtgatcgacagtctggcaaaaaagcccggtgcgttctgccatgcaacgctgagaaatgacatcctgccagacgatgaatggcggaggctgtggcgtcgcttatgtaatcatctggaacccgacatggcaggcaggctgatggtacatgctctgaaactggctgcaggatacgacgatatctcagtcgtggcaaaaggtatggagcagatgctgaataccccgggaaacgtggatctgcaccggctgatgcgcttcctgggtataaaggaaaaggcgttgccggtagtcaatgtgaaacagcataacctgagcagttatgagcaactactgcgtggcaagggaggttcgcagtga

SEQ ID NO: 34768 - DNA, 192 bp, Escherichia coli; identical to SEQ ID NO: 28923

SEQ ID NO: 34769 - DNA, 501 bp, Escherichia coli
atggagttatcaatatctttttcaactattattacagcggcgttgagttttcttggggtttattttttgatgcctctattactaataggtagagattttttaatattaaaaataattgataaatacattcttaatgatgagttttggacatggcttcgaatagtgaataccgataaagctatacataatgaaagatatgctggtaaaaagactcatctctctttccgtgcaagtggtactacctacacaatcgatggacagggcgttagtgaacaagcatatcttaattttgaacgcggtcgtgatatgcatttaaatagaattaataaaattgaaccgaagataataatgaggaagaatttaattgagtgggctgaaaaatattataagctagattccgatttaactaggcaaattaacgaatatgcactcaggatatatgatagcaaagttcgttcattgaaagaggaacaggaatctaaacagcccccaattcaatga

SEQ ID NO: 34770 - DNA, 1029 bp, Escherichia coli
atgtcacgaatcttatttccctcttcatgtaatcctgaaaagatatttaatttttgcaatgaaattgaaaaacattcaggtcaacagcaaataacaatcgatttttcgcatatgggaaggattgaaccatttacaatggtttatgttgctaagcatattcgagacttccatcgaaaacagaaaaagaacattgatggttttaaacttttttgtagcgggcatgagaataaggattatgccgcaaatatggcattctttcgagccttcgggttaaagcatggccgtgaaccgggatgtacagatggaaataataattttgttccatttacaattcttcgtgttcaaacagttatagatgaagctaacgataaatatactgaggtgcaagagatagttgaggaacgatctggtaaattagcaaagattcttgctcgccaagaagaaggcgacctcattgatgctttgacattttctattagggaaattatgcgtaatgttgtggaacatagtgattcaaaggtgattgaatattgtgcacagtattggccttcttatgaccgtgttgaaataacaatttctgataatggtataggaatgaaaaaatctctatcgaagaacccttatatagaagctgataatgattctgaagccattcagttagcgttaatgccatctatttctagtaaaaattttaagggggcgagaatcaatacaagaaatccttggcataattcgggatttggcctttatatgatcagccgtatatgtaaacttggcggtagttttcttatttgtagcggtgaccatgcaatatatctagatgaacacggaaagaagcatatagagttaggtcattatcatgaaggaactgtcgttagaatggtgttgaatactaaaaaacttggttccttaagctcaatgcttacgcagtttaaggaggatggctacaaaatagctgcagaaataaaacatactggagtttatacagcatcagctgcttcgcagatgttatctagggattttaagtga

SEQ ID NO: 34771 - DNA, 798 bp, Escherichia coli
atgcccctggcaaaaatacttacaaaacaagtttctttattaactgttttttcagcgttagcttatgcgatggcatattcttttcagaaaggtgttgcatcgtattatggctatccagccctttttattaaaatagatttaaatacgctattgtattcggctgtatggcttttgttttttagttttttatttctcggtgccttatacgcgacattgatgtttgatttgaaagggaaatattatgttccatttattatatttatagtggttatgctaatacctaatttttacataataggattccattggccttttggttatttctccgaaacctctgtgatgagtgttggagatattttattatttgctctgcttttgttgaattaccacaatgcggtgtccgcgtcaatccatagtaagagatacgaacatcatatggatagcattagaaaatttgggaggcttgcagagtataaagacgtattttattatatcgatttaaaaatcctaaaatcagcttttcctttaggggtgatgacattattgatattgagctataccttcgggaaggttactgcatttaaaaataacgaatattatatggtagatggtagtaatactaaagtgttgctcaattcatttggtagtggttttgttgttggtgattgtgagtccaatagcgcaaaatttgaatttgttaatgatttaaaagggatgaaattcacagtcatgtcctctaaaaaggaaatagctaaattaaaagagtgtttcgaaacacgtgttaaaaatacggattaa

SEQ ID NO: 34772 - DNA, 255 bp, Escherichia coli
atgttgggaggaaagaagttacgggaaattgtagaactatccacctacacggagattgaactctatttagttagtaatgctggaaaacgttggcgtcttcatcgtgcagttgctggtggaaaatttactctaactgatttggatgaccataatttaaaagacgtacctcttaaacaaaagcacgtccaaggaaaaagagataatctgtcaggctttatgcttgagcagcttgggttatttaataaagagatttag

SEQ ID NO: 34773 - DNA, 783 bp, Escherichia coli
atgcgcctttcccaacgtgccaatgccgatccaggacatcgctacgccattttcattgatgagatcaatcgcggtaacatatccaagatctttggtgaactaatctcactcattgaagtagacaagcgtgcaggcatgcccaatgcaatgagcctacaactggcttatagcggtgatcacttcagcgtacccgccaatgtcgatatcatcggagccatgaatacagcggaccgttctttagctctgatggacacggctttgcgccgtcgctttgactttgtcgaaatgatgcccgatctctctttactgagtggagctaaggtgaaaggcatagagctcgagtcgttgttagagaaactcaatagccgcatcgaggctctttacgatcgtgaacatacgctggggcatgcgttctttatgccggtaaaaaatgcactcgatgccggtgatgaagaagctgcgtttaaacaattgaagatcgcattccagaaaaagatcattccgcttttacaggaatactttttcgatgactggaacaagatccggttggtgctggcagacaatcaaaagcaagacgacaacctgcaattcgtgattgagaaaaccgacgatctcgatacgctttttggtaacaaccatggtttacgacaccatgatcagcaatcaacagcttacgaactcaaagatttcgatcaagagatctggaatattccacaggcttatcgttcaatttatcagccccagcagactccccttgatgagcaggctgtaaatcatgggtga

SEQ ID NO: 34774 - DNA, 453 bp, Escherichia coli
atgactgatggcgtaaccattaaacgtaatttttctaatgacgtcatgctgagaataagccctaatactggcactaacattaaaataacaggcggaatactagatggaggaggacaagaccaccctacagatccttttgacatcattgcagcctcctcaccaagaaatctttctattgttggagtaacatttcttgatgtagtcgattttcatgctgtagatattgctgacgggcaaggggtgattataagagactgtaagtttcttggcttcaaaccactttccaaccgaaattattcagaagcgatccagttagatccggggattgaatctcttggcgattattacccaaacatcaatgttcttgttgataactgttattttggttcaaatccacaaaataccaccactgggtttggggcgtggggggtggggatcaggacaaaaatataa

SEQ ID NO: 34775 - DNA, 687 bp, Escherichia coli
  misc_feature (658)..(667): n is a, c, g, or t
atgctctttgccggggtaagggttttcaactggtatgattgggtggttagcggatgctctttctataacagtaccgcgcgaggagttcatgtaaccccattcccatcatcatcaaaaccacagggggcaaggagggggcgcattgttggcaattattttgaaggcgttagatccccgattcttctggctgcacctacatatccatatacagatacatcagatgcatttcatgaagatatcgtaatatccaacaattccatgtttattacagagtctcaatcatatgcagtagacgcaagatgggtttcaggactaactgtcactggaaacacagcaagaggcggaatcggttttttcaaaggtgattttattaacaaatcaatcatctctaataatgaatacgattcaggaacatcaagttctttatggatttctgaaactaatgcagaagaatttatagggtctggtttttcgcatgatgttgtaatttctagcaacatctttagaaatatttccctgcatgggattcatattaatggtaaatattcaaatgttactattcaatcaaacattatagttggggtttctaccgcagataataaccataatggcatacgaattgactctggtgcagaaaatgtaattgttagttcaaatnnnnnnnnnnagttcaaatcaaattcgtga

SEQ ID NO: 34776 - DNA, 144 bp, Escherichia coli
atgaatataaagacgcttaacgtcagccttttgtctatttctattattacagcattgtttccgttgaacgcgatggcaacaaaattaaccatagagcagcgccttgaattgcttggaactcgtctgccgcagcacatactataa

SEQ ID NO: 34777 - DNA, 312 bp, Escherichia coli; identical to SEQ ID NO: 32097

SEQ ID NO: 34778 - DNA, 288 bp, Escherichia coli; identical to SEQ ID NO: 11880

SEQ ID NO: 34779 - DNA, 837 bp, Escherichia coli
atgctgtcaccgaaaggtctggtgaaaggctctctgtttgtcattggcgctcgccctaagatggggaaaacgacgctatacagccagatggcaatcaactgcgcagtgcatgagaaaaagcccgctctgatgttcagccttgaaatgccaggtgaccagatactggaaaaactggtgggacagaagtcaggtgttaacccgaatattttttaccttccggcgacaaatgacgctgatgacggctatcagggtgattacgatggtgacttcaacagggcgatcgaaacagccaatcgcttgagtgaaatcgacctgctttacatcgacgacacgccgggattatctctggctcaaatcgtcagcgaaagccgtcgaatcaagcgagaaaaaggatgtgttggcatgattctggtcgattacctgacactaatgactgctgagaaggccgatcgcaacgaccttgcttacggcatgatcaccaaaggactgaagaaccttgccaaagagcttgattgcgttgttgtgcttctgacacagcttaaccgcgcattggaaagccgaaccaataaacgcccattaccaagtgactcgcgcgatacagggcagattgaacaggattgcgattattgggtggggatccatcgtgaaggtgcttttgatgacagtgttccacctggtgaaaccgaactaatccttcgtctcaatcgtcatggcaataccggcacggtgtattgcattcaggcaaatggcgctatttatgacacagaccaacagtctgctgaaatgcgccgccgtgaacgcgaggaaccgcagtccaagaagaaaggaggattctga

SEQ ID NO: 34780 - DNA, 348 bp, Escherichia coli; identical to SEQ ID NO: 8336

SEQ ID NO: 34781 - DNA, 732 bp, Escherichia coli
ttgcgtcagacccgcacccgtaagccgttccctgaatcactaccccgtgacgaaaagcggctgttgcctgcggcgccgtgctgcccgaactgcggcggttcactgagctatctgggcgaggataccgccgaacagctggagttgatgcgtagcgccttccgggttatccggacggtacgggaaaaacatgcctgtactcagtgcgatgccatcgtgcaggcacctgcaccttcgcggcccatcgagcggggtatcgccggaccggggctgctggcccgcgtgctgacctcgaagtatgcagagcacaccccgctgtatcgccagtcagaaatatacggccggcaaggtgtggagctgagccgttcactgctgtcgggctgggtggatgcatgctgccggctgctgtctccgctggaagaggcgcttcatggctatgtgctgactgacggtaagctccatgctgatgacacgcctgtcccggtgctgttgccaggcaataagaaaacgaagaccgggcggttatggacctacgttcgtgacgaccgtaacgccgggtcaacgctggcgccggcggtgtggttcgcttacagcccggacagaaaaggcatccatccgcagacccatcttgcggggttcagtggtgtactgcaggcggatgctgtcacgaacggtgcaatagtgctccacacccaacgcctgaaatcagatccagggggtaatctgctctcctga

SEQ ID NO: 34782 - DNA, 630 bp, Escherichia coli
atgggaacgaatatctttgcggtaattatcctgggggctgtgggtaatttcctctgggtgctggggatccacggacctaatacaacgtcggcaattcgagaaaccgttttttctgaggctaatctggagaatctctcctgggccgctcaacacggcactacctggggcgcgccatatccgattacctggacttctattaatgatgcattcgccaactgcggcggttcaggtatgacgttggggttattgttggctatttttatcgcttctaagcgtgcggaataccgtgatctggcaaaaatgtcatttatccccggtattttcaatatcaatgaaccgataatgttcggccttcctattgtacttaaccccatcatgatggtgccgtttattatggttcccattgttaactgtgccattggttacttctttgtttcgatggaaattattccaccggttgcttatgccgtgccctggactacgcccggacctttaattgctttcctcggaaccgggggaaactggctggcattactggttggttttttatgtttaggtgtggcgacaatgatctatttaccttttgttatcgccgccaacaaagtcaataacatgacaactaacggataa

SEQ ID NO: 34783 - DNA, 432 bp, Escherichia coli; identical to SEQ ID NO: 7321

SEQ ID NO: 34784 - DNA, 294 bp, Escherichia coli; identical to SEQ ID NO: 32087

SEQ ID NO: 34785 - DNA, 516 bp, Escherichia coli
atgagtcaacaacacacaacccaggcttctggccaggggatgctggaacgcgtgtttaaactgcgcgaacatggcacgacggcacggaccgaagtgatcgccggttttaccaccttcctgacgatggtttacatcgtttttgttaacccgcaaattcttggcgttgctggcatggataccagcgccgtcttcgtcacgacctgtctgattgctgcattcggcagtattatgatggggctgtttgctaacctgccagttgcactggcaccggcaatgggcctgaatgcgttcttcgcttttgtcgttgtacaggcgatgggcttgccgtggcaagtcgggatgggcgcaatcttctggggcgcgattggtctgctgttactgacgattttccgcgttcgctactggatgatagccaacatcccggtaagtctacgtgtgggcatcaccagtggtatcggtctgtttattggcatgatggggctgaaaaacgcaggtgtgattgtcgctaacccgtaa

SEQ ID NO: 34786 - DNA, 363 bp, Escherichia coli
atgtctgagcgttctgctcgtcagtggcctgattttttatcggtggtgttactggcgctgttattgtggataagtctgttttgtggctggcgcgcgctgatgttttgctgtgcctcggttttcagtgttgctttatgtgttgccggtgattgtctggatgcgctgataatgagctgccgggtgcctgaacattttgcccggttcgtctggccgctgacctggctggggagtctgtccgggctgggattagccgtgatggtaacgtctcaactgaaaacgggtcctgagcatgtcatctgggcgctggccggattgctgacgttctggctctcctttcgttttcgcgctcgtctgttcgggtaa

SEQ ID NO: 34787 - DNA, 609 bp, Escherichia coli
atgacaggtgaaaaagaaagcaaaaatgcagagcgcatttttatgccatctgaaataatgcgtttcaaggaacgccttgaagaggcaatgaatggagaatcaagccgggcgtttgcagctaagtgcggactctctgatggggttatcagaaactacctgtctggcaagacatacccgtctttagatcgattagcacaaatagcctacgcaacagggcgtccaatagagtggtttatccaaagtcagagcatgccaatggttgagcataaaaatactcaagagaataaaaatcctcaacctgaccgcagcacattgaaaactaaactgatcgcaattgtcgaattgttagaggacaaggaactgcattctgcgattgagttgttcagaaagaaaggatttgaagctcttatgcctgagattttttcttccgatgattccatccaggctaatttgcaaggtatttcgcagcaaaccttacaaacagccaaaatgcttgaatcattaccaacagatactcgtaaagagattttgtcaaagtatggtatttatgaacaggaaggtcttgtagctccttcacaagaaccacaagatgtaaaaaaagccgtataa

SEQ ID NO: 34788 - DNA, 315 bp, Escherichia coli
atgaaagagttgcaaaaaattaattcaataatggaaaggttaagtgctcttgagcgtaagctggacgattgtggaaagctgtgtgttgaaaagcaaaatgagctttaccgggaattttttacaatcgtaagtgagctgatgccaattgttaataactgcctgatgacatccagattttttaatgtcgatgctactacatccagaaaattttctgtgaaaattcaagaaagggtttctggtagtgtgacaagagagatggctgaacagttggtggcaatgagcaataaaacaaaaagaaaaaagcattgcttgtaa

SEQ ID NO: 34789 - DNA, 282 bp, Escherichia coli
atgagcgatacttatttatctaaaaaagcttttgctgatattctggccatcagacaggttgtcatactcctggttaacgatttaccagatgagaaaaaagcaattattaaagatttgcttactaaatcagctgacactttttcatcaaaaaaattacccgaatccctggaaaccccgcaggaagttttagacgaaatgaacaaattgattgccgaatcatgcgctactcttgctgagacaattttaattcctgaagaaacttcatcgtcataccatcaatag

SEQ ID NO: 34790 - DNA, 447 bp, Escherichia coli
atgaaaaaatcaaaattgctaatcagtaccatcatcagcctattcgtactaaccgcctcctcagtcaatcacgctcaagaaaaagattttgatcctgaagtggctgctgatgcagtcttaaggtccgccgggatagatccagataagagtgttgcaaataaagcccctgcctctggtttttggacctgccacggtattcgtatgcatatgggcgttgatatggggtcatggacagaccttgatacaggtgaactatacactcagatagaaacaggccaaattgacgaacaagacaaggatgaaaagattaaagggactgattatctctatgctttgactagaaatcctgcggttataaagtattttatcgttgataaatcaggaaaaaatctttatatccgagatgatgtgaatatttttaagacatataaatgtaaacgaaactga

SEQ ID NO: 34791 - DNA, 420 bp, Escherichia coli
atgaaaatgaaatggtccccatctgttcagggatttttctctgaaaacaacagcgatattcccgatgatgctttcgatattgaagatgctctttattatgaacttatgaatggtcagagtacggggaaaattattatcaatagcccggataactaccctgtacttactgaatatccagcgaagacacatgaacaggaaatagctgaagcggagggaatgaaaaatatacttattgaacaggccaacgattatatgaacagtaaacaatggcctggtaaagcggctattggccggctgaaaggtgaggaactggcacaatataatttgtggctggattacctggacgcactggaactggtcgatacttccggtgcgccagatattgaatggcctacacctccggtaactcaggccagctaa

SEQ ID NO: 34792 - DNA, 2754 bp, Escherichia coli
atgaactggattggttctcggtggtggaaattcgacttccataatcacactccggcatcggacgattatggaaaaggccctaatcaggcccagtatatgcagatcactcataaagattggctgctcaactacatgcgacaaggcatcgattgtgtcgctgtcacggaccataattcaggcgcttggattgatccgctcaagcaggcactcaaggaactggcatctgagagtcatgaagattatcgaccactctacttattcccaggtgttgagcttactgttcaggggaatatccatattctggccattttcggcgaagacaagacaacctctgatatcgactcactgcttggtgcggtcaggtatcgcggcaccaaaggaaagagcgacggctgctctgaatgctcagcagttgaggtgatcgacgaaattgctaggtcaggaggacttgcaatacctgctcatgtagatcaggctagcggactttttacggtctgtacgggcaacacactagagcaggtgcttgacaacaaatgtgtttttgctatggaggtaacggaccttgctaaagcaaaaccgcagctctatattggcaagaatttgaattgggcagagattcttggaaccgattcccatcatccgtccggtaccggaaatcaacgctacccgggtagccatttcacttgggtaaaaatgtcggagccatcttatgacggattacggctggcgctcgttgatggggctctttcactgaagcggtcggacaacttcactggtgacccaaatatccatggacaacttgccatcgaaagtatcgtggttgatgatgcgaagtacttaggacgagggcaatctttaacttgtcaactgaacccctggctcaacactatcattggtggacgaggcactgggaaatcgacttcgttggaattcctgcggattgctcttaaacgaaagggagaaatccccaagagccttgaaaaggaatttaccaaatacagtcaaacttcgaaagaccgccaagatgaagggctgttaaaagattccacgaaaataactgtaggctttcgaaaagacggtggccgtttccgaatcacctggtctaataccgacgacatatacagcatcgaggaagagaccgctcccggagtctggtgtgattccgagggagacatagcacaacgatttcctgtcaggatttacagccagaaacagatattcgaattggcaaagcatccccaagcactcttgcaggttgtcgatgatgccccggaggtcaatcatcgtgattggcagcttaagtgggatgaactggtttccaaatatctctcgcttcgcgcccaagagcgtgaagttcaggctgggcttcaggaagaatcggtaaccaaaggtcagcttgaagacgtcaaacgcaaactcgatgtttttgaaaaggcgggccacgcggatgtccttaaggcttaccaactcagacagaaccagagtaaggctatggactcctgggtaacgacttgggaggattccgccgaacaggtccgagatatttctggaagcctactgccagcagaattggatttacaatatttcgacattgggaatgcggatgacaaagaactcttcgataccatcaaggacatccgtgcgacgtttgagaagcttcagacagagatgaactcgatcgcgcagcggattgatgatgtgaagaactcatggaatcaaactcgatcagacttgggaatatcgaaaagaattacagcggcgagccatgaatacaacgccctcctcggtcaactcagcgcagcagacgcaggtgatccatctgcatatggtgttctggttaagcagcgacaagatttcgaagataagctcaagggattcgacaaaaagagagaaactcttgcgcagcatcagaagagcgcggaagaatacttggtcaaactccatgagcatcgagcattgataaccaaacttcgtgaggactttctcaaggatactctcgtcggcaattcatatgtacagatcaatgtcattccgtttggaaacaagattacggttgaggaagaattccgtaacctgatcggccgcagtggtggcggatttgaccgcgacattggagttgttgacggggatgagggcttgctggcttatttaacgcaagaccaatccaatactatggatgataaaattgagaaaataaaatcatcgctacttgcaatccatgaaaacgatactatggcggtggaatcctgcaaagatcgacgttttgtatccctcattcaggggctaactccggaacagatagatcgaattcagtgctggtttccaggcgattctctggatatcagatatagcctcaagaacggcgagagtttcaaacccgtagagcaaggatctccggggcaaaaaacggcggctctccttgcatttatcctttcatatggcaatgagcctcttatacttgatcagcctgaggatgatcttgataaccacttaatctatgatcttatcgtgacgcaattgcgtgagatcaaacaaaaacggcaggttttagtagtcacgcacaacgctaacatcgtcgtgaatggtgacgcggaaaacgtcattgcccttgatattcggtctggtcaaaccagaattgtggcgcaagggggtcttcaagaaccttccatacgcgatgagatatgccgagtgatggaaggtggcaaagaggcctttacccaaagatataaacgaatcaatgcagcaatcaaatag

SEQ ID NO: 34793 - DNA, 498 bp, Escherichia coli
atgttaaatttagacgaaatgtgcagcgcattaagaaaacaatactctataacggctggtcaagatggtgagaaatatgctagtagatggctggaaaaatccaagtggaaatttgaacatgttgagcaaggaataaataccttatctgcaaacttgaaatcatatgggggaaaacgccccgatttcattattgacgctgacgaatcctcttatattcttttagatgcgaagtatcactcaacagatgggtgtacctcctttacacttactgattgtgaaataggaaagtatagagcacttcagcaattcttaaaaaatgtgtatagtgattgtactttcgaagtagtctttatggtgtttccgaaagaaaaaaatggtgacgaatttacatttgtgagtctagatgagtttgataaaggagagtgtacgactctagcatcaaaagatgcaacgaaaattagtctactctatcgagatgacttatggtttaaaagttga

SEQ ID NO: 34794 - DNA, 411 bp, Escherichia coli
atgccatttgctcgttatttctgcattttcataaacgttggtttgggagaagcggctaaaaggaatgtagggacaggggcgaatcagataccggacatggcctcttttgccagtggtgatggatggatgaaattacccaacgggaaaatcctgcaatatggtcgtgggcgtgtgtctcctacgcttgcgagtcagacactacgggtagaatttaatatacctttccctaaaaaagctgatattgccttgctttcacattctggtgatggtggttcaactgccgggagtggtcgtggttttatgatgacaactgaagagccagggttaacagggttttattctgcctttagaacaacctcgacaagtccaactgttaccatgaattactgttggtgggctgttggcgagtaa

SEQ ID NO: 34795 - DNA, 393 bp, Escherichia coli
atgaaagaaaaaagaaatgatgcggaactaaaaaacagaaaaactaaacgggattatgattatgaactcagggtttctgatatatattttgatctgttttttgtgttcgttgctgccggaacttttttatgggtgattatgcacagtatttttgatgcctgtattgattcgtggatggctgacccgaaattacttaatttccactatatgtggaacatcctgatgtatgccattccgtatacgttatgggcgtttgcaggtggatttcttatcgtatacgtcaggaaccctttaaatgaattaataaacgggggtgtccggatattcctgctgaaacgccgtatgcgccgggagaacgaattaagggagggcaagaatgatgccacgcattaa

SEQ ID NO: 34796 - DNA, 285 bp, Escherichia coli
atgataagtaaacgcagattctctttaccacggcttgatattacgggaatgtgggtattttccctgggtgtctggtttcatatcgtcgcccgtcttgtttacagcaaaccctggatggctttttttctggcggagttgattgcggccatccttgtgctgttcggcgcataccaggtgctggatgcatggattgcacgtgtcagcctggaagagcgtgaggcactggaagccaggcaacaggccatgatggaagggcagcaggagggcggacatgtctctcactaa

SEQ ID NO: 34797 - DNA, 534 bp, Escherichia coli
atgaacgcaaaaatcagatacggcctgtcggctgccgttctggcactgattgccgtcggtgcgcctgcgcctgatattctcgaccagtttctggatgaaaaagaaggtaaccacacaacggcataccgcgatggttccggcatctggaccatctgtcggggtgccacggtggtggatggaaaacccgttgttcccggtatgaaactgtcgaaggaaaaatgcgaccaggttaacgccattgaacgggataaggcgctggcatgggtggagcgcaatattaaagtgccactgaccgaaccacagaaagcgggtatcgcgtcattttgtccctataacattggccccggtaagtgtttcccgtcgacgttttataagcggctgaatgccggtgatcgtaaaggtgcatgcgaggcgattcgctggtggataaaagatggtgggcgcgattgccgcatacgttcaaataactgctatggacaggttattcgtcgtgaccaggaaagcgcattagcctgttgggggatagatcagtga

SEQ ID NO: 34798 - DNA, 1134 bp, Escherichia coli; identical to SEQ ID NO: 8777

SEQ ID NO: 34799 - DNA, 672 bp, Escherichia coli
atgctattgcgaacagacaaacattatgcaggaaagcactggacaggaaaacatcgaacctggttagctaatcaatcatttagtcagccatctcaacagattgcttttcaacactattgtcaaagtctggagcagattgaagatcgcatacttcaactcgaccaggaaatatctcgcctgttacctgagtggtctctgtgcaatctggtctgccagttgcaggctcttaaaggtgttggtcagctaattgcaataactctggttgctgaactgggtgatttttcgcgattttccaatcccaaacagctcatggcttttctgggactggtgccaggtgaatattccagtggaaacagtattcgtcccagaggaataacaaaagttggaaacagcgaactgagacgtctgctttacgaagccgcctggtcttatcgtacacctgcaaaagttggggcatggcttatatattaccgaccggactctgtaacacaatattccaaagatattgcatggaaagctcaacaacgattgtgttctcgttaccgaagtctgacagcaaaagggaaaaaatcacaagtagccattacggcggtggctcgtgagttgactggatttatgtgggatattgcacttgctgcccaatcatcattcagtcagcagaagcaaaattaa

SEQ ID NO: 34800 - DNA, 261 bp, Escherichia coli
atgcaatcaccattacgaaatgtgcgtaaggcgcatggtttcactttgcagcatgttgctgcgggtgttcaagtcaatccagcgacgttgagtcgtattgagaggctggagcagattccatctatcgagcttgcagaacgtttagccaatttttttaagggtgaagtcagcgaaatgcagattctttatccggcacgttttcaatctagccaaaaccagaatgggtttaaaccacaggaacaggaggtgaaccgtgggtaa

SEQ ID NO: 34801 - DNA, 384 bp, Escherichia coli; identical to SEQ ID NO: 25272

SEQ ID NO: 34802 - DNA, 564 bp, Escherichia coli; identical to SEQ ID NO: 8706

SEQ ID NO: 34803 - DNA, 156 bp, Escherichia coli
atggagtcccggatttatccggtgatgagcgatgtcccggcactgtcagatttgatcaccagtatggtggccagtggctatgactaccggcgcgacgatgatgcgggcctgtggagttcagccgatctgacttatgtcattacctatgaaatgtga

SEQ ID NO: 34804 - DNA, 696 bp, Escherichia coli
gtggaggaaatcagtctgccactgctgacgaaaatgtcttccgaacgcacgctggcagtccaggcagcactgatgcagcaaccggacaaatccctgacactgctggcatggacgctctgcctgaatgtgtttggcagcggagcgtacagtaaaccagcacaaatcagcctggaatgtaaacattattcgctgaccagcgatgcgccatcggggaaggaaggtgccgcattcatggcgctgatggcagaaaaagcccgtcttgctgccctgttaccggagggatggtcacgggacatgacgacattcctgtcactcagtcaggaggtgctgttatccctgctcagtttctgcaccgcatgcagccttaacggtgtccagacccgtgagtatggtcacacgtcacgcagtccgctggacacgctggagagcgccatcggctttcacatgcgcgactggtggcagccgacgaaagcaaactttttcggacacctgaaaaagccgcagattatcgcagccctgaatgaggcaggactatccggtgccgcacgggacgcggagaagatgaagaaaggcgatgcggctgaacatgcagagcaccatatgaaagacaaccgctgggtgcctggctggatgtgtgcaccacgcccacagacggatgccactgaacgcaccgataacctggctgatgccgcctga

SEQ ID NO: 34805 - DNA, 423 bp, Escherichia coli
atgttcctgaaaaccgaatcatttgaatataacggtgtgagcgtcacgctttctgaactgtcagccctgcagcgaattgagcatctcgccctgctgaaacgacaggcagaacaggcgggatccagtctcaatcgacaggtgagcgtggaagatctcgtcagaaccggtgcttttctggtggcgatgtccctgtggcatagccatccgcagaagacaaagatgccgtccatgaatgaagccgttaaacaaattgagcaggaagtgcttaccacctggcccacagaggcaattgctcaggctgaaaatgtggtaatgcgtctgtccggtatgtctgagtttgttgtgaatgatgcacctgaacaggcagatgacgccgggccagcagagcctgtttctgcgggaaagtgttcgacggtgagctga

SEQ ID NO: 34806 - DNA, 639 bp, Escherichia coli
gtgacagcgggcgataacttcctccttgttgccggtcgtgatattgccagtcaggctgccggtatggctgcggaaaataacgtggtcatccggggcggacgtgatgtgaacctggtggcagagtctgccggcgcaggcgacagctatacgtcgaagaaaaagaaagagattaacgagacagtccgtcagcagggaacggaaatcgccagcggtggtgacaccaccgtcaacgcaggacgggatatcaccgctgttgcgtcatccgttaccgcaaccggcaatatcagcgtgaatgccggtcgtgatgttgccctgaccacggcgacagaaagtgactatcactatctggaaacgaagaaaaaaagcggaggttttctcagtaagaaaaccacccgcaccatcagtgaggacagtgccacccgtgaagcaggctccctgctgtcggggaaccgcgtgaccgttaacgccggtgataacctgacggtagagggttcggatgtggtggctgaccgggatgtgtcactggcggcgggtaaccatgttgatgttcttgctgccaccagtacagatacgtcctggcgctttaaggaaacgaagaaatccggtctgatgggtaatgatggatggtccccgcgatga

SEQ ID NO: 34807 - DNA, 351 bp, Escherichia coli
atgctgataaatcatatcaactatgcaaaagaatacgaggttagagaatttatgtcaactgacactagtgaacgtttgaagcttatccgtgagtctgaacgtctgaaaatgaaggaggtagctgaactagctggcatcaactacaccacatatgcaggttatgaatcaggtaaggctatgatgtccctagaaaatgctaagaagttttttaaagtagaaaggttcagaaaataccgtgactggttcatgtttgatgaaactgatccagcagctggacaaatagccccggctctcgcacacattgggcaagactcaacaatcttgcaccactcagaccaaaagactggctga

SEQ ID NO: 34808 - DNA, 357 bp, Escherichia coli
atgaatgtcggatctgaaatttgtgacgagaaaagacaagaagtttctgctcttaaaaaaaacaagcgtgattccattaagttggctgcggatccgtcagatttactgtcgaaagagggttttgctctttacatcggtaagactcctcgtgcggtggctgaaatggcacgagctggaaagctgccagcattctatatgacagacccgttaaagccgggcggtcatgctgagttatggattaatcgtcgtgagtgggacaaatatgcagctcaactagtcgatgaagctccgacagaatggcatgactggaagaatcgcataagttacagcaaatccagacatggccacgcggcctaa

SEQ ID NO: 34809 - DNA, 189 bp, Escherichia coli
atgggaaaacaacagagtgttattgcagcagataacgaggcattaacgccacaagaaatgctggatttgtcggtgagggctggtgactttctgaaacaagaagccggacgtttaggtaagcaattgtccggcagagaaattagctgtatcgcgggaattttagattttctttaccagcacgagaaataa

SEQ ID NO: 34810 - DNA, 177 bp, Escherichia coli
atgaatgatttagaaaaaaccaagtttctttttgagcagacctgttcagtcatcggtggagcacttactgaacaatcaagaatgcctctccctgtagaggtacgcatcgagcggttgtttgatgctgtttacccagttcttgaacgaaagctcgaagaaaaacttgggaaaaaataa

SEQ ID NO: 34811 - DNA, 711 bp, Escherichia coli
gtgcgaaaaaagtcgcccccgccccgggaaaaagagcgctggcgttttatatgggctctgccctctgacgagtatcacaaaaaagaacgcatcggtgttactgccgtggcccgtgaactcagcctgtatgaatcacagctctacaacgggctcagtaaacagcaaaatcagcaggcctcctctgaacgtaagttggagatatctaccgagattgcacgtctcaaacgccaactggcggaacgaaatgaagagctggtaatcctccaaaaggccgcggcatacttcgcgaagcgccagaaattgaagtatgtctttattgaaaaacatcatgctgagttcagcatcaaggcaatgtgcaacgttgtcctcgcggcttttatccggtcaaaacagcgttacgatgcaccacgcctggcggatgtactgcgtgctcagggttactattttaacgtaaaaaccgtggcggcaagcctgcgccgtcaggggctgagggcaaaggcctcccggaagttcagcccggtcaattaccgcgcacacggcctgcctgtgtcagaaaatctgttggagcaggatttttacgccagtggcccgaaccagaagtggcgggagacatcacgtacttacgtacagatgaagactggctgtatctggcagtggtcattgacctgtggtcacgtggcgtcattggctggtcaatgtcgccacgcatga

SEQ ID NO: 34812 - DNA, 477 bp, Escherichia coli
atgcgtcagggtatcaaggtggggcactccagcccgtaccatccacagacgcaaggcaagctggaacgttttcaccgcagtctgaaggcggaagttttgcagggtaagtggtttacagatgccggtgagttgcagcgcgccttcgatcactggcgcacagtctataatcttgaacgcccgcatgaagctctggatatggctgttccggcctcacggtatcagccgtcagcgcggcagttcaggagcaatgtagagccgccggagtatgacgagggtgtgatggtcaggaaggtggatatcaggggtaaactgagtctgagaggtgtcagtctgagtgcgggcaaggcattcagaaatgaacgcctggggctgaaggagacgcaggaagacggtcagtatgaagtctggtggtacagtacaaaagtgggggggatcgacctgaaaaataagtcgatcaccatgggtaaagaatgttaa

SEQ ID NO: 34813 - DNA, 657 bp, Escherichia coli
atgctctgggaagcgagagataccatgtcactacgttctgagtttgttctgttcgcctcacaggagggggcgaacatccgttctctttgccgtcactacggcatttctcctgccactggctacaagtggcttaaacgctggactgaagaaggtttatcctgccttctggaccgtccacgtactcctcattattccccgaaccgttcgtccgacgacatcattgcgctattacgcatggcgcatgaccaccatgaacgctggggggcacgcaagattaagcgctggctggaggatcgcggtcatctcatgcccgccttcagcacggtgcataacctgatggcccgcaatggccttctgcccggtctggttgcggcagccccggcgacgggccgcttcgaacatgaagcgccgaaccagctctggcagatggattttaaggggcactttccctttggcggtggacgctgccatccgttaacgctgctggatgatcattcccgtttttccctgtgtctggctcattgcgccaatgaacaacggacgaccgtccagcaacagctggtcagcgtatttgaacactacggactgccggacaggatgaccatggacaacagtgccccgtggggtgacactcccggcacctggacggcactgtag

SEQ ID NO: 34814 - DNA, 594 bp, Escherichia coli
atgggcaacgcaatgcactctcttaagacacttctacagttaccttgcggatggcaatacagtcgacaagttattagccctgacggtataaccctccatctccgcggaaaacgcaaaacagcacaatgctctgaatgccttaaatgcagcgactctgttcatagttgttgtcggcgccggatacagcatctaccctgctcacggcagacactatggtttgtattttccgtccgccactggtactgccgtaaccctgtttgttcacgaaaaatttttgccgagtcgcttgctcccttcgccagttcacaccagcagtcttcacaggctctaccatatgagcagttgttagaagaagcggaagagtcgatacaaaaatgtgctctcagcaaggaagagcatgattaccttgaggagatgagtgagacaacaaacctcctgcatttttggcataaaattatgagagcattgaggataactggaaacgcctgtaaagaaaaaagacatagtttttcttgccagttccaccgatcccgcgtccccttgtcacctgtacgatccggagacatagtgaacacttgttcggagacatggtag

SEQ ID NO: 34815 - DNA, 936 bp, Escherichia coli
gtggcaggcccggcagacgcctcgcagtccgtccttaaaaacaaccggtcatcactgaaaggggactttaccgaaagtgctgaactatatcttgttttacacgatctatcaggtcatccgatcaatgtttctgaagggctggaatttgtgcaatcaggtaccaacgtgtcctatgtgcaaatcagcacaattgattacactcaaaatttatacggtgagtataaagccactgttacaggcggcggagagggtatcgcaacgctgatccccgtgttgaatggtgttcaccaggcgggtctgagtaccacgatagaattcattagcgcgggaaccagaccaatgaacggtacagtatcagtgaatggtgcaaacctacctgcagcttcattcccttcgcagggatttaccggggcgtattatcagttgaataatgacaactttgcaccaggaaaaacggcggctgattatgcgttttcaagcactgcctcctgggttgatgttgatacttccggtaaggtgacattcaaaaatgttggagatagaaatgctgtaataatcacggcgaccccaagatcaggtggcgctatttaccaaacgcaagtacgggtgaagggctggtgggtgaatcacggtaataacctcatgcaattaagccaggctgaaaactactgcagcaaccaggtcggtaatggctacccccttccccgcgcggaccttttaagcaatgggcacatgcggcgcgaaatagggtcactgtatggtgagtggggagatatgggaaattacatgaaggaagctgatttttattcaatggtatattggtcttctaattccgcaggcgcaggccaacaatacattgtatccctggaaacagggacgcaaaacacttatcaaacgtatgaatttttttatggggcgtgttataaacagatttaa

SEQ ID NO: 34816 - DNA, 8583 bp, Escherichia coli
atgaaaatgaaccccagagcgtggtttaaccgctcccgtatcccaatgaatgcttccgaatacgtaacgttttcggtgaatgaccccgcaagcgaaagcattccgcggtctgaactcttttcgaccgtccagatggaacgctacggccagaagctggcgcggactcataaagtatcaccggataagcatccttattatcttctgaaacggcttggcgacaatgaggccgtcattacccaaaactgctatgagcttaacgcgggtaaaaagaccagtatcatgcccgcgggtgaatggttgctggacaattattatctgattgaggaacaaatccgcacagtccgccagcacttgccgaaaagctttggaaaaggtctcccgtcgctggtatcgccactgaattgtccacgaatttatcatatcgcatcagaggcagttgctcacggtgatggccgctgggatgtcgcgagcctgaccagctatctcactgcctatcaaaaggtgacaccgctgacgctgggtgaagtctgggcgttgccgggaatgctgcgccttgcgctgattgaaaatcttcgtcgtatcagtatggaagtgataaaagcgcagcgggacagaaaccttgctgatacgtggataacaaggattgtcgaatgcgcagagagtgcgcctggtgatttaatcatggtggttgccgatatggcacgctcccgacctccgttaaccagtgcgtttgtcgcagaactggtgcggcgcctgcaggggcatggcaacgcgctgtcgttacctctgacctgggttgatcagtgccttcgggaacaggggatcaccactgacgttctcatacatagtttcaatcagcagcttgccgccagccagctgtccgtcagtaacagcgtcgcgggcctgcgtttattgagtgaaacggactgggctgatttcgccgaaacgataagcgttgtcgaacaggcattacgtaatgatcctgctggcatctatccccggatgcacttcaatacccgggatcattaccggcacgtagttgaggttctggccagagacagcggtctcagcgagcttgaggttgctgagagggtgcttgcgctttcagaggaaaaagcgcccgataaaccggaacatcatgttggttattatcttgcgggcgaaggtcgacaggcgctggatattcatctcctggcagacgcctcaaggctcatacgcttgcggcacagtttcaacagaataaccctgctgtcatggcttggcagcctggcgttgctgacaaccgcagcgaccgcagcaatattgcacgaaaccgccatgcagggcgcagactggctattgatcgcggtgatattacctctgattatcgcattaactcagttaatgagcgatttgctcagtgatgcaaccacccgttttcgcgtacctcgccccttgccggggatggatttttcagccggtattcccgctgacagtgccaccatgttagtcattccctgcatgctgaccagccacgaaagtttcagccagctcctcaccagtcttgaagtttgctggttggggaatgaaaacgaaaatctcaggttcgcgctgctcacagacttcgctgattctgaaaatgaaccctcgccggaaagtcacgcgctgctcagaaaggctatcgccgatacgcaggcgcttaatcgccgctacccctccggccgaccacgtttttatctgttacatcgtcagcctgaatggaacccctcggaaggagcgtggatgggctatgaacgcaagcggggaaaactggcgttattgaacagctggttgcgacatcccggaatgcaattcgtcagcgttgcagacatgcctgcccatcttttaccgggccacataaaatacgtcattaccctggacagcgatacggtgctaccgcgcgatacggcacacaaactcgtcgcgacgatggcgcatccgctgaatacgcctgagtatgatccggtacgccagagggttgtcaaaggattcggtattttacagcccggtcttgcggaggagatgccacgcaacggtcaggggcgttacgcagccctgcgcagcagcgtaccgggcaataacccttattcgatgatgtcttcggatatctatcaggatctctttggggaaggctcgtttgtgggtaaagggatttacgatgttgatatttttatgcaggccactaccaacatctgcccggaaaatctggtactcagccacgatctgcttgaaggatgctatgcacgttcgggtctgctgagcgaggtgttactgtacgaacagtaccctaattattatctgtcggatgttgcacgacgttcacgctggatccggggtgactggcaactgcttaactggctaaaaccacgcgtaagaaaagccgatggaacccgggtcaggaatccgctgaccgcgctttcttactggaaattactcgataatctacgtcgcagtctggtcgccccctccttactggtattgctgttcttcactctgctttgggtacccaatccgttttactggctgggcatactgttgctgatatggctgttgccaaccatcctctgcattagccatgaccttctgcataaacctctgcgtcgccgcgtgaaaccgcatctgttactggtgggggcgggcgcgataaagcgtctgtcaggtatcagccttaattttgcgatactgccgcacgaagccggatattcgttgaaagcgatcgccgtgacgctatggcgactggggataagcaggcgtcacctcagccagtgggtcagccacagccaggacagcagtcaggccagatccaccgttgcacgtttttatcaggcgatgtggctgaacgttgccagtggcgtgtcgctgacaatactgaccggacaatttgccccccaactgctgtggattgcgttaccgatcggtttggtatggtgtgtggccccgctgctgctgagctggctgagtcaccagcccgtgcgtaaggttttttcgccaactcaggaacaaaaacagctgttacgccagacaagccgtgaaatctgggctttttttgaaacatttgccacagcaaaagagaactggcttccgcctgataattatcaggaaataccacaaccgacggtggcacaccgaacttctcctaccaatattggcctttcacttatggctaacctgacggcatgggactttggctaccttcctggcggagaggtgctccggcgcgtgtcgctcacactcgacacgctggataaattggagcactaccggggccatctctacaactggtatgacacccgtacgctggttcccctcagtccacgctatatctccagcgtcgacagcggcaacatggccgggcatttgttgaccctgcgtgcaggcctgtctgccatgcgtcatcagcctgttttaagcagccaacagatactggcaggactgaacgatacgctggatattctggaaaaacagtggggtaagaccccacctgacagcctgagactgctgcgtaagcattgcctgaatgcggtgtcgctctctccgcaggcgtttatcagcgaactgaaaagcatgcgcacccagtgcaaccatctgaccagcgcatgtcatcagggagcttctcttcagatgcgctgggctggacatctggagcatcaactggttcagctttgccatgagtggtctctgttgcttggctggttacctgtatcctggaatgaacagacgctgccgacgctgagcgagcttgcccgtctgacattaaccgatacagaaacgcctccggcgtcagtggcggagcaggcccgaatgcgactcaatattatcaccgagctggaacagcgcttggatgagcatgcccggatggatttcgcctttctgtacagtgaagcaaccagtctgctcagcgtcggttataactgtgacacgaatacgcctgacaagagccactacgatctcctgccgtctgaaatccgcctgaccagttttcttgccattgcgactaatcagttgcctcttaaaagctggttcgcgctgggtcgattgtttaccacgattgataatgaaactgccctgatgtcatggagcggatccatgtttgaatatctgatgccgaatctggtgatgcccacctggcccggcagcctgctcgatgaaatgagtcagtcggcggttatgcgccagattcactgggggaaagaacgcggggtaccatggggtgtttcagagtctggctatcatgcttttgatgttcagcataattatcagtatcaggcatttggcgtaccggggctcggtctgcgcaggggacttgccgatgacatggttgttgctccttacgccacgctgctggcgctgatggtttccccacagagagcctgtgagaacctgttcaggatgcaaaaaaatggtgcacgcggagaatacggtttttatgaagcgctggactataccccctcacgtcttgcaaccggtcagctctatgcggtggtacagtcctggatggcgcatcaccagggtatggcatttcaggcgttggctcatgtactgcttgacgctcccatgactgaacgctttatgtccagcacggtattccggtcagcgagtctgctgttacaggagcgcgtgccggatgcggtcgatctgtacagtccgcgccgtcattttgaatctcatgagggcagggtcaaacccgttcgctatgaaccccgtattttctatagcgtggatacccccgccccggatattcaactcctgtccaacggccattatcatctgatgttgaccgcgggcggcggtggttacagtcgctggaatgatatcgcactgacgcgctggcgcagtgataccacccgtgataactggggagcattctgctacatccacgatacccagacgggagatgtgtggagcaatacctggcaaccaacaggctacaccagcggacaagacgaggaggtgttattcaccgatgcgggggcagaattcagacgcagcttcgggggactcagcctcaaaactcaggtggtgatctctccggaggatgatgttgaattgcgacggctcacgctgatccatcgtggtcgcaagcctcgctctctggagctgacaacctatgctgaagtggtactggcacctgatgccagcgatctggcacacccggcattcagcaatttgtttattcagactgagctggctcctgagcgtgacgctattctttgccaccggcgcccgtgctcaccggatgaaccggccccttgcctgtttcacatgatggtggtgcacggcgataaccgacataacgtgtcgtttgaaacggacagggcaaggtttattggacgtggcagaaaccctgcgaatgcacaggcaatagaggcgggagggatgctaggcaacacgtcgggctcggtgctggatccgatactggcaattcgcaacgccatcattctgcagccggggcagccggttacgattgatatcatttatggcatcagcgagacccgtcagcagagcctggcgttgctggagaaatatcgcgattatcctatcgccgatcgcgtctttgaactggcctggtctcacagtctggtggtattgcgccagatgaacgccagtgaagatgatgccacgttgttcaatagtctcgccagcgctgtgctttaccctgtccaggagctgcgcgccgaaggccaggcgatcgtccgcaaccggcgtggccagtccggactgtggggctgggcaatttcaggggatctgccgatagtgctgctgagtataaccagcgaggaaagtatcacctcagtgaccacactgattcaggcacaccgttactggaggcagaaagggctggatgttgatttggttatcctgaataacagtcccggcggctaccagcagggattacaaaatcagattatggagttaatttatgccgggtctgaagccagtctgctggataaaaagggtgggctttttgtccgcaacggtgagcatctctccgctgaggataagttgcttttgatgagcgtggcctgtctttatcttgatgatcgcgcaggggggattaatgagcagcttaaccagcgtattcataccctgaaatcgccggcaagggcattcattccgcgtgctgtgcgcgagcgtaatcaacatacggactggagccctgataccagtcagctatgccatttcaatgggtacggtggattttctcaggatgggcgggagtatcagatcgtccttcgggaaaatgcgcttacaccggctccctggtcgaacatactggcaaattcccgttttggcagcgtgatttcagaggcagggcaggcctatacctggtatgagaatgcccatgaataccggttgacgccgtgggagaacgatccggtgagcgatcgcagcggcgaggcattttacctgcgcgatgaagagagcggggagtgctggtcgccgacggctttacctgttcgcggacacggtgattacctgacccgccatggttttggctacagcgtttttgcccatcgtgagagtggtatagacagcgagttgacggtcctggttgctgaagaagagccagttaaactggtgctcctgacgctcagtaactcttcggggcggacacgtcaactatccgtcacaggctatgtagagtggacgctcggagaaacacgaacgcgctcagcccctcacattgtgacacatgtggtcagaacgcccggcggctgcggggtgcttgcgaataacttttatggtgataatggtggcggccgaactgcattttttgccgtcagcggtaatggctgttctctgacaggggaccgccgggagtttattggccgtaatggttcccttcacgccccgtcggccatgaaactgcaaaagctttctggtaagacgggggccggtctggatccctgcggagcggtgcaatcggcggttacattaattgacggggaccagaggacgtttatttttatcctcggcgcagaggagaatgatgtttgtgcacaggagacgctggcccgctacatgaatgaggatacggtccgccaggagctgaaccggattcataatcactggcacaatgtgctcgataaaatcgtagttaatacccccgacacgtccgtaaatttactggttaacggctggctgttgtatcagacggtagcctgtcgtcttatggcacggagtggttactatcagtctggcggtgcatttggttttcgcgatcagctgcaggatacgctggcactgaaccacgctgctccggaccggatgcgtgaacagataatactctgtgcatcacggcagtttatcgagggggatgtgcagcactggtggcaccctccacacggcaacggtgtgcgtacccgctgttccgatgactatctttggcttccgcttgctgtttgccactatgttgaaacgacgggggatatggatgcactggaaatacgcattccttatctggagggatgcccgcttcagcctggtgaagagtctgtctatgacacgccggtcatcagcggcaccgaagagacactctggttacactgcgtcaaagctattcactatggacttcgcttcggggagcatggcctgccgctgatgggggctggtgactggaatgacgggatgaaccgggtgggtatcgaaggcaaaggtgaaagcgtctggctgggcttcttcctgtacgacattttgcagcggtttgcagcgctggcggatcgcaggctggatgaaagcgtcgccgcgatgtgccgttcacaggctctgcgcctgcaaagtaatctcgaagcccacgcctgggatggggaatggtaccggcgtgggtattttgacgatggtactcccctgggatcgaaaacctcacaggactgccggattgatgcgattgcgcagagctggtctgtattgtccggcgccgcgagcccgggacggtgcgcaaaggccatgcaggcgctggataagcaccttgtggataacgaaggagggctgatcaaactgttaacgcctccttttgacggacacggtccaaatccgggctacatacaggggtacctgcccggtgtgcgggaaaatggagggcagtatacgcatggcgccatctgggcagtgatggcctttgcccgaatggggaatgccgaacgagcctggcaactctggtcaatgctcaaccctgtaaatcataccctgaatgcgggtctggtcgggatttataaagctgagccttatgttatgagtgctgatgtctacagcgtcgctccccataccggacgtgcagggtggagctggtataccggttccgcaggctgggcctggcgtttacttaccgaggaattactggggataaaacgttccggcactgactttagtgttcatgcccggtttccggatgagtggtcgtctttttctatggcatatcaatatggtgacagccattatcagattagtgtttcacgtggcgatgcagaatattgcgtgacgctggatggtgttctcctccctgatgacagaataccgctgaaggatgatggacaaaaccatacggttgagatcattcagaactga

SEQ ID NO: 34817 - DNA, 288 bp, Escherichia coli
ttgaaaattgaacgtcttatttatgatacactacccttccgtgagaaatttaagatgaaatcagaagacacccttgactggtatccggcacaactaccgccagtgaaaattattcttggcgaagccgtgctggctgtgggtaaacagggccgaccgattaatacccgcaccttgctggaataccttcaggtcatgcaggacaaacaaaaaaggcgggatgacaaaatcgccatgcagactgcgattgatgttctcagggataatcagcgcattaacggcagacgttaa

SEQ ID NO: 34818 - DNA, 273 bp, Escherichia coli
atgaaatctaaaaagtcagtttttattgaaggacatatcctgtcgaacagctgtcatgggcaggccggtcagcctttctgtatccacagggtcggttttagtaatggcaaatatgcaattatccgggaagcattaggcatatgtttcaaacctggcgaaattattcaacgaaacgattgtgagtggttttataaacttaccaaaattcggcttctttcttttgagtaccttgatgatgatgaatcaagaagacaatttcttgaatatcaatga

SEQ ID NO: 34819 - DNA, 207 bp, Escherichia coli
atgaggtgcttcgcgggcgcgtgtcgtttcgttttcaatcgtgctctggcacgtcagaatgagaatcatgaggccggaaataaatatattgcctacacgaaaatgacctcgtggctggttgagtggaaaaatgcccatgaaacacaatggattaaagattctccctcaccgccattgcaacagtcactgaaagaccttgatcgatag

SEQ ID NO: 34820 - DNA, 606 bp, Escherichia coli
atgcccgacacaaaggtcatgcagttttcgtcagcagtacccggcgtgcgcccgaggctgacttcatacatcacgctccagccctgcccgaacatcccttccgtgcggtcgtcacgactgctgtacacgcgctgccagtccagcggaaagtggcccggcagactgaaatcgaagtcatcgtcatcggccagatatttggctccggtggcggcattgaccggatgcggaagggcactgatggccttctgcgtcatcacccccatcccgacactggcagcaaaacaggcgattttagaaagcattttgcccgggcgaagaaacatcagcgccacggttgccaccagggttatctgcgacctgccgcttctgatatccctgaccaccagtaacggaccgccaatgcggacatccggtgacacaaacgccccgttccccggctcattcaccaccctggcctcgcaggtgcagcgtgccccgctgcgtgccgccggctggctgttgatacgcacatcccgcgcgccttccgcgatatattccgctgcgggcggttcatcatcgcctttgaacagattactgatgctgccaataaccgcattcactccctga

SEQ ID NO: 34821 - DNA, 414 bp, Escherichia coli
atgttaaagcgttatttactactctcggtggcaacggctgcattctcattaccgtctttggtttatgccgcacaacaaaacattcttagcgtgcatattttgaaccagcaaacaggaaaacctgctgccgatgtgacagtcactcttgaaaagaaaacggataatgattggttacaaattaataccgctaaaacagataaagatggacgaattaaggcgctgtggcccgaacaaactgcgaccacgggcgattatcgtgtcatatttaaaaccggggactatttcaagcaacaaaatcttgaaagtttctttcctgagatccccgttgaatttcatattaataaactgaatgaacattatcatgtgcctttattgctcagtcaatatggatattcaacctatcgtggaagttaa

SEQ ID NO: 34822 - DNA, 993 bp, Escherichia coli
atgaaattaaaagaatctgatattaccgccgagtcggctttttttatgcaacgtcggcaagttctgaaagcattagatatcagcgctgcagccctctctttaccaaacgccgcccatgcggatgtgcttagctggtttaaagggaacgatcgcccatccgcaccaaccggaaagccattagaattcagcaagcctgccgcctggcaaaataacctgccactgacgccggaagataaagtttctggctataacaacttctatgagttcggactggataaagccgatccagcggccaatgccggcagtctgaaaactgatccgtggacgttgaaaatcagcggtgaagtcgctaaaccgttaaccctcgatcatgatgcactgactcgtcgtttcccgctggaagaacggatttatcgtatgcgttgtgtagaagcatggtcgatggtggtgccgtggattggttttccgctgcacaaattgctggcactggcagaaccgaccagtaacgcgaaatacgtcgccttcgaaaccatttatgcgccggaacagatgccaggccagcaggaccggtttattggcggcggcctgaaatatccttatatagaaggattacgtctcgacgaagcgatgcatccgctcacactgatgaccgttgatgtttatggcaaggcgttaccgccgcaaaatggcgcaccggtacggctgattgtgccgtggaaatatggctttaaagggattaaatcaattgtcagtattaagctgacccgggagcgtccgccaaccacctggaatctggctgcgcccgatgaatacggcttttatgccaacgtcaatccacatgttgatcatccccgttggtcgcaggctaccgaacggtttatcggttcaggtggcattcttgatgtacaacgtcagccaacgctgttgtttaacggatacgccgatcaagtggcgtcgctttatcgtggactggatttacgggagaatttctaa

SEQ ID NO: 34823 - DNA, 636 bp, Escherichia coli
gtgcgactgacagcaaaacaagtgacatggctgaaagtttgcctgcatcttgccggatttttgccgtttgtctggctgatgtgggcaattaaccacggtggattaagtgccgatccggtgaaagatattcagcattttaccggtcggactgcgctgaaattcttgctggcgaccttgttggttacaccgctggcgcgctacgctaaacaaccattattgattcgcactcgccgcctgttgggtttatggtgtttcgcctgggcaacgctgcacttaaccagttatgccttgctggagctgggagtgaataatctgacgttattgggtcaggaattaatcacccgaccttatttaacgctcggaattatcagttggctgattttactggctttaacattcacttccacgcaggcgatgcagcgaaacttaggcaaacgctggcaacaattgcataacttcgtctatcttgtcgcgatcctggtccccatacattatctgtggtcagtaaagattatctcaatgcaatcagtaatttacgctgtcctggtgttgctacttttaggcttgcgtcataataaatggttttctctgttcaaaaagttacagaagttgtttcaacacaaaattacaacataa

SEQ ID NO: 34824 - DNA, 1176 bp, Escherichia coli
atgtttaagcccgttctctccgtaatccccatttggttattgctgttttttggccctgtcgccgaatcggcgctagttgctactggctcaaatgcaaatattagctttagccagagctttgagactcaggaaaaaagtgggcaatggatatatgttaaagatctggaccttcctgcatatgattcacttttgaatggacaatgttctacatcttatctttgtgcctatggggagtcaaagttagggtataatggtaaagcaaatttatctttaagaattgatactgagcatcgtgtggttactgactctgaaggaaggaaatttgagttgacagtggcttttccatacggcccaccaacaattggtatttctgaaaaaaattgggcaaatgggcgggaatggaataatacatataatttttctcaggctgtagataaaccacaaaataataagtcatctgtttcctctcgccatatatatggacagggatactgtggctctttatcaggatgtggttatggtttttctagttattttcatacatcaacaaaaaaacccgccttatatgttaaattaccagaaaatataaagccgggaaccgttagctttaaggatgtgcccatactgaccctggcctctactgtagataatgcagcgcataatgatacagcaaaccctgaaccaagacagcttttattaagtggaactataactattccacagagatgttatctgaatattgaaggatctggaactattgattttggaagcatatattccaatgctccaaatggaatgattaagcaacaacaaggtgccatagtaaccacatgtcataatgttccaaacaataccaaacagtatattaaagtcagtgggcgctctggtggtaatgtaactaaaaatggatttatttatgaattcgtaaaagatacaaatgctcagggagcacttggttttgcctttagctttggaaatcaagctatttgtagtgctgcaactgaggataagaataaattcgatgcagaatatctgattagaacaatcacttcaggcactccgaatataacgtataaagataacataagtttttctttgtgtaagtatggtattcctgcaacatatgggcagaaatcggtggtaataacagtgacttcacgctgggtggtagaatag

SEQ ID NO: 34825 - DNA, 519 bp, Escherichia coli
atgaagaaaatgattatgcttatttttacatatctggctctttttcctgcaagtgtatatgcaaaagaggagttatcacaatcagtggattttacgttgaaagtgaacgtattaaaaccagtatgtaaactaacgacagatactcagaccattgacttcggggaggttgatgttgatgatttaacaaaaataaaaggtagcgccacatttaaatttatagattgtgataatgtagaggggttaaaaattcgttttgaaggagacgaacttgataaagagaataacgtcattagaaataaagttgggagtaattatgcgacgggagtatattttaaattgtatgatgataaaaattatgaaattaaacttgatgatgataatgttattaacatcaataaggaagcaaattacgatttgaagctgacagcaaaagtgctaagggatgagttgggggcaggaaataggttttccccaggcttgttaaactcttctgttgctctggaaattacatatgaatag

SEQ ID NO: 34826 - DNA, 705 bp, Escherichia coli
atgcgtaaattatcttatgtttttattcttacgggtgcactgttttgctcatacgcagggggagcctcttttggtcctcgagaaagcatgctgatttttgatgggcggcagagtagtacctcttaccggatggataactctgataccagactcccctggcttgttcaggcgtgggttgaggatatcgacgaaaatcgcactgatgcatttacgtccgtaccgctggtttttcgggtggagccctcatccacgttcaccatccgtattataaaaaaaggtgccattccggaagaccgggaaacattgttctgggctgtctcaaactccttgcccggaggggggcgcggtgagcagaagtccgagggtgacaaaatcagtgcgcagctcagtatggcgtacaggtttaaggttcccatgatttatcgtccagctgcactttccagcactcctcagcaacctgagtcccttcaatggcgtatagcaagtggtgggaaagtgactgtacataatcctacgcgttatgtagtgcggcttaattatgtgagcgtgggcggtaagcgccaccaaggaaaaggtatttcacgatttatctctccagataagagcgtggcggtggatatcagtgcgggtaccggcagcctgataaaatatggcgtcgtgaacgattacggggcggtgcgcgaatatgaaggagtcgtccgttaa

SEQ ID NO: 34827 - DNA, 594 bp, Escherichia coli
atgaaaaagacaattatgtctctggctgtagtttctgctcttctcagtggtggagctatggctgcactgaacaacggtcaggcagataactcggcaagtaccgcaactctgaattttaccgggaaagtgacttccagtttgtgtcaggtcaacacctccgatctgacaaaaacaatatctttgggtgaggcatctgcagcagctttagctgctggaggacagtctccattccagagtttcactgttggcttgtcgaactgtgaccctaccacggctaatatcacctatacaatccgtgatggtaatggcttgcctggccaaggtaaccaacagtcagactatttgattcctaaatctggtgatacgtctgcgtcaggtgtgggtgtgtatattgcagatccagagcataaggctattaagatcggtgctaaccaaacagctggtgtaacgcaggttgatggtaaggccgagtcagaacaaacaattgctctaactgcttatattaaagctactaacggtgatggaaatgtgaaacctggtattgttgacgccacggggattatgaccatcaaggctgcagctgctgacgaataa

SEQ ID NO: 34828 - DNA, 576 bp, Escherichia coli
atgaagcaacgtaaatatttgacacaatcagaagtagaacttttgcttgcagaggcaagaagaagtagcacaccggagcgtgatcgttgtctgctttatatgagtttcattcatggtttcagggtgagtgaagtttgtgccctgcgactgactgatgtgagcctgcaggacaggtgcctgcatataaagagaatgaaaaacggattcagtactatacatccgatacaaaatgatgaggcccggatattgaaggcatggctgaaagtcagaagttcacttcccggtgcggaaagtcaatggctgtttgtatcccggcaggggggagggctgacacggcagcgggtgtggcaggtgataaagcatctgggcgaacaggctggaattgaagtgcattcacatcctcatatgctgcggcatgcctgtggctttgctcttgctgatcgtggtgtggatacccgtttgatacaagactatctggggcaccgtaatatcaggcatacagtgatatatacagcgagtaatgttgaaagattccgcaatgtatggtcaaaaaagaagctgcggttagacaaatag

SEQ ID NO: 34829 - DNA, 504 bp, Escherichia coli
atgagattttcatattatttcttcgtggtgatattatttgtaagtgcattattaattattaatagtaataataatgtaaggttgtattcagagcgtgagtataaagatatgcttgagcatacagacataagaatagatgggctaagatttaatatattgcattatatgcttgacaatagctcaagattgattatttctgaaaccctttcagggatggtgatcaggacaagtctgcacggctactttttaataccgttccatacgtataaaacatccaatacaggcactcttcaatctattggggctgtgttttctgtgtgtgcttaccacaccaataacaacaatattgttttttttgatggttccagggctgcattatcagataacaacaaaataataataccgccaacaatatttttgggacaaaagaaacataacaaacatccggcatggataaatgaaatgaataaaaatactccagctgtgagagttgttgattattaa

SEQ ID NO: 34830 - DNA, 636 bp, Escherichia coli
atgaataaagtaaactcaggtaatgagattcgcgtcgatacattaaagaacttaataataataaaaggggaacctaacttattatctaaaaacgagtgtcttctgataagatatttttacgagagacaaggtataactatctccagagatgagttaatacaacaatgctggccaggaagagttgtatctccgacatctcttcccgtggcaataaaacatatcagggatatcttgaaaaaggcagggtataatgaagtaataaaaactcataaaggtgaaggatactcactacttcccggtatattagaaattgattttattgaggggggggcagaaaacaaatctgaagatttctgtaaaacacgaaaaaatacacgtaatctgttataccctcgccaggctttatcctttataacaattgggttaagcatgttttcgggggtgtttttgggattgactatatgtactaataacataaagcactggcgtacggataacggggcattgatcatatcaagttcgaaaatgacctctcagattgccgagtatacctcatatcaggaaggttctgttttcatcgatgacatgggatctgctcttatttgtgataaatttaaatgctatttttcaaaatga

SEQ ID NO: 34831 - DNA, 273 bp, Escherichia coli
atgtgcgagtatagtgacttgtttaacacactgcatatggtgtttttattcataatttatatctgcacgattaaatatataaagaatgcaattattcttcgtgagtttttgttggggaataaacactcagtgcgcagacaagttttttttgaaaccctcaggaattttttacgcactaatctaagttattgcataattatagccctgataattagcgcttacacatgtcttatgatgatacctcttgttacagattttttcctggtagagtaa

SEQ ID NO: 34832 - DNA, 210 bp, Escherichia coli
atgtcagaggatgtcgcgctggttcccgaattcaatcctgaccatttgcataaatggatacggctgtataagcaagaacttcaggatattgactccactgttaatgatattactcctgaacaactcgaaattcagaaaattaaagagcaaataaaacgtcttgagacgggaaaaggaatactaaagcagattgtcatgttgatgagctaa

SEQ ID NO: 34833 - DNA, 579 bp, Escherichia coli
atggacagaaaaaataagggaaagattctcctgatcggaacctgctggtatgagctgacaggattgttgaatctgttattagtacagggacacgacgtctatcgtgtaccgctggggtattcctgtgtccgggaggggtgggacctgattattgtggcgctgagtgcagagcctgttgcgggatggggacgtcatctttcccgtatacgtgaactgagtgcggaaatgtttggtgaaatgctggttctggtgccggaaaggctggagatgctgaaggtgttgcgaaatatctgcccggtatacagcggatgcttacctctgccggacctggaaagaactgtgcgtatggcactgaacagaaacgcagttcgtaccggtaaatttcgcctgacgtccgggcaacgactggccctgaagcgtctttccgggagggggagggagcgtcccctgaacctgaaacagagtgagcgcggtctgtactggcattatgcccggctggctgaaaatgtgggggtgagagatttcagaatgctgttaatgaccgggctggacagggaagtcaataaaatggaggactga

SEQ ID NO: 34834 - DNA, 780 bp, Escherichia coli
atgaaaaaaactctgattgcactgaccgtggctgcttctgcagcaatatccggttctgccatggcgtggactccgaatggcaacggtggttctgttcaactgagcggcatgttgactccggatgttaaggtgaccccatgggaagttaaagtaggcgatgcggtaaaaggtctggatgcaaagatcaataagggtcagaagaccgttgatatcgcagtgacgaaaactattccgattctgggtattcgtactcagactgctgaggtgtttcatggacaggctggtatcactccgcagattagctatggtaatgcggttaaaacggattcatttagcaaaggttctgcaccattaactctggaagtaaaagattctactggtgtgaagattggtacagcagagacttctattgtggctgcagcagcctcttcctacgttgatacagccggacataaaatctattcattatatgcttctaaaagtggatatggcttttttggaggggttggtaaaagtgctgatgctgtagctagtaaccctaacgttgttgcggacaatatcttggctgaagcgagaaaacattataataaccaggggtactatatcaaccctgagccggggcaaattacgtttgacatcaaggatgcttcttatagcgcgtattatgtatcaggcatagaaaaagacaaaaccatcaaaatcacccttgatgatgctgcttgcggcgatgctccaattcagtggaaagcttctctgccgattattgtatcttatatgtaa

SEQ ID NO: 34835 - DNA, 783 bp, Escherichia coli
atgaaaaaaactctgattgcactggccgtggctgtttctgcagcaatatccggttctgccatggcgtggactccgaatggcagcggtggttctgttgaactgggcggtactctgacacctgcagggaaaactacgccctggtcagttaaggtggggaatacaagtgatttagatgcgaaaattaaagaaggtcaaagcgttgtcactattccgcttaatcagccagctttatttttaggaattactaccactgctggtaaggctggtttttacgggcaagacggtattagcccacaaatcgactatagtggtgctgtcgatttagataaatttaaagaggggcttacccaagtaaaaattccagttaaagatcaagatcaaaacgatattggttatatggaagctaattttactgctggtgcaatccaacagtggaaagaaaaagatacaggtacggttaaacgcaacagtctgtatgctgccaaatcaggcgatgcattctatggtggtgtaggtaaaaatagtgacggagttatggttagttccttggttaaggggggactagacgagctagatcctgaaattgcaaataccgcttgggataattatacatcggtttctatttcaaccgctgactttaaaggtgactggcactaccaagggtactatggtggcggtattaaaaagggagaaaacataaaaattactttaaacacacctgctaaaggtggtgaggcattaaagtggtatgcctccctgcctgttgttgttagttatcagtaa

SEQ ID NO: 34836 - DNA, 468 bp, Escherichia coli
atgctcaaacccgacagcctgcgcagggcgctgactgatgccgtcacggtgctgaaaactaaccccgatatgctgcggatattcgtggataacgggagtattgcctccacactggcgacgtcgctgtcattcgaaaagcgttacacgctcaatgtcattgtgaccgactttaccggtgattttgacctgctcatcgtgccggtgctggcgtggctgcgggaaaatcagcccgacatcatgaccaccgacgaaggccagaaaaagggcttcacgttttatgcagacatcaacaatgacagcagctttgatatcagcatcagcctgatgctgaccgagcgcacgctggtcagtgaggtggacggcgcgctgcatgtgaagaatatcccggaaccaacgccgccggagccggtcacccgcccgatggagctttatatcaatggcgaactggtgagcaagtgggatgaatga

SEQ ID NO: 34837 - DNA, 159 bp, Escherichia coli
atgccgggcagtgacccggagacgaacggtgatttaagtgccgatatccggcagcttgagaacgcgctggcacgctgtgccagccaggtaaaaatgattaaacactgtcaggacgaaaacgatgctcaaacccgacagcctgcgcagggcgctgactga

SEQ ID NO: 34838 - DNA, 426 bp, Escherichia coli
atgtcaaaactgatgattgtgctggttgtgttgttatcactggcggtggcggggctgtttctggcgaagcatgaaaacgccagcctgcgcgcctcgctggacagggtgaacaacgtcgccagtgaacagcaggtgaccatcaccatgctgaaaaatcagcttcatgttgccctcaccagagcagacaaaaacgagctggcgcaggtggcactgcgtcaggaactggagaacgccgcgaagcgtgaagcacagcgcgagaaaaccatcacgaggttacttaatgaaaacgaagattttcgccgctggtacggtgctgacctgcctgatgctgtgcgccggttgcaccagcgcccggcctgcaccgacgccagtgattgtcgccaacgcctgcccgaaagtgagtctttgcccgatgccgggcagtga

SEQ ID NO: 34839 - DNA, 282 bp, Escherichia coli
atgacagcagaagaaaaaagcgtcctgtcgcttttcatgattggggtgctgattgttgtcggcaaggtgcttgccggtggtgaacccatcaccccgcgtctgtttatcgggcgcatgttgctcggtggttttgtctcgatggttgccggtgttgttctggtgcagtttcctgacctgtcactgcctgcggtgtgcggcatcggctccatgctgggtatcgccggttatcaggtgattgagattgccattcagcgtcgctttaagggcagggggaaacagtaa

SEQ ID NO: 34840 - DNA, 204 bp, Escherichia coli
atgaagacctttgcgctacagggcgacacgctcgacgccatttgtgtccggtattacgggcgcactgagggcgtggtcgaagccgtgctcgccgcaaatccgggactggctgaactgggtgcggtgctgccacacggcaccgccgtcgaactgcccgacgttcagaccgcgcccgtggctgaaactgtcaatctgtgggagtaa

SEQ ID NO: 34841 - DNA, 510 bp, Escherichia coli
atgatgacgctgattattccgcgaaaggaggctcccgtgtccggtgagggtacggtggtcatcccgcaaccggcaggcgacgagccggtgattaaaaacacgttctttttccccgatatcgacccgaagcgcgtccgggaacgtatgcgccttgagcagaccgtcgcccccgctcgtctgcgtgaggccatcaagtcaggcatggcggagacgaatgcggagctgtacgagtaccgcgaacagaaaattgccgccggttttacgcgtctggcggacgtcccggcggacgatatcgacggtgaaagcatcaaagttttttactacgagcgcgccgtgtgtgcgatggcgaccgcgtcgctttatgagcgttatcgcggcgtggatgccagtgcgaaaggcgacaagaaggctgacagcattgacagcaccattgatgagctgtggcgggatatgcgctgggcggtggcgcgtatccaggacaagccgcgctgcatcgtgagtcaaatctga

SEQ ID NO: 34842 - DNA, 744 bp, Escherichia coli
atgacgagtcccgcacagcgccacatgatgcgggtctcggcagcgatgaccgcgcagcgggaagccgccccgctgcgacatgcaactgtctatgagcagatgctggttaagctcgccgcagaccagcgcacactgaaagcgatttattcaaaagagctgaaggccgcaaaaaaacgcgaactgctgccgttctggttgccgtgggtgaacggcgtgctggagcagggcaaaggcgcacaggatgacattctgatgacggtcatgctgtggcgtctggataccggtgatattgccggcgcgctggagattgcccgttacgccctgaagtacggtctgaccatgccgggtaaacaccgccgcaccccgccgtacatgttcaccgaggaggtggcgctcgcggccatgcgcgctcacgctgccggtgagtctgtggatccccgcctgctgacggacacacttgaactgactgccacggcagacatgcctgatgaagtgcgcgcaaagctgcacaaaatcaccggtctgtttctgcgtgacgctggtgatgccgcaggggcgctggcgcacctgcaacgtgcgacacagctcgactgtcaggcaggcgtcaaaaaagagattgaacgactggagcgggagctgaaaccgaagccggagccgcagccaaaagcggccacccgtaccccgcgtaagacccggagcgtgacaccggcaaaacgtggacgcccgaaaaagaaagccagttaa

SEQ ID NO: 34843 - DNA, 1074 bp, Escherichia coli
atgcgccaggaaacccgctttaaatttaatgcctacctgtcccgtgttgccgaactgaacggcatcgacgccggtgatgtgtcgaaaaaattcaccgttgaaccgtcggtcacccagaccctgatgaacaccatgcaggagtcctctgactttctgacccgcatcaatattgtgccggtcagcgaaatgaaaggggaaaaaattggcatcggtgtcaccggctccatcgccagcaccaccgacaccgccggtggcaccgagcgtcagccgaaggacttctcgaagctggcgtctaacaagtacgaatgcgaccagattaacttcgatttttatatccgctacaaaacgctggacctgtgggcgcgttatcaggatttccagctccgtgtccgtaacgccattatcaaacgccagtcccttgatttcatcatggccggttttaacggcgtgaagcgtgccgaaacctctgaccgcagcagcaatccgatgctgcaggatgtggcggtcggctggctgcagaaataccgcaatgaagccccggcgcgcgtgatgagcaaggtcactgacgaggaagggcacaccacctctgaggtcatccgcgtgggtaagggcggtgattatgccagccttgatgcactggtgatggatgcgaccaacaacctgattgagccgtggtatcaggaagaccctgaccttgtggtgattgtgggacgtcagctactggcggacaagtattttcccatcgtcaacaaggagcaggacaacagcgaaatgctggccgctgacgtcatcatcagccagaaacgcatcggcaacctgccagcggtacgcgtcccgtacttcccggcggatgcgatgctcatcacgaagctggaaaacctgtccatctactacatggatgacagccatcgccgcgtgattgtggaaaacccgaaactcgaccgcgtggagaactacgagtcaatgaacattgattacgtggtggaagactacgccgccggttgtctggtggaaaaaattaaggtcggtgatttctccacaccggccagggcgaccgcagagccgggagcgtaa

SEQ ID NO: 34844 - DNA, 477 bp, Escherichia coli
gtgagccggtgccggtactcgaccgccgtgacattctggattatgtcgagtgcatcagtaacggcagatggtatgagccaccaatcagctttaccggtctggcaaaaagcctgcgtgctgccgtgcatcacagctccccgatttacgtcaaacgcaatattctggcctcgacatttatcccgcacccgtggctttcccagcaggatttcagccgctttgtgctggattttctggtgttcggtaatgcgtttctggaaaagcgttacagcaccaccggtaaggtcatcagactggaaacctcaccggcaaaatatacccgccgtggcgtggaggaggatgtttactggtgggtgccgtccttcaacgagccgacacctttcgcgcccggctccgtgtttcacctgctggagccggatattaatcaggagctgtacggcctgccggaatatctcagcgcccttaactctgcctggctga

SEQ ID NO: 34845 - DNA, 219 bp, Escherichia coli
atgtttcattgtcctttatgccagcatgccgcacatgcgcgtacaagccgctatattactgacacgacaaaagagcgttatcaccagtgtcagaacgtgaattgcagcgccacgttcatcacttatgagtcggtacagcgatacatcgtgaagccgggagaagtccacgccgtaagaccgcacccgttgccgtcagggcagcaaattatgtggatgtaa

SEQ ID NO: 34846 - DNA, 990 bp, Escherichia coli
atgagcattcaaatcaggccaagtgtcactaacccaactattgcagatatatatactgaaattagtgatggtcgactcattttgaaaccagatttccaaaggaaatttgtctggacgcatgagcatcaagaggcgtttatagatacgattcttaaaggtctcccctttccagagatatatgtatgtgagggtgaattagatattaaaaagcttaggacaacaaaactggtaattgatggtcagcaaaggttgactacaattagaaattatattgatggaaaaagtgaaaaaccgtatactggcatacctgcgtttgattcattagatagtaagcaacaaagcgactttgtcaaatatcaacttgttgttagagatttaggtcgaattgatgatgcaaccactcgagagatttttagacgaataaatctcacgaaatttaagctagatgatatcgaaatacataatgcggtatatgatgggcattttatcagtgctgcaaaagatatattaaaccatgtttcctttggagattatggtgtgttaaaagagtctgaattaacaagaatggcagatctctattttatattgcttatcatgactacattagagaatggtggctactttgctcaagatagagaaattgaacctattgttgcaagatataatgatgaatatccaaataaaaaacatatgatttcacagatcattaaagtctttgctataattaaggatcttaaccttcctgcagactcaatgtggttccgaaagtctaattttttaactatgactgttgagttggcgaaaaatatcaatataatccctaacaatttaagagagaggttaattaattttgaaaataatgttatggagaacaaactgaatactgagtcgccatattacaaatattactcttatatgtttcaagggactcatagcagagctgcgcgtgtaactcgtggtgatcaattcaaagaagagatatttggttaa

SEQ ID NO: 34847 - DNA, 609 bp, Escherichia coli
atggaacagtacatagacacacttacatctattgatgacgaacaacagttactggatttttgcaggaaaaaaattctgcatggaacaccctttatatttaaagatagagaggatgaatattatgagtttagaaaaaaaatagctgatgaatttaatattaatttccataatgtcctgataactggttcaggaaaactggggtttagtccatataagttaaaagaatttgatatggattcagatattgatgttgccattgtttcgtccaagctttatgacgaaatcatggtttcaatatctcattatcaaagagagttgcgagagaatcggataaaagtatcagccagcgaaataggaatgtatcacaaatttcttgaatatggcgctcttggatggatacgaccggatttattgccattatctttcaatattaaagaattaaaggataaatggtttgatttctttgactctttatcttatggccgttcagaagtcggtaattataaagtggccgcaggtgcatttaagagttattggcatcttgaaagttacaccatgatgggattagctaagcttaaaaataaatataaagttaaggaggtttcatga

SEQ ID NO: 34848 - DNA, 165 bp, Escherichia coli
atgcgattcgatgcagtaatgcatgcagagctaaaaatggcagaacatactgaaaaaacgcataaaaaaaccggcattcaggttgccggtttgagtcggcttcattgtggttactggccgcgctatgcgccaataataccaggagtcaatctgataaccagctaa

SEQ ID NO: 34849 - DNA, 396 bp, Escherichia coli
atggacaaaattatatttagatccgagtctgatagagagaatgcaaaggcaagtgataccgaagctatttggtatacagtagtgaatgagctgaaacaatcagaacaaatggcaagtacaaatccatggaaccaagatgatgcgattataaagaaaagattttgtttattagatgattgtgttatttctatacgttcggcaagagctgaagatagaatagaaaaaagagattataataaaggatattattttattgagataatgaaccaagatgaatcgataaaatttagctcacataaaatatattcatgggaacaagttattgaatgtgcgtcttggttcaaaggagtatcttttttagctgcgcaaagaatatggaaagtaaagaagttgtaa

SEQ ID NO: 34850 - DNA, 291 bp, Escherichia coli
atgaaaaatatattgcttaataactggctgaagatttcagtcatgaaaaatggtgatttgtcgctagctgatattaaacgcgataaaaacactggggatatggtggaatcaactatagccatttatgcggataaattaaatctcctgtctgatgtggtcaatttacttgttaaacgcgctgtatttcataagcaaatttcatccgtggatgaactgacaaaattaacgacagaaatcgccagctattgcgctgatgaatttaagaagctgaacgacaaaaggagctggtaa

SEQ ID NO: 34851 - DNA, 246 bp, Escherichia coli
atgacaaatacaaaatggttcaggaaacgcttaacagattatcaactttcattacttaaaaaattagatgacaagactccactacatccttcaagcgatgtcttccgctcctgtcctagtcgtgtggaaaaagcatttatagcaatggggaaatgggggcttgtgaccaaatcaagagaaggtttctgtattaccgataatggccgggaaatgattgattctgcggagagggcatatagcgaatga

SEQ ID NO: 34852 - DNA, 279 bp, Escherichia coli
atggactctgttagtcaaagtgtgagcaggaacaatatcagtattactctgacgcgcaaggagtttcagttactttggctactggcctccagagctggcgaaattatacccagaacggttattgcgagtgaaatttggggaatcaactttgatagtgataccaatacggtggatgtcgccattcgcaggctccgcgcaaaagttgatgatccttttcctgaaaagctcattgccacaatccgtgggatgggatattcattcgtagtggtaaaaaaataa

SEQ ID NO: 34853 - DNA, 453 bp, Escherichia coli
atgaatgagtttaagcgttttgaagaccggctgaccggactgattgaatcgctgtcaccgtcagggcgtcggcgactgagtgccgaactggcgaaacgcctgcggcagagtcagcagcgtcgggtgatggcacagaaagccccggatggcacaccctatgcgccacgccagcagcagagctccagaaaaaagaccggtcgtgttaagcgaaaaatgtttgcgaaacttatcaccagtcgttttttgcatatccgcgccagcccggaacagtcatcaatggagttttacggcgggaagtcaccgaaaatcgccagtgtgcatcagttcggtctgtcggaagaaacccggaaagacggtaagaaaattgattatccggcgcgtcctctgctcggctttaccggtgaggatgtgcagatgattgaagagattatcctggctcatctcgaccgttag

SEQ ID NO: 34854 - DNA, 435 bp, Escherichia coli; identical to SEQ ID NO: 14667

SEQ ID NO: 34855 - DNA, 177 bp, Escherichia coli
atgaccatcaacgatgacatccatcacactgatatgaatcgggttgggattctctacaatcaggtttcgcccttcccggtgccacttcaccttcggtgcagcatcttcgggaatcaggcgaatgcttgccggtcgccagaacagcttgatacgcgttttaactgcgatttccagtga

SEQ ID NO: 34856 - DNA, 177 bp, Escherichia coli; identical to SEQ ID NO: 26476

SEQ ID NO: 34857 - DNA, 1491 bp, Escherichia coli; identical to SEQ ID NO: 22699

SEQ ID NO: 34858 - DNA, 618 bp, Escherichia coli
atgattaaggtgtatggcgtacccggatggggctctacaatcagtgagctgatgctaacactggctgatattccttatcagttcgttgatgtcagtggttttgaccacgagggaacctcacgcgagttattgaaaaccctgaacccgttgtgtcagattccgacactggcgctggaaaatgacgagattatgacggagacagcggcgattgcattgatggttctcgatcgtcgcccggaccttgcgccaccggttgggcgcgccgaacgtcagcagtttcaacggctattggtctggctggttgctaatgtctatccaacattcactttcgccgattaccctgagcgttgggctcctgacgcacccgaacagttaaagaataatgttattgaatatcgtaaatcgctttatatctggctgaattcacaattgaccgctgaaccttatgcctttggcgagcaactaacgctggtggactgttatctctgcaccatgcgcacatgggggccggggcatgaatggtttcacgataatgcgcagaatatcagcgcgatcgctgaagctgtatgtcagttaccgaaattacaagaagtattaaaaaggaatgtcattatttaa

SEQ ID NO: 34859 - DNA, 474 bp, Escherichia coli
gtgtctttcccgtatgccggtgaatggctgacggaggaagaaatcagggcggtttttgatgcgatgcgcgatgcagtatgcagtgtcagttgccgggtggcagaagatgcgcggcgtatccgtgcggcgttgactaccaccggtcagacgttgctgacccgccagacgcgccgctttcgtctggttgtgaaggaaagcgatcacccctgctggctcgatgaagacgacgaaaacctgcccgtggtgctcgatgccatcctgaaccggggcgctcgtttttcgtcggtggaaatgtatctggtcagtgagtgtgtggagcatatcctgtccagtgggctggcctgcgatgtgctgcgtatacctgatgaaccgtcccgtcgctggtttgaccgggatattctgcgggaggtggtcctggaagcccggactgaaatccgcagcatggcggatgcactggcgaaaatccggaaatga

SEQ ID NO: 34860 - DNA, 555 bp, Escherichia coli
gtggcactggtccacagtcatcccggtgggctgccctggctgagcgaggctgaccggcggctgcagataaaaagcgcactgccctggtggctggtctgccggggtgacattcacaaattccgctgtgtgccacatctgacgggacggcgctttgagcacggggtgacggactgttacacgctgttccgggatgcttatcatctggcggggactgaaatgccggattttcatcgcgaggatgactggtggcgcaacggccagaacctttacctggacaatatggcggtcaccggcttttaccgggtgcccctgtcctctgcacaggcgggcgatattctgctgtgctgctttggtgcttcggtaccgaaccatgccgccatttactgcggtaacggtgagctgcttcaccatctgcctgaacaactgagtaaacgggagaggtattccgaaaaatggcaacgacgaacgcattctgtctggcgtcaccgccactggcacgcatctgccttcacggggatttacaacgatttggccgccgcctcagcctgtatgtga

SEQ ID NO: 34861 - DNA, 336 bp, Escherichia coli
gtgatcacccgcacggtgaaggtcaccaatgtgggccgtccgtcgatggcagaagatcgcagcacggtgacggcgacaaccggcatgacggtgacacccgccagtgcttccgtagtgaaagggcagagcaccacgctgaccgtggcattccagccggagggcgcaaccgacaagagcttccgtgcggtgtctgcggataaaacaaaagccaccgtgtcggtcagtggtatgaccatcaccgtgaaaggtgttgctgcaggcaaggtcaacattccggtcgtatccggtaatggtgagtttgctgcggttgcagaaatcaacgtcaccgccagttaa

SEQ ID NO: 34862 - DNA, 291 bp, Escherichia coli
atggcagaagatcgcagcacggtgacggcggccaccggcatgacggtaacgccagccagtgcttccgtagtgaaagggcagagcaccacgctgaccgtggccttccagccggaaggggcaaccgacaagagcttccgtgcggtgtcttcggataaaacaaaagccaccgtgtcggtcagtggtatgaccatcaccgtgaacggcgttgctgcaggcaaggtcaacattccggttgtatctggtaatggtgagtttgctgcggttgcagaaatcaccgtcaccgccagttaa

SEQ ID NO: 34863 - DNA, 144 bp, Escherichia coli
atgtcccaacctcgcccactgctctctcctcccgaaactgaagaacaattgttagcgcaagcacaacaactttctggttatacattgggagaactggcggcacttggccgggctggttacgccggagaatttaaaacgcgataa

SEQ ID NO: 34864 - DNA, 588 bp, Escherichia coli
ttggccgggctggttacgccggagaatttaaaacgcgataagggctggattggcgtgttactggagatctggctaggtgccagcgcagggagtaaacctgagcaagattttgctgctctgggcgtggaacttaaaactatccctgtggatagtcttggtcgtccgctggaaacaacattcgtttgtgttgccccgttaacgggcaatagcggggtgacctgggaaaccagccacgtgcgccacaagctcaaacgcgtgctgtggataccggttgaaggcgagcgcagcatcccgctggcaaagcgtcgcgtaggatcaccgttgctgtggagcccgaatgaagaggaagaccggcagttacgcgaagactgggaagaattaatggatatgattgttctcggtcaggttgagcggatcaccgctcggcacggggaatatttgcagatacgaccgaaagcagcgaatgcgaaagcgctgaccgaagctattggtgcccggggcgaacggattctgacgctgccgcgcggattttatttgaagaagaatttcaccagtgcgctactggcccgtcattttctgatccagtag

SEQ ID NO: 34865 - DNA, 204 bp, Escherichia coli
atgatatttgatgctagtttaaagaagttgaggaaattatttgtaaatccaattgggtttttccgtgactcatggttttttaattctaaaaacaaggctgaagagctactatcaccgttaaaaataaaaagtaaaaatatttttataattagtaacctggggcaattaaaaaaagctgagtcatttgtacaaaattattgttga

SEQ ID NO: 34866 - DNA, 423 bp, Escherichia coli; identical to SEQ ID NO: 34585

SEQ ID NO: 34867 - DNA, 1122 bp, Escherichia coli
atgcccaataatcatatgtatgcaagtctactgtcttacaaaaacttaaagatggcacatcaaggaagtaacttacggtctattactgagttttctctctattcagatagtcaaccaattggggcggttgatgatgattcagtttattgttttctgaatatgctacccaggataaccaaacaatccaccgttgcatcttcaattacagtgcgcacaaagtggtatagtgacttaaataatatgattctttctagttctcagagtcatacaaaggattatcatggtggatggtataatgatgaaatagctgcgctttcaagtttactgcttggtgtccgttttcatgctgggtcaattactcgtcactatgattactacacaggtgatttcggaaggatccaagcggagagttcttttcctcctgttttagagtttaaacataacaaacctatagttcctaatgctatcaaagaaattgatataactaaccttaaagagcttaacaatttacatctcttaagtgaaaagaatttcaaccatttaattagagcagccagaagctatcaaaatgcattatggatatgcgagtcatctccaaatatgagttggctattgatggtgtcagccctagaatgtgcggctaatcaatgggcaaaatccaatgcgtctaaagaagaaagatttaaacatgccaagcctgaattatatgaaaaattagataccaatgaatttagacatttaatctctattattgctaatgagtttaaagattcatttggggcgacaaagaagtttgtggatttctgcctgtatttccttccagatgaacctcaagtgaggccaaaagtaggaagaattgattggggaaaagaatcgctgtcaacaacttttaaaaaaatatataactaccgttctaaggcattgcatggaggacaaccatttcctgagccgatgtgttcctatcctgaagtatgggatgggtatattgctgaacgagcgagagcatgttcaaccttaggtggaacgtggttgaatgaagatgtgccaattaatttaaatacattcaactttatgacccattccattttgaataagtggtggcaatctttattaccaagttaa

SEQ ID NO: 34868 - DNA, 327 bp, Escherichia coli
atgaatgatgatttaggttttataaataacatagtgggtgatgatgacacaaaaaaagaatttgtgaaatatgaacattatgacttggattatttaaggtattatcttgaagcgagtatctattttttaggtgaggcaagagatgaagcaaatagagatgttgaaataaaagatttaaacgaagcagtggagataataaataaattatcaaatagggctaaggttgctttagctgaacatattatattgtggtttgaaaatatttcattggtaggttcttataatacactatttagatttttaggcagggagaaaagaatattatga

SEQ ID NO: 34869 - DNA, 819 bp, Escherichia coli; identical to SEQ ID NO: 6059

SEQ ID NO: 34870 - DNA, 135 bp, Escherichia coli
atgcatttatacaacctcaagacaaatggcatcttattggccttttttccaaaggtagcactcgttctcgagaattatctaaagcattcggtattccactttttactcgatttgatcaactacctgaaaaaatag

SEQ ID NO: 34871 - DNA, 390 bp, Escherichia coli
atggactttatcgaaaccgtcagtgcgctgatgaatgtaacctccggacgtgatctctgctggctcctgactcgtcatcctgaaaagccggaataccacgtggtgctgtgcgtcagacaggagtatttcgatggctctgaactggatcggctgattcttgatgcctggagcaacgtactgggcttcatgtcaccgggtgaagcggcaccgtaccagaagcagatcacccgggatgtggtgctggacagtcgttcaccggactgcgaagagatatttcaagcgctgatctgggcgttcagtgatttcgcccgcgatcgtcgtggtgtacgcgatccggaagcccgttaccttgccggtaatccctggtatccggtagcaggccagctctga

SEQ ID NO: 34872 - DNA, 180 bp, Escherichia coli
atgtcacaggccgctttcgcggccttgttttttaacgaatgccaccgccgcccgggcgggaatccgcagaacgcccaccgcagcgggagccgtcagcggcagtatcgctgttatactattgagttaaatgatatcttgtccttaatatcattaagtttgccatatatcttttttgcataa

SEQ ID NO: 34873 - DNA, 525 bp, Escherichia coli
atgaaaaaagacattaaagaaatggaaaggataattgatatcattaatgcttgttctatggacataaattcatatggtgatatatcttataatttgttagtgcataaagaaaattcttcgagcgatttatttgaaaaaattaatgcaatattgaatgctcggatacatcataaaaagaaaaatacattttatgttgaaccatctactgggaagaatttatctgacttgttaagtgaagatgatttagataatattgcttttttggcagaaaagataactcatttacctgtacgtggccgattatatgatgtgttgtggctttataagaaaccaaggcaacgtgattttgcttcagaggcattaaatgctttttcatccttagatatcaaggaagataattggtatggatacgtaaaggatgttttctacagagctctttatttaccaaagttcactcaagagttctcggcgtatgatgtgattgaatcaaaaataatggcttgttttgtgaaatggcggatataa

SEQ ID NO: 34874 - DNA, 432 bp, Escherichia coli; identical to SEQ ID NO: 13904

SEQ ID NO: 34875 - DNA, 141 bp, Escherichia coli; identical to SEQ ID NO: 18476

SEQ ID NO: 34876 - DNA, 222 bp, Escherichia coli
atggaactgatcacgcaatttataaacgatctgggaaattttatatttatcccggtcatctttctggtactgatgaagatacttggccgtcctctttcagaatgtatctcctccgccatcaaagtcggcattggtttcattgcgctaaccatgaccatcaaactgatgctggaaaaaatgcaaccggcagtcaccggattagcagaagcaacaggttcctag

SEQ ID NO: 34877 - DNA, 459 bp, Escherichia coli
atgaaaatatttactacagttggaacaacaagttttgatcttttaattaagtcagttgatgaattcgccgccacaaataaagataatgattttatcttccagatagcgaatggacaatttcaccctagaaatggttgttactttcgatttgaaaatgatattgtgcattattatgagtgggcagatgttgtcataactcatgcaggcgcaggcactatatataaactcctggagcaaagaaaaaaagtaatcattgttccaaatcttgtgcgtattgataaacatcaacgcgatattgcacaatatatgtgtgaccatcattattccttggtattgtgggacctatcatctttatcttcgataatgaaagatattgaaaaattttctccagcggtatataagaaaactcctttttttagaagtgatgagatagttaattttattaacaatataagataa

SEQ ID NO: 34878 - DNA, 483 bp, Escherichia coli
atgtattcaaacaaaaatgccattgtttttagttatggtgcaggcgggcactcggcacaagcaaacagactggctgcgcttcttatacctaggttagatagtttttatataatatcaatatccgatgattgtattacacctaagtggtctcatatacattttgttaccggagaggttagaaaaaaaaatagttatttcgatactcttacaaatatggggccaataaaaataattcaaacattgttaaaaataaaaaaatataatgtgagatgtgttatttcaaatggtccaggtatatctgtaatcactgctttattctttaaagtatttggggcgaaaataattcatgttgaaacatggtctcggttcgtgtcaaaatccttaacaggaatggctatgtattatattgccgacgtgttctatgttcaaaacaaagaattatgtaaaatatataaaaatgcaatttattcaggtcgattatga

SEQ ID NO: 34879 - DNA, 1056 bp, Escherichia coli
atgaaggttcttatagtttctaatatgtatccaagtattgaaaatccttctctgggtgtctttgtaaagaataccgaagaaatgttagtcaatgccaatatagacgttgataaagctgtcatagacagaatatattcaaattcatttgagaaagtatttggctattttattttttatttaaaagtcatctataaaattttattttgtaaatgtgatattgtttatgcacattatgtatcgcatgtagcaataccaattttttttgttaatttatttaaacacatagttgttttctcgcatgtgcatgggggagatgtaaaacagctgaaaggaacgtcagctgcattctttaaaataaaacaggtattatcaaaaaagattatggatatatcaaaggtgattttttccccatcagcttcatacaaaaggcatataattgaactttattcgcaagacgagagcaagattattatttttccttccggagggattgacacgacactattttcttttggttcagggagaaaggaaaatatattggggtatgcaggtcgattagaggacagtaagaatgttgatttaattataaaatctcttattgataataaatacaatcttgagattgtagggggtggaaaaaaaaaaggtcaattacaagaattggtctctcaatataacttatctgaaagagttatatttcataacagcaaaactcaaaaagagttgtcagaatggtataaacgagtgtctattttgatttacccgtcttcaagtgaaagtttaggtttggttcctttagaagctcttgcatgtggtacggatgttcttttatcgccaattgatgcattttttgaatttagagatattgggttgcaatttgagtttttaagtgagttaacccctcaagcaattaatgtagggattgaaaaaattatttccactagatgttttcgcaataatatgagtaataacattattattaactctgtatatgctagaaatgttgtttgcaaggaatttattgatgtattcaaacaaaaatgccattgtttttag

SEQ ID NO: 34880 - DNA, 393 bp, Escherichia coli
atgttgcttggttatcgtaatggatatggttcttattgggggaaaaaaaaatggaattctcataaattacttcgctttcctgattgtggttatggagctcatgcctacttggttaccaggaaaggtgcagaaaaaatagtatataataacgcaattcctatttggccgtatgattatgtcactggaggtagggcggataaaacaattcgagtttatggtgttgagaaaaaaattgttgatttagatttttacaatagctcttgttcatcgttagaggcagagagaaattatcttggtgcatattcttctgaatataaagtgaaaacaccttttgttctacatgtattaaaaaaattgatcaaaggattaaaaccaataagggtatacaaatga

SEQ ID NO: 34881 - DNA, 1554 bp, Escherichia coli
gtgggtattgaaagtgaattgatagaattccttgagcgcagcgtcaaagatggtgcgaataaggctagggatattgaaattgtaaaattctactatggtctaaatgactcgccttggcccacattagatgaaactgcaagccgatttggtgttggtaccagagaaagaattaggcagttactaaatttcaaattccgaaataatgtcagcaaaaactctattccatcgctaggcaaagttattaaagttttgcagtccagagaatattggttgctctcagagtttgaagaagaaacttataatgcggggttggtcgagaaggaaagccacttaaagggaatatttaatttaattgaggatgtcaaccttgattgtggattcgatttttacactccggagttaaagcgagccacgagaaactcgattgtaactagtaagaatatattcttgatcaggaattctgctatcaagaacgttgaaaagttgctcaaaaaagcaaaaattctcccgggacgctgcggtattgcaaatttaaattatctaaaagaagagatgggtcagtactattcgctcgtttcattgttaattgcaaatgcgcctacgtcttgggttagagtgattgacgataattactggtatgtttttgagaatagagataacaccattatcaactacagcgaaaaggtttttggtgtttttgaaaactgtgatccatctagattggcagagacatatagaaatgcccttaatggaaggagtaataagtacccgtatccaccagcagaagttatcgatgactatttaagaagttctatctatatgattaatacgcattctggactaaaattcatcggtgaaaaaaacaagcttaatgagatcgaaaaagatttaatatcttttttggactcttccggaagcgtctcattttcaacgctttataaatatttgttgcaaaaaggttatgggaagccgcatatattaaaaactacgaatttttcaccattagtatatgtagataagaccaaaggtagaaaacattatatgtatagcttagttggtcatcgaatttctgcacataataacacctcagagatggataaatatgaaatttatcttcgtagattaagagctcttctcgatgttggaacggatgagacaagagagcagaaagctagaaaagagcagcatattttacaagagtggctttttaaggataaaacgcatgagacctgcgctatctgcggaaaagagttcagcgtaaaaacgttagtaacggcacataaaaagccgagatcagactgcaatgatgcagaacgcttagatccatatattgtaatgccagtgtgtttgatggggtgcgattatctttacgaaaatatgtatatctatattgacggtactgaaattaaacgtggtctgacgttatcgaacgcaaggagtgaatcaagagtcattgatgaccttgttgggcgaaaagttgaaccaaaatggcttttaggaaatcagtcttattttcgttcgcctaacaaagaattgcagcggataagtcgctga

SEQ ID NO: 34882 - DNA, 759 bp, Escherichia coli
gtgcttacagaaaagcaattgcttgatcttattaaggcattacagtcgtcaaatttctcgacagcagaaattatctggttaagtctcgccgtagttatcgcagccctagcaatgagtttcctggtttcaataattacagaacaggctaaaatttctgcaaccaattctaacttcgaaaccctacgggaacaattatctataaacacagttactattaaagatatagagaaaaaaataacatctgagatatggatctctcaacaaatttggcaaaaaaaatatgatatgtatgaattcatctatgcacaattgctagcaattaaaaaatgggcagacaatgaatttcatataattgaacttcatatgattccaggatggattgcaagcagttaccagccatattttaatgaagagcaagaaaaacaattttaccaagaaattcagcaggctcaagcagatattgagaactcaatgaatgataaagacgtccaaactaaaaacaaagaattacaacaaaaattaagcattgcaatgatatcgttaactgaaatattaataacaaaagcaattcttttgaatactgatgtaactataaaattagaggagttagtcgaaaatattggcttagaaccgtctccactggattatgaagaaccagatgattatgggcaaagaataagattagcaattgatagtgcattgaaagaaataagaatgattgcaatttccgatctggaaattaagcatcatgaatgttaa

SEQ ID NO: 34883 - DNA, 450 bp, Escherichia coli
atgcagtgctctggtagctgtaaagccaggggcggtagcgtatttgcttatttttatcgtgtaatcaaagtgattgttatgaataagataatagttgatcttgacggtactttaactgaggaagatacaaatgattatactaaagttaaaccaaaactaaaagttgttaaaaaattgtatgaatttaaaaaaatgggattcagtattgtaataatgacagcaaggaatatgcgaacatttgatggtaatattggaaagattaatatacatacacttcctgtaatcattgactggcttaatgaaaataatatcccgtacgatgaagttattgtggggaagccatggtgcggtaataagggattttatgttgatgatcgggcactaaggccttctgaatttgcaagattaaatcttcaagagataaacgaattatttgataaggataaataa

SEQ ID NO: 34884 - DNA, 219 bp, Escherichia coli
atgatgcaccttaaatatttttcaagtcgcgtgttatgcaatgaaaaaataaaacagaaagatattggtgatatctatgaacagtttcttgaaaaggacatcctgttacagcgcgcaattcatgaaattgaacggtatctgtatgccacttttaaatatgaattaattttagaagaaaaactatatctctctattcgtaccaaagtattaatggactaa

SEQ ID NO: 34885 - DNA, 1197 bp, Escherichia coli
atgacaacaaaatattttgccatcctgaccaatcagggcgcggcgcgactggcaaacgcgaccatgctcggtactaaactgaatattacaaaaatggccgtaggggacgggaacggcacgttgccgacgcctgacccggctcagacaagactcattaaccagacccgcatcgcgccgattaattcactgagcgtggatgctaacgacgctggtcagattattgccgagcaaattatcccggaaaatgagggcggttttttcatccgtgaaatcggtctttatgatgacgatggcattttgattgctgtcgccaactgcccggaaacctacaagccgttactggccgaggggagtggtcgaacgcagaccattcgcatgattcttgttgtctcgagcacgtcggcgatcaccttaaaaatcgacccgtcggtcgtgctggcaacccgcaaatatgttgacgatgcggtcatcgaggtgaagaactacgctgatggacttatgcgcaaccacgaacagtcgcgcaatcatcccgatgcaaccactaccgctaaaggttttacgcagcttaacagcagtgtgacggatgaccgcgagacacactcggcaaccccgaaagccgtaaaaattgcgatggataacgcgaatgcacggctggctaaagaacgcaatctcgccgatttacctaacccggcactggcgcgccagaatatgcaattaggtgacagctcgacgaaaaataccggtacaactgccaataccgttgcggcgggtgatgatgcacgtatcaccggtgcgatgcagaaaagccaaaacggtgcggatattccagatgtggcgaagtttctccaaaaccttggtttgggagaagccagatatgtcattcagcgaggagctaatgtcaatggtgcatggatacgctggtcagatggtgcaatagaagtatttggaactggtggttccaatgataatgggctggctaaagtcgtttatccaattgcactacctaagctttcacgttttatcagcatagcggaaagaataagaacagattacgaggccacacctaataacgttcacgtttcaatgatcgtggatgaccaggtcagtaatacaggtttttatgtccgctgccagatgtacgacggaagaccatcaacaagtgctttttcctggagagtttattgtgcacctgtttaa

SEQ ID NO: 34886 - DNA, 663 bp, Escherichia coli
atgctttggaaaataatatcttttttactggtaggtatttgtatatttgtttttggtttatggctaggctctattcaggctgaatgggcgaaaccagagcataaagatgctgttgcttacttagctatgattggagggtgggtctcagggattgcaacatcagtcgcagtaattatttcattgtatgcaacataccaagcatcacagaataatattgaaaaattaagcttgacctatgaaccatacccaagcaatgaccctgacttattctgtgcaaatattaaagtaaaaaatttgcgccctgttgctgcgcatatacaagaattttgcttagaaattagtgggttggatgggcagattaatataaataaacttaaggctggcggactgccagttaaacatgctttgtatcaattaggtgaggtatgggagttcgcattctatccccactcaactcattcaaatctaaggttttatgtggacatgaaattgagaggagagccaacctttaaaaagggtttttttgttgttaaaacaacaatgaaacagtaccgactcaagatgcctaaagaccttctggatataatgaaagaaagctatgaaaaacaaataaaaataccggaagtgtacaagcaatatactggtaaagaaatggaactataa

SEQ ID NO: 34887 - DNA, 282 bp, Escherichia coli
atgggtattcgcatcgaagttggcgacaaatgggttattaccagcgaccaatatcaattcatcctgaatgaaaagaaagtcgttaagtccggtaaaaaagctggtgaagaatggctcgacactatcggctattatccgaagattaaccagcttatttccggcctgatacacaatcagattcatggctcggatattactgccattgatgctatggcagtagaaattgagcgggtagggcaactatgcatagcagccattcaaggggctagcgttgatgcatag

SEQ ID NO: 34888 - DNA, 222 bp, Escherichia coli
atggccgacgcaatggatatcgcacaacagcgcgaacaggcagaacgcgagcgactcatcaataacgcgcgtagccgtatcgctgcgccgtctcgttttacctgcgaggtatgtaacacaccaatcccggaagctcgccgcattgcgattccgggagtggccttttgtgtaacctgccagcaaatcgccgagctcaaatccaaacattaccggggggtataa

SEQ ID NO: 34889 - DNA, 228 bp, Escherichia coli
atgcaaaatgtcgaaacccgtcatttcaaagtcgataaagacgcgctggccatgttgctggaagaggccaaatctgaagagcgtaaaggtcgcgcactggctatatcaatccgccttgaggcacttgctacctatatcactaacaaaggtttaagcgctatcgaagcggccgagctgttgcaccgcgaagccatccgctatgaaaacgaatctcaggagctgcactaa

SEQ ID NO: 34890 - DNA, 576 bp, Escherichia coli
atgagaattgaaggtcttggtttaaacaatgaagaagtgctggataggatttgcgaggcttacggattttctcagaaaattcaattagctagacacttcgaaattgcatcaagctctcttgctaataggtacagtcgcgattccatttcttatgactttattgtgcattgcgccctagaaactggcgcaaatctcgcttggctactcaccggcaaagggtcacctacaaccggcaacatgaataacgatacccaaaatgtggagaaattcacattaagtgaagaatccctggttagtgatggcgatttgagtattgctggcaagttctttagcaagccgcttacgaatccaattgccgtctacgctgacggaaaactccatttcatcgaacgagacgcatccctttcagatggagaatggctcgttgatattgaaggtgcaattagcattcgagaattaacaaaattgcctggcagaaaactacatgtagcagggggcaaagttccctttgaatgtggatttgatgacattaaagcattaggtcgcgtgatgggtgtatacagcgaggttaactaa

SEQ ID NO: 34891 - DNA, 642 bp, Escherichia coli
gtgaaagaggtatcgcctcgcacgcttaatcttgagctggccttcttccgggcggtattcaatgagctaaatcgcctcggagaatggaagggtgagaacccgctgaaaaatatgcgcccattccgcacagaagaaatggaaatggcctggctaactcacgaccagatttcgcaactgctcggagagtgtaaaaggcatgaccaccctgatttagaaccagtggtaagaatctgtctcgccactggtgcacggtggtctgaggctgagagtctgagaaaaagccagctcgcgaaatacaaaatcacgtacaccaacacgaaaggcagaaaaaaccgcgccgtcccaatcagcaaagaactctatgagtctctgcctgagaataaaaaaggccggttgtttagtgattgttatggcgcgttccggtcagctctggaaagaacaggcatcgaactaccggcaggacagcttacccacgttttgcgccacaccttcgccagccactttatgatgaatggtggtaatattttggtcttgcagcgcgttctcggccatacggatataaaaatgaccatgcgatatgcgcactttgccccagaccacttggaagatgcagttaaattaaacccgttagcaaataattga

SEQ ID NO: 34892 - DNA, 1248 bp, Escherichia coli
atggcagcaaaactttttacatgccaattattcgaaagtaaagggctaaataaagcgatatatttttctggattaagttatgacctcatcattcatccatatgtttatggcgaacctctgacatccattcaacccatatactaccttgatgaactagaggctattgcaagattaagaattgaaccgccaaaaccaatctctgaaaaagaaattgagtatttaatagataactatttattcgaatactcactcttagataacgattccaggatgtgctcaaaaataacaaagcctgctttttggcctttcgagtcaaacgacctctatcaatatcatgacaataaaaacactagagcactaacacttgatccacttaatgatgaaagtattgttagtttacaagatgcttcaggagaggaatggaatttcactgatttttgctttgcaaaaccattaattttcaatcatttagaaaattgcgccataaacatcaaaaaactatataatgagaaaataaatgccatcattgctcctgactctcaccgagatggatatatgggaagattgagactaatagaaagtgaaaatgaagttttagactatactcaggctcttgatttagaatacaaaatatcattccatagaataaagagcattgatacatttgagatcgagtctgaaattatatcaggagatattatagacattcctgtccaaaaaataaccacaaataaaacttattcacctttattgctttcatattatttctctggactacgagaaagaaatccgttactgagcttcactgggtattataatgtcttagagtattatttggaagatgctgcaccattaataggactaacaactgctcgcacagaaaaagaaaatttaagacatgtcatgaatctaataactaatcataatgaactttatcaattcataatgaacttttcgcggcacctagttactaacataggacaagatatcatttcatcttcaggtgttaaaatcactggcgttagcgttcaagacgaaccaatattagtgactaacattagcgactggctctataaaatacgttgcgcagtagtacactcaaagaaaagtaggagaggacaaaccgaagctatctttgaaccatattcagatgaagccgataatatacaagcagccttgagtgtaatcaaatggttatctcaaaaatgtattttaaaagataatgagttaacgaactctgtaccatag

SEQ ID NO: 34893 - DNA, 474 bp, Escherichia coli
atgaggcaagatttaaataaaacatcggtgactatcatcagaggaaaccttgaagatgcatcaccatctaacagcctgactattacgtatagtgagtttgctaatagtacgaaagaatataaatcagccgatgaattgagaaaacaaaatatcattttggataatgatgaacttgtttttattagttcagatggcgatgaagaaattctacggctgaatttgaaatctttatttcatgactcttttttgcgcattaaatatgaatgtgttggtatgaccgttcaagagcgtatggagctagctaaggcgcttcgtgaaactataatttcaaaatcagacgatataaatagtgttaaatggtcaatagggcttgatgactggaaaagtatttttgacatgatgacgcatccgtataaacagcatacggatgcaaaatgctattttaaaaataatttatatcaacaaagcctttga

SEQ ID NO: 34894 - DNA, 195 bp, Escherichia coli
atgaacaatcaaaatattgacgaacttataaccactctcgaaaaagcggttgcattagcaaatgccctcccaactccaatgggagattttgaggacgctaaaaaagttgatgaattaactattcaattaagagagatcattcatcctaaaaagccagttcaactcaaaggctttgttgatataaattatttttaa

SEQ ID NO: 34895 - DNA, 387 bp, Escherichia coli
atgacacagcaatatgttaaagacgtcatgattggtcagaggaaattgctttcatctaatactttcataattccaaagggtgaaatgtgtgattttaaattaaatatatctgatgacgagaatgagtttaactttcctattcgcattgcctttgatgatgatggcggttcaactcaatcagttgagttcaaaccagatccatcctcaagctctatgaaaatgatcttgcataactggaataaccctcttggctctgcgctgaaagagttttaccctattgttaatatcgagaatagaacaacaattgaaatgattatggtaaataaaagacttggcgatgtaaatgaactggttattcaattctggcgaaaggtcgaaatgtcatga

SEQ ID NO: 34896 - DNA, 357 bp, Escherichia coli
atgaataagccaaaaatagaactagctacaattcctgtctcgcctgatgatatatccactaacttgcaggtgggtgtaatagttgttagtgaggataagttgattcgcatccttgaaaaggatcgggagaggactaaaaagaatatggcttggacagctcctgctagtttttttatcacattgattgttgcaatattaacaactgattttaaaagtcggtggggtatgcctgcggaagcatggcaggcgcttttttatgtaggggcggtattatctgcaatctttgctgttatttattggtgtaaagtagacagaaaagacatggataagttgattgaagagataaaaggtaaatag

SEQ ID NO: 34897 - DNA, 450 bp, Escherichia coli
atgaatgagtttaagcgttttgaagaccggctggccggactgactgaatcgctgtcaccgtctgggcgtcggcgactggcgatagatattgcgaagaagctgcgccagcgccagcagcagcgaattaaattacaaaaagctccggatggtacgccgtatgtaccgagaaaaaaccaaccagtacgtaataagaaaggccggataaagcgggaaatgtttgtgaaattacgcactaaccggtttatgaaagcaataggtagcgagagtgcggcggtggtggagtttgccagcggagtacaacgaattgcgcgagtacatcaattagggcttaaggataagccggggcgtaatagtgctgtggtggaatatcctgttcgtgagttatttggttttggcatggagaactataaggatatcgaaaagattattctttcaaggttgtcaaaataa

SEQ ID NO: 34898 - DNA, 1452 bp, Escherichia coli
gtgagaacaattgtaactgacaaacaaattgaatttgagtctagcgaaggatataaacctcatataataaactcaggcatcactcctcttccgctaaccgaactgggagatagacaatttgaattattgtcatacttactaataaaaaatgaaattaaagacgggaagcatcctgaattcaccaacatttctttaatgcaaggggttggtgagcgtggacgggattgcactcttttcaaagaaaataaaatttgcggactcgtgcaatgtaaaaaaaccaacggaagaattactcgccctgcattaatgaaagaaataataaaatttatattattctctctacttgacagttcattgatccccaacccagacaattttcactacattctttttgctgctaacgatttgtcagaacccgcaagtatattaatgaactcaccaagcagcgaaataacaaaagaaatagaaagcggaactatcaatgattatatcaaacaagtcgctaatgattatgaatcattcatttcattccgtaatacaccgccgacacaaagtgtaattaatatttttaagagaattaccctttcttattcaaactcagtagatctaacccatagaatatataactataataacttgctaaatttatttttcagaactattagcgttgtggatttacatagcgccggcaaacttataagagaaatcatggatgactatggtttaaagtttctttctgatgatgatttaaaatcaatacaacatcgcataggtaacattgactcgaaacatagagccagcttaggaatagctgatttctttggatttagccacgattttttcaaacaattaaaaactgaaaaacttaaagagctattatatttaattagcaaactgcagtgtcttttggatagctacattattgactttaccactcataaaatccatgaactcataaggactgaaatcacaaataagctgctgtatagcggcaagattcatcaattcagtatatctattgcacaaccttatcttctacagtacacgcttaatcaatacatgagcaactccatgtccaagagattgtcttcagactttttcatacaaacctttcaaaaagaaaagacattacaaagcgtaatcgaaatagtcttaaatgatagcgaaagaattatgaataaagactactctcatcttgctggtgatccatcactgattgcgttaaaagtcgacatttacaaacatttgcatgaagggttcaagtcaattaaagatgcaaaaaaacaattaaagaaagatctaccggaattgcgtaaagctctaacaaaaatcgaagacgagttaaaaaaattcattagccctaaacgaacaatcatcataaatgacacatctttcttagatgatgatgaaaaaatgaaaaaaatagcaacactcatggaatcaataagataa

SEQ ID NO: 34899 - DNA, 513 bp, Escherichia coli
gtggcgattttcgaccactggattaagcgcgacgtcggcaagattttcgtaatgaatatcgaatgggcgttcgccaattttgtcggcgcaccgggcgcggtttgccatcatcagccaacctgtgggcgctcggtgattgttgagcacaacggtgacgtttatgcctgcgatcactatgtttatccgcagtatcgactagggaatatgcttcagcagatgattgcagaaatgattgattccccgcaacagcaggcatttggtgaagataaattcaagcagttaccggcacagtgtcgcagttgcaacgtgttaaaagcgtgctggggaggctgcccgaaacaccgctttatgctcgatgccagcggcaaacccgggctgaattatttgtgtgccgggtatcagcgttatttccgccatctaccgccatatcttaaagcaatggttgatttgctggcgcacggtcgtccggccagcgacattatgcaggcgcatttgctggtggtgaataagtaa

SEQ ID NO: 34900 - DNA, 648 bp, Escherichia coli
atggctgtagaaactgctgcgcagtacgattggctaagcctgttgacaaacggttcattaatcccagtatctgcttttgttgcaatttgtcttttcgttgtaagagaagtactagattggcgccgtaaatcaaaagcaaaaaaaaatgagattagtgccctcaagaaaatttttgcccgagagtgccagttagcttggtatataagccaaaaaataaagggattatgtaaagagtttgccccatacgagcaaagccctatgaacgagtgccctctcagcttcagtatcgtaagaactacagcaggaaaaatgcgttggaccgtaacagaaaatgacgtttctgtttcggggggagagctaatcaaaccctcagtagcgactttcgcaaagtatttatatgatatagctaaacttgactcagctttttatgaaaatgctaatttaggctatgtggcagtcattgaattgaggcatttttatgactcaataattgataatgaagatacatcgcagatgctggggctcaatagcgtcatgtatggtttttcagggtatgctcttgaagaaatggtgtggatcgaacaagggcttaaggatctctataaatactgtaccaatgaagagctgacgaaagggctactacgatga

SEQ ID NO: 34901 - DNA, 1038 bp, Escherichia coli
atggacaatcaaattgatatctcatcattaagcgacgtttcagagtttttagaaagagttcagaaaggtcagcaaatatctatcaatgacattaaaattgattttgttaaccacgtaagtttcaagatttatggtgatccagaccggtataatgggacgataccgtcctctttagctcaaggtatgtgcgagtttcagaccgaactttataaagcgtttatgcttgtaaggcgaggaacggataatctcaagcatttgaaagacagtgatagaaaagagcttgagataatttttaaagttgagcctggctgtactgacctacttgttgctataaaggatgtaattgattcatttggtgttgcatttgagaggtcaacacaaggtatgactggaacagagaaagctatatgtctcgttctcatatcgctgatccttactggggcttggctgataaagtcgagacaaaaagatcgccatatagaaaaaatgaagcaacttgagattgatgaaggcctcaacgacaccaacagccaaactgagcaaatgagactgcttaaagatggcatggttgaagttctttctgctcatactgccacagcagctgcgagggagatttcagagggaattcaatcccatacttcaaatgctgtggttggggtgttgaaaggcgtctcagatgctgacagagtagagtttaatggtatggcaaagatcgaattagataagcgtgatattgccgaaatgataagaaacccacgtgagaaactttccaacaaagaacttacagaagaagttgaaattgaaggcattaaaaaatcagatggaaagctgacagtaacttgcaaaaaggttggcactgattataccttccctgcttatgttgttactgattttatagataaagacgaaacagaccttctttatgaaagcatgaaactttctgattcaatttctctttttggtgactataaagtcagaagtgggataattgaatcagcaatgatatctcgtatctcaactcccattaaagggtgttaa

SEQ ID NO: 34902 - DNA, 180 bp, Escherichia coli
atgaaaaaaataagtttttttatttttacagcactattttgctgcagtgcacaagctgccccgtcctctctggaaaaaagattaggcaagaacgaatattttattattactaaaagttctccagtacgtgcaatccttaatgactttacagcattcctgttttcatcagtagttccgtga

SEQ ID NO: 34903 - DNA, 600 bp, Escherichia coli
atgacaatttttaataaaatagactataactattataaattaattaattatccaatcatgatggttcatgatgaatggctaggtgatttaaccggtgtcaatcaggtcagttttcggcgtttaagagaaactagttctactcgtaatcaactcaataagatattgcgtcaggaaatacaagataaaatttctggtgtggaattatctgacataaataaggaaggttttttatatcagtcaattgggaaaataagattgcttgctctaagtagtgcattatttgacattcaatgccctgattatattttctcacgattatatcgagaaactctgattagagagataggatatcaaaatgtgaagcagttatcattctattggcagggagggcaatgtaaaccagaatatggtgaagaacggttttgtgctgagttaataaaatacggtgcaggaaatttggagtggctatttgctgataatcctttatggaccatagtcaaatatcttttgccgaaaagtggagaaataaaaccaactcatattaatgatttatttcttaacagacttaataaaattttattgccttatgaaactttatga

SEQ ID NO: 34904 - DNA, 603 bp, Escherichia coli
gtggctatatcattagtgactattcctttactgatggagggtaaaaaagcaaaaatacgagtatctttattatcattagttggttttttatgtgccttggttatctatgctgataaaatttatacatctaatttagttttaagaattgttcatttctatgaagtcggtggttggagtaagatgcttttttcggatcgggacctttttcttaagtataatattgatcaattcttaaacagtgatccagtgtcattacttatagggataggctatgctggtattaatgcattcccaaagcctcttacagagatcgatattgctgatataacaataatttatgggatgttaactacctctgcttacatttctttttatattggcattttgttctatagcaatggatatcttaaaaaaaattgcccaagagatataatagcaatatctcgttatatatgcttggttttgatgattgtgtcgtccattgctgggcatattctttttaatggaatggttactctttatttaggtattgcaatggcgttaccttggtggatggctaactatcgaactcgacatataaaagggttgaaaataaatgtttaa

SEQ ID NO: 34905 - DNA, 636 bp, Escherichia coli
gtgactgatgtttgcccttatacgcttggcgttgatacctctaaatcgctggggcatacccgcgaatcaggctattttgcacccgttattgagcgtaacaggagtattccttgtagtcgcgttcgtgccttttacacggcacatgatcaacaaacagaggttaattttaaaatctaccagggtgaaagcaggatggtggctgataatattttccttgcggagttgtcagtgaatgttccgccaaaaccggccggtgatgtgcgtattgatgttcgttttacgtacgacattaacggtattcttgatgtcgatatcagcgtgccactgacaggtgctaaaaatagtctggttattgaacagaatccaggggcattaacggcagaacaaatacagcagtcgttgtccaaattaagcctgttaaaaattcacccacgcgatgaacagataaaccaggcctttattgcccgtcttgataatctctatcaactcaccctggcggaaacgcgagactggataagcaattgctcccgtcatttcagttatctactcgagaagcaggatcctgatcaacttgctgattttcggactaaagttgaacctacattagactctctggaaagagaacgtctgcaatga

SEQ ID NO: 34906 - DNA, 207 bp, Escherichia coli; identical to SEQ ID NO: 5080

SEQ ID NO: 34907 - DNA, 231 bp, Escherichia coli
atgattgctgtaatatttgaggtgcaaatacaacccgaccaacaaactcgctatttgactttagctgaggagttaagaccactattaagtcatgtagctggttttatttcaattgaacgttttcaaagtctagctacagaaggaaaaatgttatcgctatccagttctgcaatggaaaaatcatgttttacatgcgaaagctcaacaagaagggcgagagtcaatatttga

SEQ ID NO: 34908 - DNA, 1563 bp, Escherichia coli
atgaacgcagaatatataaatttagttgaacgtaaaaagaaattagggacaaatattggtgctcttgattttttattatcaattcataaggagaaagttgatcttcaacataaaaactcgcctttaaaaggtaacgataaccttattcacaaaagaataaacgaatacgacaatgtacttgaactatctaagaatgtatcagctcagaattctggcaatgagttttcttatttattgggatatgcagattctcttagaaaagttggtatgttggatacttatattaaaattgtttgttatctaacaattcaatctcgttattttaaaaatggcgaacgagttaagctttttgaacatataagtaacgctctacggtattcaaggagtgattttctcattaatcttatttttgaacgatatatcgaatatataaaccatctaaaattgtcgcccaaacaaaaagatttttatttttgtacgaagttttcaaaatttcatgattatactaaaaatggatataaatatttagcatttgataatcaagccgatgcagggtatggcctgactttattattaaatgcaaacgatgatatgcaagatagttataatctactccctgagcaagaactttttatttgtaatgctgtaatagataatatgaatatttataggagtcaatttaacaaatgtctacgaaaatacgatttatcagaaataactgatatatacccaaataaaattatattgcaaggaattaagttcgataagaaaaaaaatgtttatggaaaagatcttgttagtataataatgtcagtattcaattcagaagatactattgcatactcattacattcattgttgaatcaaacatatgaaaatattgaaattctcgtgtgcgatgattgttcatcggacaaaagccttgaaataattaagagcatagcttattctgattcaagagtgaaagtatatagctcacgaaaaaaccaaggcccttataatataagaaatgagctaataaaaaaagcacacggtaatttcatcacctttcaagatgcagatgatctttctcatccggagagaatacaaagacaagttgaggttcttcgcaataataaggctgtaatctgtatggctaactggatccgtgttgcgtcaaatggaaaaattcaattcttctatgatgataaagccacaagaatgtctgttgtatcgtcaatgataaaaaaagatatttttgcgacagttggtggctatagacaatctttaattggtgcagatacggagttttatgaaacagtaataatgcgttatgggcgagaaagtattgtaagattactgcagccattgatattggggttatggggagactccggacttaccaggaataaaggaacagaagctctacctgatggatatatatcacaatctcgaagagaatatagtgatatcgcggcaagacaacgagtgttagggaaaagtatcgtaagtgataaagatgtacgtggtttattatctcgctatggtttgtttaaagatgtatcaggaataattgaacaatag

SEQ ID NO: 34909 - DNA, 549 bp, Escherichia coli
gtgcaaataaccgaagcattactttcagagccaggggaaatccggcgttttgttcagcaggcggtggatcactggccgcatctgttggcatttcacttcacgctccattcggctgaagaaaacatcaacgggcaacgggttcagacattctgtacttccttttaccggcaggtacacgaacgtattgctgaacgtaatcacacggccagtccatcatcgccgttggtattacgctggttgcgggaacaacatggaaaagcaacaatacgatgcctgttgctgctcagccagacgagcatttgccatccgcgagccagtgtcacagttgatgaacaatgttcgcaagtggtggatttactgcaacatagctggcaggtgataagtgctggcggacaatgccgggtggaaaggtgttttcgggttgcccggggtgatacatccggtcagtatgttgcgttaaaaacagtcgcattgtctctggggttaccggttgtgaccgccattacccatcgtccggtacagcgctgtacattgattacagctcagtga

SEQ ID NO: 34910 - DNA, 1569 bp, Escherichia coli
atgagtcggaaatacctcattcgtatcactgagctggaaaggctactctctgagcaggctgaagccctccgtcagaaagatcagcaactgagtctggttgaagagacggaggccttcctgcgctctgcactggcacgtgccgaagaaaagatcgaagaggaggagcgggaaacagaacatctgagggcccagatagaaaaactgcgccggatgctgttcggtacccgttctgaaaaactgcagcgtgaggttgaacaggctgaggcccaactgaaacaacgcgaacaggaaagcgatcgttacagtgggcgtgaggatgacccgcaggttccccgccagttgcgacagtcacgtcatcgtcgtccgttaccagcacatcttccccgtgaaatacaccgcctggagcctgaagaaagttgttgcccggagtgtggcagtgagctggattatctgggtgaagtcagtgctgagcagctggaactggtgagtagcgccctgaaagtgatccgcactgttcgggtaaaaaaagcctgtacaaaatgtgactgtatagttgaagcgccagcgccgtcccgcccgatagagcgcggcatcgcgggctccggattacttgcccgcgtgttaacgggacaatactgcgaacacctgccactgtatcgtcagagtgaaatctttgcccgacagggtgccgaactgagccgtgcattactctccaactgggttgacgcgtgctgccagttaatgactccgctgaatgatgccctgtaccgttacgtgatgaacacccgcaaggttcacactgacgacataccagtaaaagtgctggcaccgggcagaaaaaaggcaaaaacaggacgcatctggacgtatgtccgggatgaccggaatgcgggctcatcagagccaccggcggtctggttcgcctactcaccagacaggcagggaaaacatccggtacaacaccttcgtcccttccggggtatcctgcaggcggatgcattcagcggttacgatcggctgttcagtgccgaacgtgaaggtggtgcactgacagaagttgcgtgctgggcccatgcccggcgaaaaatccacgatgtatacatcagcagcaaaagtacgacggcagaagaagctctgaagcgcatcagtgaactgtacgccattgaggatgaaatacggggcttaccggagtctgaacgtcttgcagccaggcagcagcgaagcaaagcgttactgacgtcgctgcatgaatggatggtggagaagaatggcacgttgtcgaaaaaatcccgactgggcgaagcgttcagctatgtcctgaatcagtgggacgccctctgttattacagtgatgacggtctggcggaggcggacaataacacagcagaaagagcgcttcgtgccgtctgtctcgggaaaaagaattcttatgacctttgtcaaatattaagcccaaaaagaccttacgcagctccgggagcttcgttatatcgcggattaaagaacctgaaacagtcagactgtatcttggattttacaaactcttattcggggattttagccccatga

SEQ ID NO: 34911 - DNA, 300 bp, Escherichia coli; identical to SEQ ID NO: 10378

SEQ ID NO: 34912 - DNA, 264 bp, Escherichia coli
atggcaaagggaaaagcggccagaacagagtgcgttgcccagagtatcggtgggcgcaataacagcgccaccagcttttgggaccgtattttaacagttgaggagacggccacactcattggcgtcaggatctctgagctcaaagacgcggtgcgctatcagaaactcctgaaagggaaggcagctccagaagtacattcggtatcaggaactgggaaactgttttttgatgggcgatccattaaatcgttcatagaggactaa

SEQ ID NO: 34913 - DNA, 219 bp, Escherichia coli
gtggatctggatcaaaagcaagaaccgtggatcagcgtcaacgacaagatgccggtcgtcggtgtgcctgttcattgccagcttaaaggatgttggtcgggcaaaattgttgagtacgacttgatccatgttcaggaagatgattgttcgtggcgaacggcggacgacaactcggaagtcagctatgacttcgatgtcatcacctggagacctatttag

SEQ ID NO: 34914 - DNA, 489 bp, Escherichia coli
atgtttggaacaatcattttaactgcgatgctcaccaccagctcagccactgccgaagatgcagggaagaacatcgcctcaggcttggcggcggcatccgccagccaaatggggcaggccgtaatgccaactttagctaccagctcggccattgcaaaaagcgcaggtaaaggcatggtgtcaggtttggctgcggcgactgccagctacattccccaagacgagctgagctttactcgaagctataagaactctgaggctgtggatatggcaaagggcctggggacattgaaagaagcgcctgagtttctctacgttgttacagacgtaaatgccaacatggcggtcaaatgcaagcgcgtctgggagcctcaatctctggctttaagtccagtgattgttgagctggtggaactacgtaagacgaacaacaaagacagctacgaacaagcactatcccacctcgattgttcaatgttcacagactaa

SEQ ID NO: 34915 - DNA, 2988 bp, Escherichia coli
atgagatcgagaccttcccttttactgatgcgaaacctgcggtcattggccgttgtggtgctcgcaactttgccatgcgttgcttttgcacaatggcgggttgtagccgtgagcaccgaagtagacaaaatgcgcttcaacaccatcatagacgcgcattccttcatgaagaattatcgctctggtgaggagcaagggaagggaacgccagttggggatgcgctttatccggttgccagttatggtgatggccgttatgtctccaggatctgttttaagtatctaggtgctactggcgattatgaccccactacctgcactggcgacccagctacggtctactggcgctcaacctatgttctgccgggtgagatggataaaacaccgttcctggacagggatctcggcttaccaacaacgaccatgtgtgtagggaaccctatccatcttggcaccggcaacaagttccaggctgaactggattatcaaagcggaggctccgaccctttcacattcaccagatactacaatagccaccttcctgatgaagagctcggcggctggcggcatacctactcgcggagcgtcgaggtcaacgcctcgaagtacggtgagaacatggttgtcctgcaccggccagaagggcaacaactcgcgttctacaactcgtcctctgtctgggtgccaacatggaaaaccgatgataccttgacgaaggatgctaccggctggcgttacactcaatctgacggggtagtcgaggcctatgatgaaaccggacgactgaccggcatcgagaagcccaacggcaatcacatcaccctgagctatctgaacggagagctatcctcgatcactgacggctttggccgcaacatccagttccagcatcaagatggccgcatggtcagtgtcaccgatcctgctggtggcagtattcagtaccagtacaacagcgctggcaagctggcggaagtgatctaccaggacaatacgagccgcagctatctctacgatgacccgaatgcaccgggtttgctctctgggctggtggacgagaacggcaaccgtttcgccacatggggatatgatgctcaggggatggcagttctaagtgaacacgccgggggcgcagagaagactcaggtaagctacaacgctgacggaagcgtctctgtcaccaacgccctcggccacgttcagcgatatacctacagccgtcacaacgggatgctcaagcctgatgttgttgagggtgcgccgtgtaccggctttgtgggaggcaaggaaacctacgtctacgacagcaaaggcctcgtctccagcattacagatcgtgctggacagaagcgcacgttcacccataacgaccggggattggaaaccacccagatagaccaggatgggggcaaggttacgaccgactggcttccttccaagtcgctccctgcaaaaatcacggaaccaaccaggatcactgagcttacctacgacactcatctccgggtgataagccgcaaggtcacagatcgcagctcgggcgcttcccggacatggacctacacctatgcccctgttggtacaggaaagccgagcctgttggcctcggttgatggtccgcgcaccgacgtcagcgatgttacgacatttgactacgatgaccagggcaacctgatccggacaacaaacgcgctggggcaggtgatgcagtttggtgactacgacgcgaacggtcgcgccgggaccattcagggcgtcaacggtgtaacccaaaccctcacctatgacgccagaggaagacttgtcagctccactggaccagaaggaaccacggcctacaactatgatgctgtgggcctcctgagctcgctgactaagccaaatggtgcaaccgtcagctatgagtacgacgctgcacatcggctggtggcggaaacagatgcacagggcaaccggcgcgagcttgagctcaatgacctcgggaacccagtagaagagcgactgctcgatgcgctgggccagacccgttggatagagcgccggatcttcaacgaaatcggctggctctccagtgtctccgacgcctatagcaatcagtcatcgttttcctacgatgtggtggcaaacctgatacaggagaccagtccctctggtaacacacactcctacaagtacgacggcttccatcaccggacacaaacgaccgatccactcgggaaggtcacgcaggtgctctacaaggataccggcgatgtttaccgtgtctccgaccctcgttcgcgcctgacctactacagctacaacggctttggcgaagtgactcaggtccggagcccggacaccggcaccaccgacattacctatgacgaagccggtaacgtggcaacgcgcaagacggccaagggacaaaccacaagctacagctacgacgcgctgaaccggatcatcgaggcatccagcggtgtcgctggcgaatcgccaattctgtacgggtacgacgaagcaacctcaccatacggcatgggccgcttgacctcagtcgatgatggcaacggtgtccggagatatggctatacacccgaaggatggttggcttacgagacctgggaaacccacgggcagagccttactacccagtaccaatacgatggtgcaggcctcatcacgaagatcacgtatcccagtggtcgtgaggtttcctacacccgtgatttagccggtgacgtcatcgaggtggcaacgacacaagcaggcaccacaacaagcctggcaagccagatcgagcgagcgccctttggccccgtcaccagtatggtcagatggaacggcatttcagaaagtcgctctttggatctcaattaccgagtcaccggcatcgacgctactagagtgcattcgctggtctatcggtacacgccagactcgttgatttcagccatagacgacaatctggggtcgtctcagaaaacggaaaataaagcacgctaa

SEQ ID NO: 34916 - DNA, 273 bp, Escherichia coli
atgaaaaatgaatatagagaaattgaatccacgctagatcttttgcttatggtgctgtctgattcgttttctgaatctgaaagtatagaagtgcaagaatttattgatgtgggtgagtatggaatcgcactagaaactatcattgacattattaatgaagagtcaaagaacataacaaatgaagctgagtttctgattgaaaaagcagggaggataatgaatatggatactacatccattgtagataagatttcaaaacatatagataaataa

SEQ ID NO: 34917 - DNA, 453 bp, Escherichia coli
atgaagaataagaaggtaataactttgataatggccgcagccgcatcatgctcgtcagtctatgccgcgacattaccgaccagtgaggtagacgcatacatacttgcgatgaacaccatgtcacctatcactgcaaagtacaccatccagtacaagcaagcggttgagcagaaatgcaatacagccctgagcgttgagcagctcaactcaaaggcattcaccaatgttgtccaggcaatggtgagtagtgagaccgtcgatagaatggggcttgatgctgctggtggatcactccaggataccctgtctgtgatcggcaagaacgtcacatgcagtgacctgaacgcgccatttaaagcactcttggatgataaggacttcaccagaaagcatcagcacctatcgaaggtgctgcatacttggaatgaagttgtttctcaaagcaaaccctga

SEQ ID NO: 34918 - DNA, 264 bp, Escherichia coli
atgctcactgctaaatgtatagggtgcggatgcaccgatgatcacgcttgtgttgaaaacggtcaaccgtgtcactggcttcgcgtgaatagagtggaaggtatcggggtctgctcttcgtgcccggatgctctcaatcaattcgcatcgaccagccaggaacaagcaactggacaggatgactaccggaacagtccagaatggaaggatttttcatcacgcattggtaatgcactatgcgggggccggagcaaagcaaagtaa

SEQ ID NO: 34919 - DNA, 933 bp, Escherichia coli
atggaacaagcaattcaaagttacttggctgacgaccggcaatatcaagacaggattaccgcagctctcagccaggttgaagagaaaggtgcagagtacgaagctctttgccaacagcgtgctcagttggggatctggcaaaaaattataacgttctggcagtttcgtcgagacatcgccgttatacgttcagcactaaaaggccataacagcgatttgcggtatttgcgccgtgggagagaccagctcaaagagggattggtttctcgggccgtgaagcaagcgattgacggtagccagattctggaacgaatcacccaagctcaagataggcttgacgccgcatctcgactccacgagagcaacaagcgactggtggacatggggcaaaaagccttacgtgaaatcagtgaggcctcttccagtgtttcatcagcacaaacaatggaggttctcgaccttgtgactgacaacaagggcatttccgtcatgtcgtcgatgtcaaactcctcggccagcagtgaaatagacgatgcgaagagagctgtgaaagccttcgcaaatgcgctgggggatcatcgtgacattgtgggctcactgcaccactcaatggcaactgagtttatcgatctgggtatggactttgccggtttgaatgatggtttcgactttgggagcgtcttctcgctgttcagcttgtcgtctgccagttcctctctggacaaagtagagtctcgcgttgaatctctgatgccagatctaagacgagccgcctccaattcggcagcagagtatgcccgtgttaacgaagagttctttggcctgaaacaacaggcctgttgccaagtgcatgagttgctggtgacaaatggtatagacgtgtcagtcaagcgcgttgagtccgccgtgaacagctacagagttggaaggtga

SEQ ID NO: 34920 - DNA, 1464 bp, Escherichia coli
atgagcgatattacacagcaaatggacaaacttgagattccaatcaagttgtcctttccagtcatcaacgttagcacttttgagctgggccgcgcagagagcgttttctctgacattgcaaagaaagtcggcaagcactttattgtaatgccattcaagaagctgcctgatccaggcacgatgaaggcaatggtggacgagtccaagaagtcctccaaaaacggagttgtcgtgttcgacactttctttttcgaccgccaacgtgcaaacccggaaacactcccagccctcaagtcatcactgacctatctggagaatgaggggatcaactacatcatcgctggcaaagacgtcttcaatgaagagttcgtttatcacatcgatctcccggctatgagcaatcaggaaatcctgaaactgctccagacctgtgaagataacgtgaaagatggtggagtcttcgagagcaacgaacgtgctgtcatcgcaaaccacgccttgggcttgtcacacacccagatgaagaacgtcttcacctactccgcttacttgaaattcaagggtgaagaatacctgggcgagatccgaaaagaaaaagctcacatcttgcgtgatgtcggcctcgatgtgcttgaggccattgatattgggaatgtcggtggtctcgaaaacctcaaggagttcctccagatacgtaaagccggttgggacaaagaccttccggtaaaaggtgtccttctggccggtgtacctggtggtggtaaatcgctgacggcaaaagccgctgccggtgtacttggcactaccttggttcgcctggatatgggccgtttctatagcaagtatctcggtgaaaccgagcgccagttcaatcgtgcattgcagaccattgagcagatcgcacccgttgttgtgttgattgacgagatggagaagttttttggtaatgccgatggcgaacacgaagtatccaagcgcctgctgggctctttcctctactggcttcaagagcgcaagaagaagatcttcattgtggcgacggccaaccgggttcagtcgctgcctcctgaattgatgcgagctggccgctgggaccgagcattcttcattgatctgccaagtgtggctgagcgccagaagatttttgagatccacctcgccaagcagaaggccaacatcgccgcgttcgatatgcctacgctacttcgtaccaccgagggatacaccggggcagagattgaacaggccgtcattgacgcgatgtatctggcgaacgctcaggacaaagagctcaacaatgaagcgctggtggatgcggtcactcgcattaccccgaccagtgaaactcgccgggaagacatcaaccagattcgcagtttgcgggatcaaggcttctatccggccaataacttcgatgttcaagagcagaatggctctggacgcaaacttgccatcgaggactaa

SEQ ID NO: 34921 - DNA, 330 bp, Escherichia coli
atgtacaaacaagacattgagaaggggattgagctgctcaagctgtgcagcaaactccagtcagaaaaagatggagtggatagaccagagcctctggttatcgacaagagtaaggtgctggaccagttcgcccgagacgtttccacatcgatcacctacatgagttcgttgttcaagctcatccccatgatggaaaaccttaccgagcttggccgaaagctggagaaagaaggaaagatcgaagtttctctcgggcaagactattccattgccgcgcttaactttgttatgtcggaacacggcatgacacccgaaacaactcaggagtga

SEQ ID NO: 34922 - DNA, 393 bp, Escherichia coli
atgagccatatcgtaaaaggcaaggtgcaggtcgcctacaaagacaaagagctgctgttgaaggctctggagggagttggcgttgttgttgaaaacgaaaagctgtaccgcgtgggcgctggctacaccttcgagaaatacccgattgttctgatcgaccagaacaacaaggagcaccggattggctacaaggaaaaaaacggtgtttgggagcagtaccaggaaaactacggctcttatggccgctggacgcagcaggcaagcagcaaggtgcaggatcgctacattgccttccactacgagcagcagttgaaagaggaaggtttcagcgtgacggtgaagcagcatcacgatggcactttggaactggaagctgaggaagctgtttggtaa

SEQ ID NO: 34923 - DNA, 195 bp, Escherichia coli
gtgaaaaaggtaaacatcaagatcaagggcggcaagattgctgccgatttcacggggtttcagggtaagacctgtgaagcgctggaacagcgtattcgcccggaagagctcgaagtcgaagaaaaagagctgaaacccgagtaccacttcaatgctggtcaaacccagcacgaaacggaacagaacgaatggtga

SEQ ID NO: 34924 - DNA, 999 bp, Escherichia coli
atggtgatgagaaggacagggcgcgtcccccttcttttgctggttggtctcatggtcgcagctcctgcggcctttgccagtgactttgtgactggcgttatggtggggcaaatgctctcagatgactcaggcagcaagaagatagaggacactggcccggagagcaaaacggtcattgattaccatgacggtcagccagttgtgaccaaagtggaggccttcaaaagcaataaatggcgcaaactggatggccctcagggcggctattttgtttgcccaggtgaataccgtagctattcgggaaggctgcgatgccgtattcatgatgacgggtttaatggctttatgggcggtatgactgatgctcaggagctgccgctccaagaagctctgaccaagttggaaggtaaacccatctccctgcaaaccattgaagtccacggcaacaacctggcagtcaaataccagttagcaccaccagcacaaacgcacgtcaaaactcaggatctgggggtggtcaagcaggatggtgaaacgcagaaggctgccagccaacaatcagcgtcatccatagtgactgcaccaaagagtgaacctcccaagcagattaatgctgcacaagacactgaccgcaataccagtgcgtttcaaagtccgttcgaggaggtaagtgactccatgatcggtctaatggatagctctttcgtcaaagtcatagcgggattgatgctggtgtttggggttgctagtggaattatgaggcagagcccatcaggaattgtgatggggataatgcctgcaattatgatcatgaccgcgccaacggttattcgtaccgtattcgatacaggcgcggccagtaccaagccagtggaagatagcggaagctcatttcctttcttcttggtggcaatagtaccggtgctgattttctttgcctatagagcttttatgaataaccggagcgactccgaaattgatgagttgttaagagtctga

SEQ ID NO: 34925 - DNA, 450 bp, Escherichia coli
atgagtttaagttttattgcaagagtcttgcgccaattggcaattatgtttgtcctctccgtgcttattgtggccggatatatctactatgccggtaaacagcatcagcaggcagcaatcaacttttggggtgagcaataccagcctgatgccatctcgacgcaaattgattgggggtttatcggtaactgggttattcctcgcggggggccaattatttctccgggcattgctggagtgtgtcccaatacaccacttcccgttgtgcctcttaaaattggtcctgatggccggggttacgttctctgtggtattggaagtgaggctgtctctaccagctttgatgtcaatgacatccaggatgaagaaatacgaaacacattaaaaacgatgtttgaggaagaatttgaaaaaacagttaagggggataaatggacgctaaagaactga

SEQ ID NO: 34926 - DNA, 1035 bp, Escherichia coli
atgaaccttctccagaaggtggacggcgagcggggtgtctgggagctctcaagcaaaaccaagaagggcctgcatgaagcgcttggtggcattcgacttgtcgcctattcaacaaatcttgggctggcggtgtggtcaaacaacaagagctttttctctgacctcgatgagccggtgcatctgtgtgtgacatctccgccgtttccgctccgaatacagcgtggctatggaaacgttgatgaagccaaatgggtggatttcataacccaggcgctcgaaccgatagtcaagaacctggtgccaggaggaagcgttgtcctgaatgtcagcaatgacatcttcgaggccaagagcccctccagatctctctatgttgaaagaatggtgctggcgctccatgatcggctcgggctgtctctcatggatagatggccgtggatcaacctgtcaaaaccaccaagtccaacccactgggcttgtgtgaaccgttaccagttgtgtgccgggtgggagcctgtttattggttcaccaacgaccctgacagggtgcgttctgacaacagaagggtcctgatccctcatacagagaaacatcagaagctgatggctcaagggggggataaccgagtggtcagttatggtgacggggcatatcgactgagagggaacgcattctctaatgtcacagaaggacggataccgaaaaacgttatccagcgcggccaccgttgtgcggatacgctggagcttcggagaatcgctagagaactggggttgccaccgcacccggcaatgttcccaacagacatacctgagatggctatccgctttctgacggaagagggcgaccttgttgttgatccgttcagtgggtcgaataagagcgggttggccgcagaaaggaataaccggcgctggatcgcctgtgacatcattcttgagtacattcgtacccaggcggaaatgttcaccggctttgatggattttggattaacccagccatagcaacagtgggcgggggagcgttgaattaa

SEQ ID NO: 34927 - DNA, 1521 bp, Escherichia coli
atgcgtaaaattcgtgaagtgctgcgactgcggctggaagctgacctctctgttcgccaaatcagtatctgtaccaaggtcagtgtcggctccatccagaaactcctcaaaagtgcccaggcgctgggccttacctggcccttacctaccgagcttgatgatggccgactggctgccctgttctatccgcaggccgataccaccatctcggcccgccatgttgtgccggattggccctctgtccatcaggagctcaagcgcaagggggtctccaaacagctgctctgggaggagtacacccagcgctatcccaatagctgttacagctactcccagttctgtgaccgttacaagtcctggtgtcagttgcaaaagcgctccatgcgccagatccacaaggcgggggaaaagctctttatcgactactgcgggcccacggtgcccatcgtgtcgccgactacgggtgaggtccgtcaggcacaagtctttgtcgccgtgctcggtgcgtccaactacacctttgccgaggccacctggtcacagtcactgccggactggctgcaaagccatgtccgtgcctttgagtttttcggcgggacaccggcactgctgatccccgacaacctcaagagcggtgtcagcaaggcttgccgatacgatcccgagctcaaccccagctaccagcagttggccgagcactatcaggtggcggtgatgccagctcgtccttacaagcccaaggacaaggccaaggcggaggtgggtgtgcagatcgtcgagcgctggatcctggcccgtctacgccatcagaccttcttctcgcttgccgaactcaaccagtgcatccgtgccttgctgaacgaactcaacgagcgtccgttcaagcaactgcccggtaaccgacgtgacgcatttgagcagttggaccgcccggcactgggaccactgccggtgcatccctatcgctatgtcgccatcaaaacggtcaaggtcaacatcgactatcacgtcagctatgagcagcaccattactcggtgccacaccagtatgtgggtcagcaactggagctccatgcaggcgacacactgcttcaggtctatcaccagcaacagctggtcgcgagccatccacgtaaaaccatcccggggatgagcacgctccctgagcacatgccggaacgtcacagcaagcagcaacgctggaccccagggcgtcttaaacagtgggctgctgacatcggaccgagcaccttgtgctgggttagcgaacggttggaagagaaagcccatgccgagcaggcataccgactctgcctggggctgctgagtcttagccgggagtatccgccatcacgggttgaagcctgttgccagttggccaaccgggaaggtctggtgcgactcaaacagctcaagtcggtgctgaccagtggccgcgaccaactgcccgcaagcccgctgagctacccagagttaccgcaagagcacgagaacatccgtggcccccagagcttccactaa

SEQ ID NO: 34928 - DNA, 756 bp, Escherichia coli
atgacccaacaaaccctgacccgcctgagaaacctgaaactgaccggcatggcggatgccgtgcaacaacaactggaacatgcgagtacctacgaagggctgcccttcatcgagcggctaagcctgctggtcgaacacgaacaactgagccgggagcagcgtaagcaaactcggctggtcaagcaggcaaggctcaaactccaggccacggtgcaggagctggactaccagtcagcacgcaacctggagcggtcacaggtagcaaacctggcccaaggagagtggctgcgccggggccagaacctgctcattaccggcccctgtggctgtggaaaaacctacctggcttgtgcgctgggctaccaagcctgtcagcaagggcatagcactcgttactaccggctgccacgtctgctgcttgagctgagccaggccaaggtagatggcagttacgccagactgttgggtcaactggcaaggatagagctgctgatcctggatgactggggactggaagcggtgagtgccgaacagcgcaacgcactgctggagatcatggatgatcggtatgggaaatactcgacgatagtggtcagtcagctgccaactgaagagtggtacgcgagcttgggtgacaacaccctggcagatgcgatcctggaccggctgatgcacaacgctcaccggctgtcactgaagggagaatcgatgaggaagaggagaagtgagttgacccaatctgaacagtcgagttag

SEQ ID NO: 34929 - DNA, 213 bp, Escherichia coli
atgagtagccagctagaactttttcatgtccaagaggcgtatgccaaggccgataagccgctatcgaatgaggagctctacgattcagtggcagagctcgctggaatcccgaaaagcgctctgaatgaacaaagtgaaattggcaaggcaaagatcaagcggagcaagctgaaaagacagatacgctggtattgcgtattccggcgaagttga

SEQ ID NO: 34930 - DNA, 363 bp, Escherichia coli
gtgagaagtgtttttgtatggttgaaggccggggcaatactggctttcctattcatcggtattgctggtgctgtcaaccgggtctattgggttaacagccaaggtttgagtcaggggtcgatgtcatccacatgggttaaagaaaagtttggcctagaccttggtgcaatgtgccgttatgacaaaccccagcatgtcgagttcaaagtccttcctgatcagacaatccagttccgctgctcatggtttgaaggtggcggattaacctggtggcctttctacaccgagcatgatgtaaagagcgccgaggcgacctctgtgctcaatgacatcttccagggtacggaggggcatgatgagtag

SEQ ID NO: 34931 - DNA, 243 bp, Escherichia coli
gtggcgaagttgaaggtttatggcgggatcacttatggggtcgaggggcagttcagaactgtcgttgcggccacaagtaagagcaaggctgcttcaattctgaatatcacgatttaccagatgaatagctggtggacggagacttttaacaagtacgaggtcgaggcggcgatgtctgagccgggggctattttttcaaagcctctcgatggcagaggcccatttgtaaagcaggaaggataa

SEQ ID NO: 34932 - DNA, 249 bp, Escherichia coli
atgaacagtgacaagaaatcgtctgaactagccaggctgaggcgtcagcatcagctagtttgctctgtcatcgcagccttgctcatctgtgcaggtatatatgggaccgttgcacgtttgggcttcatcctgatggtgccattgtttgttatcgccttaggtgtgttagtcgatgcgttcctgccaagggtaagttggttcttctgtgtgcgggacgtgagagacatatttgggtggagaaaacgatag

SEQ ID NO: 34933 - DNA, 198 bp, Escherichia coli
atggggcgctgtactgttgaggatgccatccagttactggaagggggaaccattgttgcggtcgtaccggcgtcatccggaccagatacgctggtggtttcctctatcaggcttgaatccggactgacagtacagttttcccctccagcggcagccagtgtcagtgttcagctcgcggagctcgatgatgaacagtga

SEQ ID NO: 34934 - DNA, 939 bp, Escherichia coli
atggctgttatcaactcactccgcgctctcaaaggcgtaaccgcccccgaagaactgaaaaaaggggatggattcactatctctcctcagcttctgctggaggaagaagggtttaacacccgtggcgctttctgcgagaactactacgagcgcccggacatcaaagctggtattcgagtgctggccgatgcttacaagcgtggcgactatgttccgccgatcatcgtcaaagttatcgacggaaaggtgtatgtccgtgaaggtcatcgccgtcgccgcgccatcctgcttgctatcgaggaaggtgccgacatccagttcgtgcaggtcgtagagcacaagggcgatgaagccgaacagagccttctgatcgccaccagcaacgatgggctccctctttctccacttgagcgagccgtgatctacgctcggcttgcaaactgggggtggagcgaccagatgattgcccaacgtgttggccgctcggctgagcacgttcgtatcgcccgtgcccttctggagatgcctctggaactgaaacggatgattcaggaaggctctgtggctgccacctacgctcaggagctctacaacgagcacggcaccaacgctgttgagatcctgaaaaaggcgcaggaagaacaggccaatggcaatgacggcaagaaggccccgaaaaaactgaccaaaaagtctgtcgagaaaggtccccgcctgggcaaaaaggtggttgaagccatgcaccgaggcgtgagctctattaccagtcgtctggacaacatcaagccgaacgatgacggtgaaacgttcacccttaccctgagccgggaagatgttgatgcgtttcaggagctgaaagccaagctggcggagctggagcccaaaactgacgagtccaatgaagaccagcaagagctggatttggcgggtaatcagtaa

SEQ ID NO: 34935 - DNA, 546 bp, Escherichia coli
atggaacaaatcagaaaaggcttaaccctcgaatacgcaaaagagaagcgtgagaagctcttggcggagctcaaatcagatgaacactacagccagactgaaacagtagcctatgggcaccacgacccgctcagcgttcctgtggcagcctgcgatagttgtcatggccgggcgcaaatgcagaaggttataggtcctcctgtgcgctggaatatggtctgcctgggttgtgggaaggcgatccagcaaatccagaaacgaccgtggcaagcagcaatggcgtggaaccaaattaacttgggaacacaggactacagacaactgcccctctttggacttgggagtctgtctcttgagtcagcaagacagagaatggtgggaatacgcaggaacctggagctgagaaagagcctcgccggtatcgagaggacgatcgcccacaaggaaggtcaacgcccaccagggaaagagtaccagcaacgactggaagcatatctgcaatgggccatgctggcgctgaggttgctcaaagtcaaagcaagttag

SEQ ID NO: 34936 - DNA, 570 bp, Escherichia coli
atgcggtcatttttatacagaatattgcttctttgcttcgtcattatcgtccagatagggctaatcgccattgatgcgagcccgttggttgttgctatgttcctctcgctaacagctttagtcgctggggtctggatggcgtaccttcattcccgatttttgatggcggtgactccagtagttgtctctgtgctaatggcgaccctcgccatgaaaatgtttgagccgagactctttgtttctgccagcgaaaaaggctggttccctttgtcattgttcgtctcgataccgttttacttctacttgagttacttgcttgagatagaggagaagagacgtacattccgggccaatgtaattggttttttgcgtggagtttcggaagagatccgtcgttcaactagagagcatagagatcaaggtgagataagacacggtggaacagagctggggagtattgacgaactacaaaggggcgaggccaaagagccagaagtcatcagctctacatcggaccagaaagaacaaggcactcccaagcgagacaagagaaaaatcattctggactga

SEQ ID NO: 34937 - DNA, 219 bp, Escherichia coli
atgtcgttgaatcgctatgccaaccgcgctggttgttacccgcagttccgggagggggatgaaatagcgattgaggtaacagagcagagaccaagaaaagcaggagcagggaagggctttccaagtattcaagatctgaaagcgtcagagggtgttctgagtgaaccggagcagcctatcgaaattcagaaagataagcgcaagattatcttggattga

SEQ ID NO: 34938 - DNA, 282 bp, Escherichia coli
atgagtgagagtgtgcgtcggtcaacgccgatggtaaagattaaagtcctgccgagtttcgtaggggttcccttcccgtcggtgctacttatcgttgcggggctccttaatggccctttgtggggctttgccgcattcgtctttcatatcgtcatcaagcggtacatctacagagaataccggaggttgccatatccgatgccaaccggctcaaggcctatggatgagttgagcgatctccttgtaaagggggataccggaggaatttttccggcggcttga

SEQ ID NO: 34939 - DNA, 429 bp, Escherichia coli
atgatgacacgggcggctatggccgctctgttatccgcgttggtaataggccttgtgtctgatttggccgcacaagagctggtggtaagcccggtggctatagacaagtccactgaggtggagaaagaagctaccttccacaaccgcaagtgggtgttaaggacggggcaggttagtggattcttcatctgccaaggagataacaaagacatttactaccggcatgacagggtgggcgctcactgccagaagacatcgactgggtggcgcaatgtactgggtctcagggacgatgttccggaagttgagctgagcgtgtacctggggaccgttgaaggtgtccccgtgaaagtccttcatcaggaagtggatggttacgatctgaaagtgcagtacaaggttgcacgtaaagggtcagcaaatgagtga

SEQ ID NO: 34940 - DNA, 348 bp, Escherichia coli
atgagcaaaaagcgcatcgtaatcaaaaatggtgaggtctgcgggtttgccgatgaggtttccttcaaaggccttgaagtgcaggaatacagtaaaacaagggtttcgcgcatcgtgccgacgagcggcattctaatgattgcgttctatgttattcgcggactttgttcagacgagtcaaagattgcggcatggactcgtgtttggcgttgccagtggaaggtgctgatcgacggtaaaagctatggcccattcagcagtcgtgcggatgctatctcgttcgagaaggacgagatctacaaacaaggcaaattctttgccgatgccactcacgaggcggcagtatga

SEQ ID NO: 34941 - DNA, 795 bp, Escherichia coli
atggtatatggagaatgcatgagtgttcaaattccaactccctggatggagaaactctcggcctatgattgggcacaacagaccaccggctgttccgaagcgtccgtgttccgcggcgcggcgccgggaaagtcgactctgttcgtcaagacggagccgggaggcccgcttagtgagctgcaggacgaggcggcgcggctgcgctggctggctacgacgggcctcccctgtgcccaagtgcttgatgccgcccatgaagcgggacgggactggctgctgttgagtgccgtgccgggagaggacctgctgtcgtcgcccatcgatccggtcgagaaagtcaccatcatagccgatgtcttgcggcaactgcatgggcttgatcccgttacctgcccattcgaccatagagcggaacatcgtatcgagcgggcacgcgcccggatgcaggcgggccttgtcgatcaggacgatctcgatgacgagcatcaggggcttgaaccggcggagctgttcgcccgccttcaagcgcgcgggccggcttatgaagatttggttgtcacgcatggcgatgcgtgcctgccgaacatcatggtcgagaatggccgcttctccggtttcatcgactgcggccgattgggagtggctgatcgctaccaggacctggcgctcgccacccgcgacgttgcggaggagttgggggacgaatgggtccaacccttcctcgaccgctacgggatcggtcggctcgatccggaccgtgtggctttctatcggctgctcgacgaattctattga

SEQ ID NO: 34942 - DNA, 258 bp, Escherichia coli
atgatcctcgagcgcggaggtctagtgttggagttcctccgccaccctgagctcgatccgttgacgagttggttcagctgctgcctgcggctggacgacctcgcggggttctacgctcattgcgaagccgcgggtatcaccgaagcaaccaaaggatatccgcgcctccatgcgccgcaggcccaagagtggggcgggacaatggctgccttgatcgacctcgacgggacactgctgcggttgattgcgaaccgatag

SEQ ID NO: 34943 - DNA, 948 bp, Escherichia coli
atgagctatcagcagttgaccgaggggcaacgataccagttatcggtgcttcgcgcacaggggatgtccatccttgccaccgcacgcgccattggcgttcatcgctccaccctctaccgggagctgcgtcgtaacgccgggccgcagggctaccagccagacaatgcgcatcagcacgccacccaccgacgggccagtgcggccaaatctcggctatctgccgatgtcatccagtttgtcgagctgacactcgcctggtggtggagcccggagcagataagcgcggtgggcaagcagataggcctcatggtgagtcacgagtggatataccgccatgtggccgccgacaaagcccggggtggccagttgtaccgccatctgcgccagggccacaagcgctaccgcaagggggcgagcagcctgcgttctcccatcaaggaagcccgctctattgatgaacggccggctatcgtcgatagccgggagcggctcggtgattgggaggcggacacggtgctgggcaagcaaggcacaggtgcactggtcaccctggtggagcgcaagagccggctctatctggtcaagcgggtcgcgagcaaacaggctggggtggtgcgggatgcgataatcgagatgttaacgccctacatcgagcaggtgcataccatcacctttgacaacggcggcgagtttgccgaacacaaggcgatagaggaagcgctgggtgccgagacttactttgcgcacccttactcttcgtgggagcgcggtctgaacgagaacagcaatgggctgttgaggcagtttatcccaaagggaacagacctgagagaggtcacggacgaggatgtcaggagagcggagcagtggctcaacctacgacctcggaaatgtctcggattcaggcagcctgtcaaggtattcgaagagtaccgtcaggcggcatag

SEQ ID NO: 34944 - DNA, 1149 bp, Escherichia coli
atgcaacaacggcgtgcgttcgcgctactgacgctgggtagcctgctgttagccccttgtacttatgccagcggggaggctccgttgaccgccgctgtggacggcattatccagccgatgctcaaggcgtatcggatcccggggatggcggtcgccgtactgaaagatggcaaagcccactatttcaactatggggttgccaaccgggagagtggccagcgcgtcagcgagcagaccctgttcgagattggctcggtcagcaagaccctgactgcgaccctcggtgcctatgccgcggtcaaggggggctttgagctggatgacaaggtgagccagcacgccccctggctcaaaggttccgccttggatggtgtgaccatggccgagcttgccacctacagtgcgggtggtttgccgctgcagttccccgatgaggtggattcgaatgacaagatgcgcacttactatcggagctggtcaccggtttatccggcggggacccatcgccagtattccaaccccagcatcggcctgtttggtcacctggccgcaaatagtctgggccagccatttgagcaactgatgagccagaccctgctgcccaagctgggtttgcaccacacctatatccaggtaccggagtcggctatggtgaactatgcctacggctattcgaaggaagataagcccgtccgggtcactccgggcgtgctggcagccgaggcttacgggatcaagaccggctcggcggatctgctgaagtttgccgaggcaaacatggggtatcagggagatgccgcggtaaaaagcgcgatcgcgctgacccacaccggtttctactcggtgggagacatgacccagggactgggctgggagagttacgcctatccggtgaccgagcagacattgctggcgggtaacgcaccggcggtgagcttccaggccaatccggttacgcgctttgcggtgcccaaggcgatgggcgagcagcggctctataacaagacgggctcgactggcggctttggcgcctatgtggcgttcgtgcccgccagagggatcgccatcgtcatgctggccaatcgcaactatcccatcgaggccagggtgaaggcggctcacgccatcctgagtcagttggccgagtga

SEQ ID NO: 34945 - DNA, 1173 bp, Escherichia coli
atgcctgtattcctgttgtgcagttttctgatgatcatcctctatccggttgggatcgatctctatctggtcgccgtgccccagattgccgataccctgcaggcgagcgaggcgcagatccacaccgccttctccatctatctgttcggtatggcggcgaccgtgctgctggggggaatgattgccgatcgctacgggcggcgctgggtagtgctggggggggcgctgatttttgtcatcgcctcgctggtggcgggtcatgccgaggggatcaaccagttctacctcggtcgtttctggcagggggtcggggccggtgcgctctatatcatgacctttaccgtgctgcgggatgtgctgagtcaggatcggctggcgatggcgctctcgatgatcaacggggtgatctgtgtgatcccggtgctggcgccggtgcttggttatctcatcctgtcccattttgactggcgcgggatcttcgtggcgatggcgctggtggcggccgtcagtggtctggttaacctgctgctgctcaaggagacccgtccggtgcggcaaccggggagtggcgcagcgctgccctttgccctgctgcgctccccgcgctttatgttgctctccctgctgaccagtgccagcgtgacctccattctggtctatgtcagcgtctcgccgctgatcctgatgaaggagtttggcttcacgaccgagcagtactccatcgtgatgatggtgatggccggggtgagcatgtctacttctttcctgacccctctgctgttgcgccgtttgggcacgcagaaggtgctggcggtgtctcatctcacctatctactggcggcgtgctcactgctcggcagttggcaggcggggggcgatatccatctgttgctgccggggtttgcgctggtttgtgtcggcttttcctgtggcttcggggtagcgatgggggaggcgctcgatggttgccagcataacgtggcctttgccagcgccgtgctctgcatcatgcagatcagcctctccggcctctatatctggttgcttggccggctcggctttacttcgtccgagatgctgatctatgccctgctgctggcactgctcagttacctggccgtcaaagggctggtaccatggctcgcggtccgtgaagcgcggtcgcagggctga

SEQ ID NO: 34946 - DNA, 963 bp, Escherichia coli
atgcgcaatctgggtgaactcgatttgaacctgctggtggtcttcaagtacctgatgcaggagcacagtgtggcaggggcggccaaaaagctctgcgtcaccccgtcggcggtgagcaagtctctggccaagttgcgggagtggtttgacgatcccctgtttgtgcgggtgcggcaggggttgcagccgaccaacctctccctgaccctggaggaggagctgaaggtctggttccagctcaccgacagcatcacctcgctcaatagcgatgcgatccccgacggtgcccgctttacgctggtgatggagtcccccttctacatcagcttcctgagcgatctgcccatgaccatctatgagaagtacccgaaatcggtggtcaggatgctggggtgggatcaccactccctcaacgacatcgtcaatggcgatgcggatctcggtttctgcgcccgcgaaacccatggccgctcccgggccaaggtcaaccgcttgccttattacatcgatcacgaggtgctgtttaccgatcgcccggtggtctttctgcgcaaggatcaccccctgctcgagcagaagtggtcgctggagaactttctggcctgcccccagatcagcatggtgtgggaagcgaacgatacctgggccctcgacagtctgctggaggatgaggggctgaagcgggaagtgcccatcatggtcgccagtttcgagcaggcgctgcatattgcctcccagtcgagccacgaactgatcgcggtggccccttcctactgtggtggttatgccagccggcatcacggcaatctgatcgccatgccgctgccgctgcccgagaagctctacgcccagctggagatcgccttcatcctgttgtggcacaaacggcacaatcaggatgccaaggtgatgtggctgcgtaacgagatccggcgactctataacgacgaattgccacgttaa

SEQ ID NO: 34947 - DNA, 948 bp, Escherichia coli; identical to SEQ ID NO: 34943

SEQ ID NO: 34948 - DNA, 807 bp, Escherichia coli
atgtggtcgcgctacaaagtgcggaaagtacatcaaatcccaatcgttgagagaatgtggcaagctatcgcccaacaaatcgctgcagccgacccaaaaccgctacgcggtttcggtcggctgagctcagtcgttaggcaacggtgttgttgcagatttttggtgtggaattatatgaagaactattttgagagcccgtttaagggaaaacctctcgtcgaacaggtaaagaacccaaatatcaaggtgggccgttatagctattattcaggctattaccacgggcattcatttgatgattgcgctcgctacctcctgcctgatcgtgatgacgttgataaattgataattggaagcttttgctccatagggacgggtgcatcttttatcatggctggaaatcaaggtcaccgatatgattgggttacatcattcccttttttctatatgaatgaggaaccggcattttcggaatcagttgatgctttccaggcggcaggtaataccgtcataggaagcgacgtgtggattggctctgaagcaatgattatgcctggagtaaaggttggccatggagcggtaattggcagccgggctttggttaccaaagatatagagccatacacaattgttggtggcaaccctgcaaaagagataaagaagcgcttttcagaacaggaaatttcaatgttgctagatatgaagtggtgggattggccgttggagcaaattaaagaagcaatgcctcttttgtgctcgtctgatattgcaggcttgtaccatttttggcagcgttcaagtgcctaa

SEQ ID NO: 34949 - DNA, 570 bp, Escherichia coli
atgagtcacccacaacttgagctaatagtcgctgtggattctaagttgggattcgggaaaggcggcaagattccatggaaatgcaaagaagacatggcgcgatttacgcggatttctaaagagatccgcgtgtgcgttatggggaaacacacgtatactgacatgcgtgacatgcagttagaaaaggatggcgccgaggagcgaatcaaggagaaaggaattctccccgaacgcgaatcgttcgtgatctcctcgacgttaaaacaagaagatgtcataggcgctactgtcgttcctgatcttcgtgctgtgatcaacctgtatgagaataccgatcaacgcattgctgtcattggtggggagaagttgtacattcaagctctttcatcagcaacgaaactgcacatgaccataattccaagagagttcgactgtgatcgatttattcctgttgatccgatccagaacaattttcacattgattccagtgccagcgagactgtggaggcaaccgttgatgagactcaagagcgcattcactttgctacttacgtgcgtaacaatcagtaa

SEQ ID NO: 34950 - DNA, 1188 bp, Escherichia coli
atgttacagatagtcggcgcgctgatcctgctgatcgcaggatttgccattcttcgccttttgttcagagcattaatcagcacggcttctgcgctggcagggctcatattgctgtgtctgttcggcccggccttactggctggctatatcaccgaacgcataacccggttgttccatattcgctggctggcaggcgtatttctgacgattgccggaatgatcatcagcttcatgtggggacttgatggtaaacatatcgcgctggaggctcacacctttgactctgtgaaatttattctgaccaccgctctcgccggtggtctgctggctgttcccctgcagatcaaaaacattcagcagaacgggatcacaccagaagatatcagcaaggaaattaacgggtattactgctgtttttatactgcctttttccttatggcgtgttctgcatgcgcaccattgatcgcgttacagtacgatatttcaccgtcactgatgtggtggggcgggttgttgtactggctggctgcattagtgacgctgctatgggcggccagccagatccaggcgctgaaaaaactgacctgtgccatcagccagacactggaagaacaaccggtgctcaacagtaaatcgtggctgaccagtttgcaaaacgattacagccttcctgactcactgacggagcgcatctggctgacgctcatttctcaacggatttcccggggagagctgagggaatttgaactggcagacggaaactggttactgaacaatgcctggtatgaaagaaacatggcagggtttaacgaacagttgaaagagaacctgtcattcacacctgatgaactgaaaacgctcttccggaaccgcctgaatttatcaccggaagcgaatgacgattttctcgatcgttgcctggacggcggtgactggtatcccttttcagaaggtcgccgttttgtatcattccatcacgtggatgagcttcgtatctgtgcctcctgcgggctgacagaagtacatcatgccccggaaaatcataagccggatccggaatggtactgctcctctctttgccgcgaaacagaaacactgtgtcaggaaatttatgaacgcccttacaacagctttatttccgatgcaacggcgaatggtctgattctcatgaaactgccggaaacctag

SEQ ID NO: 34951 - DNA, 837 bp, Escherichia coli
atgtggaccgacaccactcgcgcgcatcatgcccgcgcggggctggctttgccaagcgatttgaccgatgccgaatgggcggtgctggagccattctttccgccgccgtcgcgtgtcggccgtccgcgcaaatggccgatacggcggattgtcgaggcgatcctctacctgttgcgcggcgggctgccgtggcggatgctgccgccgtgctttccgccggtctcgacggtgcggcgctggttctacctgtggcgcgacaacgggctatggcgaggtctcaaccatgacctgctgatgaccgcgcgcgaagcccatggccgcgaggcttcgcccagtgccggggtgatcgacagtcagagcgtcaaaaccaccgaatccggcgggccgcgcggctatgacgcgggcaagaagatcaagggccgcaagcgccatatcctgaccgataccgagggcaacctggttcatgccgtggtccatacggccgatatccaggatcgcgatggagcgccgctggtgctggccgggatcgtcaaccgcttcccatggctgcgccacctgttcgccgacggcggctatgccggtgacaagctcagggacgcgctccgcaagatcggcacgtggacgctcgatatcgtcaagcgctccaacaagaccaaaggcttccaggtgctgccccgccgctgggtcgtcgagcgcaccctcgcatggctcagccggaaccggcgccttgccaaggacttcgagcagaccatcgcatcggccaccgcatggctcttcatcgcctccatccaactcttcacgagacgaatcgcaagattatcaaattacacaggataa

SEQ ID NO: 34952 - DNA, 2196 bp, Escherichia coli
atgacaaaaatgaaaaaacaaaacttgttaggttgtgcttttattgttgttacatattcctcttatgccgcatcaagtgataacgcaacctttgatcctaattttttaaagatgtctgacggtgaagaagcaagacatttagatttaaagtattttatgcgtccgggcggaatgagccctggtacatacactgtggcaatatttcttaatggggtaaaagttagtactgaggaatctgttgagtttatttcagataaaaaacaggagggggttacatttccattctttaatcagttcattttagctagttggggagtcgatgttgataaatataatatcgaaaaggaacctattgataaaaatatacctggcagcactgcatcgttttctgctaaagataacgcaatttatataaaaatccctcaggcgtcgatgagaaatgaagtttggtttcgggaaccatcagcaacatgggatgatggaataacttcttttcttgttaactataacttttcagggacatcacaaagttacgatgggaataaaacaggaaatacttatggtagctttgagagccaaataaactatggcgcatggcggttaaagaattttagtaattatgtgagaagtagttatcaaaaaaaatttaaatctgttagctcttatttagaaagaggttttgatttctttcagggaggtcggttgacgataggtcaaacgacaacagacggtaccatactggatagcattcctcttgaggggataacaatatcctcagatgatgggatgttaaaaccaatgcttgcgcagtacagtccgactattcgtggaatagcaaattcaccagcaagagtaatagtgaaacagaatggcaatataatatatgaaaaaaatgtgcctgcaggtgaatttgaatttaatgatgttactcaggtctataatggtgatttaaaaattgaaattgttgagtcaaacggaacagttagagaatttactcagtcagctgcagaattaccagtcttacaaagaaaaggaaggtttcgttataatatagcattgggtgaatataggagtgattataaggaattcacgaaagaacctagattcatacaatcatcttttgcttatgggttaggatataattatacattatacggaggggggattttctccgaggattacaagcaatcaaccttaggtttgggaaaatattttgaaaactttggtgcattctcctttgattcatctttttcttctgctgaattggataacaatacagtaaaagatggtcaagcttatcgggttatgtactccaaaattttctctcctacagatacggcatttaatcttgcaggatataagtatcaaagtagtggatattatgattttaatgattttcaatatgtgaataatgggcttgatttttataaccagaaatcaagattaagtgtttcattatctcagccgctcggagatgaattaggggctttttatttgtcggcttctgatgataagtattggaataatggttcaggatataatgtaaacatatcttattctaattacattggttttgtaaatagctcgctgtcattttttataaataaaaatccttctatttctgaagttgataaagcgatctttatatctttatctatcccactagataggttatcgaattcattgcgtaataattatttaaataccagtgtttcaggttctaaacatagtgatacacagagggttggcttcagtggtaatgggttaaataatcaattgaattataatatctatcagtcctttgattccagaaacaatagtcattctgggaatgttgatgcatcttatgtaggtacttacggtagggtgtctggaggatatttttatcaagataatttagagcgtttttcttatggtattaacggtggggttgctattcatgatgagggtattacattgtcccagccgttgtcattgaatggtgccaatgctttgctcaaagtagaaagagctaatggtataaaagttcaaaacggtattggaatctatactgattttcgtggttataccgtcgttcctaacttaacatcatattccagaaataaagtgtcaattgatactagttcacttgatagaaatatagaagtatcaagatcagatctggcagtacggttgttcctactcgtggggcattag

SEQ ID NO: 34953 - DNA, 183 bp, Escherichia coli
atgcgaaagtttaaaataattattgaaacgggaatagccggtggagatttcgaggatgaattcgaagtggatgatgatgcgacgcctgatgaaatacatgacgaagcaaaagatattttctttaactactgcaattactcatatcacgaaataaaagacgaagaggaagagcaaaatggctaa

SEQ ID NO: 34954 - DNA, 576 bp, Escherichia coli
atgcttttacccgtaagtattacatcgtgtggcttgtatcacccctactggcatttgggagagcgcaaccctcatagcgatgaactatcaaggcagatgatggattttaaggatgaaaataatcgtaatcatcaaagggccattaaccgtttttctcgattagctatagataaggttgggcggttagtaatcagaggtggcggtgggcgttttgttgagtctcctttttcgatagcagttgtcccgtctcacactgaaggcagaatttcaccggctttgattgaggtcgccgagcgaatcgtaaatgttcaccgtcggggcattgttgattgctgtttggaaagaacacgcactgttcctagcgcacatcgtgaaggtggagatcgctcaattactggtcacatgtctagtatcagagttaggggtggtaacctcatggggcgaaatgtgttactactagatgatgttaaaacaacaggcggtagtttgtctgcgtgtttttatttactggagtctgcaggagctggagttataatgccattagctctgctagaaactgcaaactatgaggagtag

SEQ ID NO: 34955 - DNA, 960 bp, Escherichia coli
gtgcactcagaagaattaaaaaatacacttggattagctattcaaatcgggaagctagcatctgatcaaagtgtattaaaattctttgagcttatcgattttgatgttattcgtgatatacgcgacttaactgagatggttaatagccacgggtttctaaaagataaaatatctgagactgattttctaatagcgaacgctgaattggagaaccaccatgttaatggtgtggagctaataccatatgggtctgaattctatcctcttagtttagcttttactcctaatccaccatcaattctctacataaaaggggataaaagtatactcaaagaattgccgggtgtcgcaattgtaggatcccgtgatacctcccctgcaggggaagaaataacgaggcggatcactaatcagatagtgtctgctgggtatattgttgtaagtgggttagcaataggcactgatgcgaatgctcacaaggcaacgttacaggcaaaaggaaaaaccattgctgtcttggcgcatggtcttgaggaggctaagccgaagcaaaacagtcgacttgctcaagagattctggataaaggtggtgcatggatttctgagtatcctatgggtcggccggcccagaaacaatcatttgtacaaagaaatcggatacaagttggattatctgcaggttcaattttaatcgaggctgcgttaaatagcggaacgataactcaagctgagtttgcaaataaggcgaaaagaccagtgtttgcggttgtacctcacctacctaataatccgcttaatcttaattgtgagggaacagttgatttagttaagagcaacatggctagagcgctaaaaacaaaacgggattatgatgatgtgattatgatcataaatgagtcccgggagtatttgttagagctaaaatggccagggaaacagagtacattagacttgatttaa

SEQ ID NO: 34956 - DNA, 438 bp, Escherichia coli
atgtcgaaaaatctcgatttatttaaccaacaaacggcggaaatctttgcagtactatgggaaaattttcccgtaccacaggtgattaactacgacaaatttaacgccgcgctacctgatgactactttgaccaacttaactcaccagaaatgaaagcgttaaatcagttgcgtagtgtggttgaaggtacattcaattttctctgtgaaaacgggtacattcagtacaacacagaccatcagtcgtatttttacgatgttcgacttactgaaaaagcgctcacagttcttaacaaaaaacccgaggtgcttggtggaaatgaaacgatgggggataaagtgatcagtgcggtgaaagatgggactcctggggtcattgccggtgtgattacaaatctgctgactcacggcgttaatctggttgcgtcagtgtcatag

SEQ ID NO: 34957 - DNA, 1092 bp, Escherichia coli
atgggttacgaaattgattttctagctgttggcgaaaaaaaaagcggcgatgcgatctgcatcagatggggaaacctacatggttcaagagatgaacaaaaagttgtcgttattgatgcaggatatgccagcaccggagaacaagtcattgagcatattgaaaaatactaccgcacaaaaactattgacttgcttatctccacacaccccgatggtgaccacgtcggtggacttacatctgttctagaaaatgcagaagtaaaagagttttggattcataagccttgggaacataatcaaggtctcgcaagtgagtttgcagatggcaggataactgatgccagtattgcaaatcgaatgaaagaaaacttacaaaaagcttatgacgctgtcaaattagcggaaaaaaaaggaattgaaataaaagagccttttcaaggaatgacctgggataatgctactctggttgttatcgggccaacccaatcttactatgagactctaatacctgatttcgcaagaatgcccaaaaaagctgaggatacagctggatttgaagtactaaaagcagtctttgagtctgtagttgaaaaaacgaagaaatttattgattacgttgctgaatggtttactgatgaaggtattgataatgaagataccacctcggcacaaaataactcaagtgtcattttgaaacttgagattgatggaagaacgttagtgttcactggcgatgctggtataacagccttagatcaagcctcccaatacattaataaagaatcattaagattcattcaagtacctcatcatggtagccggagaaatgtaggccctgatgttctcgataaacttgttggtaacattgtaaatgaaggcgaaaaaagggagataaccgcatttgtatcatgtgccccaggttcagataaacatccccatcaagctgtaattaatgcctttactcgacgaggagcgaaagttatcgccaccgaggggcttggtaagtaccatttttataatgctcctgaaagggcaggatggaaaacagccactccacgatcatacattagtaactatagaaccgaagaataa

SEQ ID NO: 34958 - DNA, 621 bp, Escherichia coli
atgcactcttttctgaagagattaactactgatagactcaggttggatgtcagaatcgctatagatttcttgctatatatgtatttttcaatgaaaatgatctctgatttaaactgtagtaaggtgattggtatggatggtttatgggaaaaaatatcgtcatataatatatttaataatctttttccaggtgctctttttatttatcttcttgagagaatgacgaatatcgttttatctggcgatgatttaataaaaaatgttgtcctctattattttgttggcttagtcattggccggattggttctatcgtattggaaccttttttaaaactatcgcgtttgattaagtttgctccttataaagattatgtgtcagcatgtggtgtggatggaaaaattgaaactttgcaagagattgcgaatatgtataggacgatattttcaatgtcaattattcttttggcgacattgtgcgttgtaggacggtttactggcgagacatatggcttatctaaaataacgttggcggtttttgctattttgtttgttgtctcatatattaaacaaataagatacataatatatagagtaaatgctgttaataataagctgccgtaa

SEQ ID NO: 34959 - DNA, 2274 bp, Escherichia coli
atggccggtaatttcaaagttggcatgaccctgactgcgaaggacgaagcctcgcaggttctggaaaagggacaaaaacaggttatcaaagccaccgaaggtgtaacaaaggcaacccggaaggcaggcgcagagcagacgcgtaccgggcaggaaagcgttaacagcacgaaaaaggcggcaaaagagatacagcgtgccgcccgtgcccgggaaacgctcggtattcgtgcagaacgtgaaatccggcgtgaaatttatcagacggttgccagctataaccgtctggcccgcgccggttttgaatctgcgcaggagcaggagcgcgccatgcaggccacccgggaaaaagcccgggcactcaagcgtgaactggatggcgttactcaggcacagatgaagatggcgaaaacgcctgttatccccgaacgggggcgttttgcgcgtgcggctgcatttggcgggaatgccatgacaataggcggcggaattatggcaggagccgccattatgacgcaaccagtcagaaatcaaatgagttatgaacgtcagctcagcatgatggcgaacacggagttcagtgatggtggtctggaaggcaggcagtttgggcgtgaaaagctgaaaaacagtatccgcgcggcggtaacgtatggtggcggaacgaaagaggatgcagctgaagcaatgaatgagatgttggccagcggcgctttttcctgggataccgcgaataatctcttaccgcagattatgaaatttgctactgcatccggcgcatctccacgcgatctggtcactatggcggccaaagctaaacaaacatttggactgacagatgacgacctcccggccatgtttaatatggctgtcgcagcaggtaaagcgggtaattttgagctacgggatatggcggaatatcttggacctcagatggcattagctggtaacgccggaatgaaaggactggatggactccagaaattactggcatttaatgaggtcgcagggattgccgcaggcagcagcagtgaagcaggtaataacgttgtaaacctgctggccaaacttttcagtagtgaatcagcaacaagggcgaaaagcatcacgattgatggcaaaggtattgatctacctggtacgttgacccgagctatggaaaacggcattgatccgatagaagcattttcacgcctcactgataaagtcaccgcgaacaacaaacaatatcaggagcttcagaagcgtctggcagcaacaaaagacaaaggccagcaggacaaaatcctagagtctatggcgaaaattcttgaggggttcggtgttggtgagcttgttggtgatatgcaggcactgaaggcaatcctggcttacaggaataacccggaatacctaaagcaggtcgaaactgaaatcagtcagcaacgcaccctgccggaaggtcagcgcgccggagatctggattttaaattcatgtcaggtacgaatgattttaaaaccgaacaggctaaaaacacgcttgaattttcacaaatggacagcgtgaaaaagctggctgatgcgtccggtactgtggccgatgccataagctgggcgggtgaaaagtttccggggctgaccacggcagtggtgggtgctacgaccgcaattgaagcgatgaccgcagcggctctgacatgggccgggatcaaaatcctgaccgggggtaaacccggtggcaaggctggcgaggttgttggtgatgtaattgaaaacacggtcaaaaaaggcaaaggatttaaattccccggtattgccggtggcctgctttctttaggtggcactgttacggcactggccaccgcaaccagcccggaagaagacgccgccgtcgaaggaagcgaagaacgctggaaacgcatccgcgcccgatacacccaggaagaaatcgacgccgcccgcaaaaaataccagccatggtggcagtttggggaaggctattccaccgaaaacgaagaatggttgaggcgctgggaggaagacaggaaaaaagccgcagctgatgccctgccatcaccggcgcaggttaacaaagccgcaggaaacacaaagcctgaaccggcatcaacacaacccggacgcatcacccagccggaatacctcacgcactgggggccacctgccagccccattaatttcaccacacaactggtgctcgatggtcaggtcgtggcggaggcagtgaacaaatacaaccttcaggacggtaacagaggtacgggaggaacttactga

SEQ ID NO: 34960 - DNA, 477 bp, Escherichia coli
atgatgaaaaaatggttgttttgtttagtaggggttattttctcttgttctgtgctggcacagacagaggaacaggcgcaaaaggaactgaaacgttatcaggatatgaagccattggctgaacagatgcttcgggaaagtggaaaactttattacgctatgccagaagctgcatcgcagtatcagcagggaaatattgaagagtggaagaatatcaaaaaaggactaaaacaactggatgaacaggccagtaaactgggggacgacccgcttgatcctgtgtatggttcctgcataaaaatgaaaaaccagctacaggattactggtctaacgttatcagggatgacaggcagtttctggaacgttcaagaaatcagtttaaagaatatcgtatggattgttttgattcgtttgtttttggtaaagagcaaatagaatcaagaaaaggcctggttattctagacctgactaaataa

SEQ ID NO: 34961 - DNA, 411 bp, Escherichia coli
gtgaagaaaatgatttttgtggcggcattgctaaccattacccaacatacgcaggcttcagcagttattgtggcatctaccgctgcgaccactgctgccgcagctgcagcgaactctgcgaatatcgcaaaccaacaggcacagcgtgctgctaatgcatcagccagtgctctcccgatttctgttaagggcagtaagcaaaatctggggttcataacgtgcggtaagcgttcttatgaagctgtaggatcactgggatgtacggtatatggcgacagtgagagcagagaaattccatggaaaacgtggcccggatacgttcttggctcgaagctcccggccagttatgaggtaaacgccgtgtcgtttgatcactataacgacgtggcaactgtctatttcacatactga

SEQ ID NO: 34962 - DNA, 174 bp, Escherichia coli
atgcaggtggcatttgttggcttattaccacatccgatccgtttttggctgtcatcgtcactcataaagtcgcatgtttttactgatgacaacggcatcccgcccccaaagcgtcgtacaggtattgcagctgcacgacgtgcagcaaagaaacgcaggagagcaaaacgatga

SEQ ID NO: 34963 - DNA, 309 bp, Escherichia coli
gtgaaccagcaaaccagaataagcgataagagcctgaccagactgattgccgatgctgacaaaatgcttgatatgcgcgggctgattgtagacagagagtggtggacgcttttacgtcagtccctgactgaacttcaggagcgccgcaaaaacagcatttccgaatctggaatccgtgctgaaaccctgaatgatttaatccgacatattgacagaaacgtggatattgatgcgatgaaatcgccgtttgaactgtcatctgaaattgtggattacgttaataagcaactgcacaaggagaatacgtaa

SEQ ID NO: 34964 - DNA, 387 bp, Escherichia coli
atgagtgttaccgttatcaatgaaatgcttgggcgtacatttaaagaagtagttaagaatgaaaacgatgaacttgtttttcgtggtgattattcccggggagtatggggaaccgtgtttacatttttccactttcaggagggctgcgaaaaagtctggattgaggacatcgtcggagaccttgacgacctgaaagatgaaccgctgacagaggctgaagtggttaccgaagaatgtgatgttggggaaggtcatcagacatggagtttctttaagttcggcacatcaaaaggctgtgtagtcgtcagatggtgcggtgagagcgagggcttttattctgagtgcgtttcactgaagcgggaattaactgacgtcttcgatttttaa

SEQ ID NO: 34965 - DNA, 216 bp, Escherichia coli
atggcggttaagttagaagtaattatctataccgatgaaaaaggctgtgttttaacccagaccacggggagttattcgaaggacggagcttccgaaaaggagtttcaggtggcaacaagattacatgatgctatcaaggaaacgctcagaaatgactataacggcgtgaatcttttttctgaaaatgttgcgcctcgcgcacataacacacattaa

SEQ ID NO: 34966 - DNA, 648 bp, Escherichia coli
atgagtaaacaaaccgccgatgatttttccttttctcagaatagaaaagaaagcattcaggacagaatcaagcaactggttggcactaggagtctgcgtaaagccacctcagactgggggttgccgtactcgaccataaataactactttgagaaaggcaccactcccggcctaaatgtggtcgctacgatagcaaaattagagaatgtatcactggaatggttggtctacggtgagagcaggcatgatccaataatagaaaaaaaggtgcctacagaagacgttaaccgcccaaacacaagtattgtcgatgaaatactaaggcgagctactccagaagatagagagcgtcttattgatatgctgtgttgtattggcatcaaaggagtcctggaacgcctacagcaacccaccaggcaaaccaagcaagccgatagcgaacttgaggaacaaaggaaggccattcaaagcctgaacatcaggcaatcgcttaaagacgctgtttgcatggcattagctggcgatgaggaaaatgacaaagagattttgcgccgcgccaaagctattttctgtgctggaacaccaggtgatcgcgttcccgtcacaccggagcaagaaactaagcctgtaaacaagaaatcagcataa

SEQ ID NO: 34967 - DNA, 195 bp, Escherichia coli
atggccgaggccgccgatgccgatcacccactgccagtcggcacgcagcttattggcgaagccgccgcagcgcgcttggctgaaaaaaatgtcctgctaacgccatccggcagagcatccgccctggcatttatgatgaccttgcgtgccgatcgtcgctataaagacgctcaaccgcttcccttggtaacctga

SEQ ID NO: 34968 - DNA, 2961 bp, Escherichia coli; identical to SEQ ID NO: 32071

SEQ ID NO: 34969 - DNA, 150 bp, Escherichia coli; identical to SEQ ID NO: 13600

SEQ ID NO: 34970 - DNA, 369 bp, Escherichia coli; identical to SEQ ID NO: 14436

SEQ ID NO: 34971 - DNA, 312 bp, Escherichia coli; identical to SEQ ID NO: 9190

SEQ ID NO: 34972 - DNA, 528 bp, Escherichia coli
ttggagaaggttgtatgggctgtcgtaaagaaactggagtggcttattccggatgaaaaatcagatgaagaacagaaaacttataatgacgaatataatcgggcatatcaagagtttatggattcgggaggtaaatattcaccgaacgctggattgactgctgataatattgcgaaggcaaaagccgaagaggctgtcgaaaatatgcggcatccagaacggcaagaacaggcaaaatctcaggcagaatcaatgctcgcgtttgttaatccattatccgggatggtaaataaaaataccgcgcctgcagcactggattcgtcgacgttaaatattgatacgttgaagcaggcagtctcgacacctgcgccggagcaaaacaataaaatcgaaatcaatattgtcggtgcgacagatccgcagtcaatacaacaatctgcagcgtcgggggtgctcgatggactgagacaggctgcgagttcgtacaatcgtggcgcgatgtttgataaaccagctgcggcggggtga

SEQ ID NO: 34973 - DNA, 1398 bp, Escherichia coli
atggctacatacggcggtcagtttacgcttactattattctgagcaatgatccggactacacccgtaacctttttgacgtgatgtacggcgctaaaaagcctattacgccggaaaagaatttcatgtcatcggtgctgtgtgctctctgtgtcgataccggtaccggtcaaccctgtaaccccggagacacccgacaaattatcaaccagcttatcgagctggcttttaaagagtacggtgaaaataatccgcgactttatcgcgcctcaacggaagaactggtggattcagcactgcaggactcgggactgtatgaaaaacatgatgcagcctggtgggccagatcaacctggttcgaagtccgggatatgctccacaatgccgggtatatcatggcggctcagcgggcacattatcaggcaatgccccagcttcccgaagtgtcctcgatgctgggccataccagtctcagggatgttttcggtactgttcagcgtgatggttcaaacgaacttctgctggactacatccgccgcgctctcgagcagggacataacgactaccccatgatatccgggtatacccggtttatgatcaacccggaaacccgggtcatcgctgtcgatctgaataatgttgccggtgacaaaacgcctgcaggcaggcttaaaaccggcatcatgtacctgcttgcaggtcagatcgccggtggtgacttcaccctgccacaatacagggatgaagtgttaaagcagcttccacgggaataccatgaaatcgctcttaaacgtattaaccaacttgatcaggaggttaagacaaaagtttatgatgaactgcataacgcccggggcattgacttcatctgggaaaatctggatacccaggagcgtgagcaacgcaagtttgctatccgcacggttctgagtacgcagtatctgagggactacccggaaagcgttcttaagtcagcgaatactctctggttagtgcgctacaaacccgaagatatccccgtactgagggataacttcaacgtgcctgaatttatgctgaaacgcttcctgaaaatgccggaaggcccggcaccagatggtagtggtgttcctgttctgggagtattcagggtaaaaagtggcacgcttgcgagaatactcaaatttaccgtcggtccactggagctatgggcgctgaactcatcgccaaaagacagtgccctgcgtaaaacgctgacaaataagttaggttcagttcgggcacgtaagattctggccgaaaacttccccagaggttctgcaacgtcattaattgagcaccgggcgggccaacataacagtgacaatgttattgaagatctggcctcggagctcatccgaaaacagggatacaatctctga

SEQ ID NO: 34974 - DNA, 483 bp, Escherichia coli
atgtctggacccccgaaaaccccgccacgcctgcatttgatacgaggcaacccctcaaagcggccagttaaagacctcaaaaaaaccgctaaaaaggatgaaaaaggtctccctaaaattccgcaacatttaggggcgcaggggaagtactggttcaggcgaatggcggaagagctgaatgcggaagggatcatttctcagcttgatgcgcgtgcgcttgagctactggtggaagcctataccgaataccggcatcactgcgaaacactcgatgttgaggggtacacctaccgctcgaaaacgcagaacggtgatgtgctgattaaggcacacccggctgctgcgatgaaagcggatgcctggaagcggatccgggcgatgcttgcagaatttggtatgtcaccggcaagccgggcaaaagtaaataccgccggaccggataatgttgatccgctggcagagcttttaaaagcgagagactga

SEQ ID NO: 34975 - DNA, 255 bp, Escherichia coli
atgggtgaagttatctccgtttttgaatatgacctattggggagtgacaaagcggcttcagttggcgcaaaactggtgcctccactggtctttaattatttagaagcgcttagcttggcaagtaatcaagggagccagttcctcaaactcacctctcgctcaggatcaattgcgcccacgccattggctcgttgtaatgagccataccacgctcgaggcgtaagttgtttatatcacgttcaatatcccggctaa

SEQ ID NO: 34976 - DNA, 354 bp, Escherichia coli
atggatttttgcaggaattattacagattagattttgataaattagttgaaataccatggggggctaatttatttgatgatattcactttgctaataaaaatataattcaaaagaatagttatacttgtcttttcttgggagttgattgggaaagaaaaggtgggaaaacagccttgaaagcaattgaatatgtaaggcagttatatgggatcgatgttagactaaaaatttgtggatgtactccgaatcaaaagattttacctacttgggttgaattaattgataaagtagataaaaataacgttgacgaatatcagaaattcatcgatgtgttatctaacgctattttgtga

SEQ ID NO: 34977 - DNA, 627 bp, Escherichia coli
atgaacccggttgatcgtccactattaaatattggcttaacgcgattagaattcttgcgtatatcaggaaaaggccttgctggtttaacaattgcccctgctttactgtcacttttgggttgcaaacaggaagatattgatagcggcacagtagggttgataaatacacccaaaggggtgctggtgacccaacgtgcgcgatgcacgggttgccaccgctgtgaaatctcttgtaccaacttcaacgatggctcagtagggacattcttctcccgtatcaaaatccatcgcaattatttctttggcgacaacggggttggctctggcggtggcctgtatggcgatctcaactataccgcggatacctgccgtcaatgcaaagagtcgcaatgcatgaacgtctgcccgattggtgcgattacctggcagcagaaagaaggctgtattaccgtcgatcataaacgttgtattggctgtagcgcctgtactacggcatgcccgtggatgatggccaccgtaaataccgaaagtaaaaaatcctcgaaatgtgtgttatgcggtgaatgcgcaaacgcctgcccaacaggggcgttaaaaattatcgagtggaaagatattactgtgtga

SEQ ID NO: 34978 - DNA, 456 bp, Escherichia coli; identical to SEQ ID NO: 7975

SEQ ID NO: 34979 - DNA, 390 bp, Escherichia coli
gtgaatggctttaacggtggtgttctgaacggtgttccttctgcgtatcactggtatacggaacagtatggcgtgaagtggcctgtggggtatgaggtgaatatcagccgtcagggagaaaacttcattcaagtggatttcgacacgccgtggtgtcagccggaaagcaacgttgttgcagaattaagccgccgtttcggctgcacgctggagcactggtacgccgaacagggctgcaatttctgtggctggcagcgatatgagcgtggagagcttgttgatgtgctgtggggggaactggaatggtcttccccgacagatgatgatgagctgccggaagtcaccgcgccggagtggatagtcgacaaggtggcgcattacgggggatga

SEQ ID NO: 34980 - DNA, 390 bp, Escherichia coli
gtgaatggctttaacggtggtgttctgaacggtgttccttctgcatatcactggtatacggaacggtatggcgtgaagtggcctgtggggtatgaggtgaatatcagtagtcaggaagacaacttcattcaggttgatttcgacacgccgtggtgtcagccggaaagcgacgttattgcagaattaagccgccgtttcagctgcacgctggagcactggtatgccgaacagggctgtgatttctgtggctggcagttgtatgagcgcggagagctcgttgatgcgctgtggggggaactggaatggtcttccccgacagatgacgatgagctgccggaagtcaccggacctgcgtggatagtcgacaatgtggcgcattatggcggatga

SEQ ID NO: 34981 - DNA, 297 bp, Escherichia coli
atgcgtaaatccttcaacggactgggagaacaggtacaacatgtgctgaatgataatcccttctccggtcacctgtttatcttccgtggccgacggggtgacaccgtcaaaattctttgggctgatgctgatggtctgtgcctgttcaccaaacgcctggaggaaggccagtttatctggcctgcggtacgtgacggcaaggtatccattacccgctcgcaactggcaatgctcctcgataagctggactggcgtcagccaaaaacatccagccgtaactcactgacaatgttgtaa

SEQ ID NO: 34982 - DNA, 411 bp, Escherichia coli; identical to SEQ ID NO: 15516

SEQ ID NO: 34983 - DNA, 246 bp, Escherichia coli; identical to SEQ ID NO: 4533

SEQ ID NO: 34984 - DNA, 297 bp, Escherichia coli
  misc_feature (98)..(98): n is a, c, g, or t
atgcgtaaatccttcaacggactgggagaacaggtacaacatgtgctgaatgataatcccttctccggtcacctgtttatcttccgtggccgacgggntgacaccgtcaaaattctttgggctgatgctgatggtctgtgcctgttcaccaaacgcctggaggaaggccagtttatctggcctgcggtacgtgacggcaaggtatccattacccgctcgcagctggcaatgctcctcgataagctggactggcgtcagccaaaaacatcccgtcttaacgcactgacaatgttgtaa

SEQ ID NO: 34985 - DNA, 297 bp, Escherichia coli; identical to SEQ ID NO: 19400

SEQ ID NO: 34986 - DNA, 297 bp, Escherichia coli
atgcgtaaatccttcaacggactgggagaacaggtacaacatgtgctgaatgataatcccttctccggtcacctgtttatcttccgtggccgacggggtgacaccgtcaaaattctttgggctgatgctgatggtctgtgcctgttcaccaaacgcctggaggaaggcctgtttatctggcctgcggtgcgtgacggtaaggtatccattacccgctcgcagctggcaatgctcctcgataagctggactggcgtcagccaaaaacatcccgtcttaacgcactgacaatgttgtaa

SEQ ID NO: 34987 - DNA, 255 bp, Escherichia coli
gtgctggatgagaaccccttctccggtcacctgttcatcttccgtggccgacggagtgacatgattaaaatcctctgggctgatgctgatggtctgtgcctgttcaccaaacgcctggaggaaggcctgtttatctggcctgcggtgcgtgacggtaaggtatccattacccgctcgcagctggcaatgctcctcgataagctggactggcgtcagccaaaaacatcccgtcttaacgcactgacaatgttgtaa

SEQ ID NO: 34988 - DNA, 435 bp, Escherichia coli; identical to SEQ ID NO: 9005

SEQ ID NO: 34989 - DNA, 186 bp, Escherichia coli; identical to SEQ ID NO: 24262

SEQ ID NO: 34990 - DNA, 444 bp, Escherichia coli
atgaagccaatacaattaatatattcaatactaatctatttatttatccatcttggtgcttcggcatccgacaaaatatattcagcaaaagaaatattactgaaccttgaagtaggtagttttcataattcgctatcagagggagtcccgggagagtacaaaaaccacaaaacatttaaagagaccgagttcactcacggtgaatatgataaaaacaagtatttttcacttacgaataatgataagtcatggatgatttcattaaagataatcggaataaaaaacgatgaatacactgtctgtttcggcgacttctccatcattagaccaccaacatatgtagccgtaaatccgctgattttaaaaaaaacgaagtccggtaatttcagagtagtaaaagaaataaaaaaatcaatccctggctgtgcaatatatcatcattaa

SEQ ID NO: 34991 - DNA, 1074 bp, Escherichia coli
atgtcagattcgatgattgtgaatggctcaggtagtgtacctgcttttcttttctcaggtagcacgttgagtagttacaggccaaattttgaagccaattcaattacaattgcattgcctcattatgtggatcttcctggtcgcagtaatttcaaactgatgtatatcatggggtttccgattgatacggagatggaaaaggacagtgaattttcaaataagatccgtcaggaaagtaaaatttcaaaaactgaagggactgtatcttacgaacagaaaataactgttgaaacaggtcaggaaaaagacggtgtaaaagtttaccgtgttatggttcttgaaggaacaattgcagaatctattgaacatctcgataagaaagagaatgaaaacattctgaataataaccgaaatcgcatcgtcctagcggacaacactgtcattaactttgacaatattagtcaactgaaggaatttttacgtcgttcggtaaatattgttgaccacgatattttctccagtaatggttttgaagggtttaatccgacaagtcattttccgtccaatcctgacgcgccatattttgactctacaggtgtaacattcggctcaggtgttgaccttggtcagcgaagtaaacaggacttgttgaatgatggcgtgcctcagagtattgcagataaacttgacggatattatatgcttcgtggacagggtgcatatgataaagtaaaatcaaatccgctgacactttccgataatgaagctcatctcttatctaatatttatattgataaattctcacataagattgaagggcttttcaatgatgctaatatcggtcttcgattcagtgatcttcctttgagaacccgtacagcactggtgtctgttggttatcagaaagggtactatttaccaaaaacggcttctgatgtatgggatgcattggttgcaaaagactggaatggacttgttactgcatttaatgattttggtggaagtacatcggaacgacgaaaaagagaaggggcccttgttcaacaggatattgattcaggattattgaaataa

SEQ ID NO: 34992 - DNA, 738 bp, Escherichia coli; identical to SEQ ID NO: 5109

SEQ ID NO: 34993 - DNA, 234 bp, Escherichia coli; identical to SEQ ID NO: 10186

SEQ ID NO: 34994 - DNA, 837 bp, Escherichia coli; identical to SEQ ID NO: 8992

SEQ ID NO: 34995 - DNA, 207 bp, Escherichia coli; identical to SEQ ID NO: 24139

SEQ ID NO: 34996 - DNA, 384 bp, Escherichia coli
gtggggacggacaccgcaaaagaaattctctatgcccgtatgaaagccgagcccacgcctgcggatgaagccacgtcgtatgccatccgttttcctgatgatccggagattttttcgcagacagaggcgcagcaactggtcgcggaagagcttgtggagaagtgggaaaaaggaaagatgcgtctgctgtgggataacaaaaagcggcgtaacgaagcgctggactgcctggtgtatgcctacgcggcattacgtgtgtccgtgcaacgctggcagcttgatctggctgtactggcaaaatcccgggaagaagagacgacccggccaacccttaaagaactggcagcgaagctgtccggaggagtgaatggttacagtcgctga

SEQ ID NO: 34997 - DNA, 312 bp, Escherichia coli
atgtcgggagacgagaataaacttaagaaatatcgtttcccggaaacactgaccaaccagagccgctggtttggcctgccactggatgaactgatccccgcagcaatctgtgttggctggggtatcacaacatcgaaatatctgttcggtattggtgcagcggttctggtttatttcgggattaaaaaactgaaaaaagggcggggcagttcctggttacgtgacctgatttactggtatatgccaacagccctgctgcgcggtatttttcataatgttcccgattcgtgtttccggcagtggattaaatag

SEQ ID NO: 34998 - DNA, 573 bp, Escherichia coli
atgctgcgtctgcggcgggccggacagataaccggtcagcatgtgcctgaaattattctgctcaactcccatgacggatcatccagctaccagatgttacccggatattttcgtgccatttgtaccaatggcctggtctgcggtcagtcgctgggagaagtccgggtgccacaccggggaaacgtggtggacagggtcatagaaggtgcttacgaagtggtgggcgtgtttgaccggattgaggaaaagcgtgatgccatgcagtcgctggtcctgccgccaccggcacgccaggcgctggcacaggcggcgctgacttaccgttatggtgatgaacatcagcccgtcaccactaccgacattctgacgccacgacgccgggaggattacggtaaggacctgtggagtgcttatcagaccatccaggaaaatatgctgaaaggcgggatttccggtcgcagtgccagaggaaaacgtatccatacccgggccattcacagcatcgataccgacattaagctcaaccgggcgttgtgggtgatggcagaaacgctgctggagagcatgcgctga

SEQ ID NO: 34999 - DNA, 177 bp, Escherichia coli; identical to SEQ ID NO: 4925

SEQ ID NO: 35000 - DNA, 375 bp, Escherichia coli; identical to SEQ ID NO: 14403

SEQ ID NO: 35001 - DNA, 249 bp, Escherichia coli; identical to SEQ ID NO: 5145

SEQ ID NO: 35002 - DNA, 384 bp, Escherichia coli; identical to SEQ ID NO: 34996

SEQ ID NO: 35003 - DNA, 270 bp, Escherichia coli; identical to SEQ ID NO: 19615

SEQ ID NO: 35004 - DNA, 240 bp, Escherichia coli
atgatgccggatggcgaccgttttcatctggttaacggtgaaaactggtttgaccgtaccgtgagtgctgatgccgcaggcatcatccttacctcccttgtgattaaccgccagttgtggctgtaccacgacagcggggatgcgggactgacacacctttaccggatgcgcgatgcgcagttgtggagccacatcgaatttcaccccgaatgcaatgcgatttacgcggcacttgactga

SEQ ID NO: 35005 - DNA, 1188 bp, Escherichia coli
atgttccctgtttcatcaattggtaatgatattagtagtgatttagtccgtcgaaaaatgaatgaccttcctgaaagcccaacaggaaataacctcgaagcactagcaccaggtatagaaaaactaaaacagacctctattgaaatggtcactttacttaacacgttacaacctggtggaaaatgcattatcactggtgattttcaaaaagaattagcgtacttacaaaatgtaattctttataatgtctcgtctcttcgtctggattttttaggttataacgcccaaattattcaacgatcggacaatacttgtgaacttaccattaatgaaccgttaaaaaaccaggaaatatccacaggtaatatcaatattaattgcccattaaaagatatttacaatgaaatcaggaggttaaacgtaatttttagttgtgggactggagatatcgttgatctatcctctctggacttacgtaatgtcgatttagattattatgatttcacagataaacatatggctaatactattttaaatccttttaaattgaattcaacaaattttactaatgccaacatgtttcaggttaattttgttagttcaacacaaaacgccacaatctcctgggattatttactaaaaataacgcctgttttaataagcattagcgatatgtattctgaagaaaaaatcaagtttgtcgaaagttgtttaaatgagcctggagacattaccgaagaacaattaaaaattatgagatttgcaattataaaatctataccaagggcaactcttacagataaattagaaaatgaattaacaaaagaaatatataaaagctcatcgaaaatcatcaattgcttgaacagaattaaattaccagagatgaaagaattctcatcagaaaaaatatatgattacatcgatataatcattgaagattatgaaaatatcaaagaaaatgcttatctggtcgtcccccaaattaattatactatggatttaaacatagaagactctagctcagaagagttactttcagataataccctcgagaaagacgaaaattctccggacaatggctttgaggtcggggaatataacacatatgaagcatataactcagagaagcaatattttaccagagaggactatacgtatgattacgaccttttaaatgcaatatag

SEQ ID NO: 35006 - DNA, 756 bp, Escherichia coli
atggcagcagaaacagtagtcacagatgcagcaggtacattagatacagcaataacaataataggttttattgccacaatagcctcattagtactcgccattggggctatttggctttcttttgttttttataaaatgtcgaatgaggcttctaaagagacaactaaagcagcaaaagacatccaggcaagtgtcgaacgactggaaaaaatatttgacaagttatattcagatacattctctatgatgagagatacggtaacggatatgcgtcagcacatatggaaaaaaccccatgcaggaagctctgatgagattctcaacaatgaagaaaaaataaacgaactcaagaacagcattagtcaggaaattatttgcatcgttgatgaaaagcttaagtccaatggagataatgacactaaaatcaaagagttagagagtaaaatcaagaaagttcttgatagtggaatacaaaaaaccattcgttcacaagcagtacctacaatcttaatgcgtcgtaaagcactaagtctgataaggcgatatgaaaagattaaagtggaagaactattgagaaaaatgaacattctgttctcagaggatcattcttttaacgataatgagttcatggaagcattatttaatcttcgtgagaacggattgataacatggaccggcccctccggaaggatatccttaaacgattatcttctttacattggcgatggcgagaaaaataaagaggccaaggaatag

SEQ ID NO: 35007 - DNA, 1125 bp, Escherichia coli
atggcaagagtcccaagacaacctgaacaagtgatcacagaagaagataaagttgacctggataaccagatcaaatccatgcaaaaaataacggatcaccaaattagagagtttcctgtaagtgtcattgttgacaaatttcagaaaggattagaaaccgaccaagcagaactatacatacctgattatcaaagggaatttgtttggagcaatgttcaaaaatcaagattcattgaatctcttttgctaaatattcctatcccatatgtatttgtcgccgatatcggaaatgacgatgggcgattggaaatcgttgatggtagccagaggattagaacactttatcatttcctaaatgataaatttacccttactggattaaaaaagctaacttcagccaacggattcaaatactctgacttcacacctgcacgtaagcttagattcgatagaaaaactattcgaatgattgaactcactgaattatgtgatgaagaagcaagaagggagattttcgatcgattgaatacaggtggaataaaactcacgacaatggagcaacgacagggcagtaatgatgggccttttcttgatgttgttaatagactatcagagtttccattgtttagggaaatatgccctctaaacgatgctaggatcagtcgtggagaatatccagaattggttcttagatattttgcctattgtgataactatcttaactttgaaaaaagtgttgatactttcttaacccaatatcttgaccaacgcaatgagtcatttagtcctgagcaagaagaaaaactaactgcacaatttcaagatatgtgtgaatttgtcaaaacatatttcccctatggtttcagaaagaatgcaacggcaaacactgtaccaagaattcgctttgaagcgttagctgtcggttccactttggccttaaaaactgactctaacataataccaacaccggtagaggaatggttaaactcagaagagtttattaaacatacaagatctgatgcatcaaattcaaaacctaaagtaaaagcacgtattgaatatgtaagagacaaacttttaggtgtgcagaccgaagatactgttctagatgatagtgaggagtaa

SEQ ID NO: 35008 - DNA, 732 bp, Escherichia coli
gtggtcatcatgaacagcaaaattttattttctgaaagaaaagaagatatagaaaaatattttgattttgttaaattcattattgatgagagaccaacattctcgtacaaagatcgcatagcaggcgaatgtaaacaccgcgaaattgatatcgaaatgacgcatatcctaaaagccaatgcgtttattatattatataacttaattgaagccactatatctaatgctattgaagatatacataatgaacttaattcgtgtgatgatctttgtgtcgataaaatttgcgaaagtttaacaaagcttgccttaaaaaaattagaccatcatatggtgagtgacatggatttttcacaaggtgatatagcaaaactagttctaaaaaaatggctagaggaacacaaaaaacaagttcaagcagataaaaaccccctattttctggaaatgttgacgcacagaaaattagggatgttgctagtatctatggtttttcctctcaaacagatcgttcaaaaactcataatggtgggaatttagtaaacataaaaaaagcaagaaatgcattggcgcatggttcagaatcctttttaaacaagggtcaagaaacgtctattgacaaccttgaacttcttaaaaatgaagttttccattacctagaagaaatactagaaaacatacaaaaataccttgatgatcgcttatacatacgatcatcaagactacaggcttaa

SEQ ID NO: 35009 - DNA, 1128 bp, Escherichia coli
atgtggggagcattcttgttgtttgctaaaacgctcgagatttttgaaggatacagttatactctgtcggaggatgaatcggagactaaaatggcggtaaaagttgttgatcttttttgtggtgctggcgggcttactcatggcttaaagcaagccggattagatgtagtcgctggtattgatatagagagtgcatgccgggttgcttatgaaagtaataacagtgcgctttttattgaaaaagatatttctctggtgaccaaagacgagcttaacgatctttttgaaggtgcgcaggtaagggtgttggctggttgtgcgccgtgccaacctttttcaaggtatacgcaagggcgcgataagaaaaatgataaaaagtggcctcttctttatgaatttgaacgtttaattcgaggggttaatccagagatcgttacaatggaaaatgtacctgatgtaacgaagcattctgtttatagtgacttctataatagtttagaggcattgggttatcatgtctgggccggaaaggttgaatgtgtagattatggtgttccgcaaaatagagttaggcatgtattattggcatctaaatttgcgccgctttcatttgtaaaaccaaaagtagaaaaggcggtgacggtaaaagaatgcattggcggacttcctccattaaaggctggtcaaacggatcctgttgatcctttacataaagcaagtaaattaagtgatataaatctaaaacgtattgcttgctctaaaccaggagggacatggcgagactggccagtagagttgattgcatcatgccacataaagaaaagtgggcaaggttatgctagtgtatatggacgtatggattgggataaaccaagtcctacaattactacgctatgttatggttttggaaatggcagatttggtcatcccgagcaaaatcgtgcaatttctctgagagaggctgcattgttacaaacgtttccaaaggattacgtttttactgcacccaatgagaaagtatctataaagaatgttggtaggatgattggtaatgctgtaccggtaaaactaggtgaggttataggtgagtcaattataactcacctaaaagagcacaatatagtttaa

SEQ ID NO: 35010 - DNA, 177 bp, Escherichia coli
atggttagttattacatggctagatcaacggggattttgtacaaaatagatcgccatacggtgtactacttcaataatcaagcgaatgaatggcgggaatgtttttctaagtttaaatctgaaatagaaaacaaccatgaatattacattaaggttgacaatgtaaccgtggcgtaa

SEQ ID NO: 35011 - DNA, 702 bp, Escherichia coli
atgaaaagaataatatatattagttttatcattatagttgtagttatatctatgtatttttacaactttaatactggaaaagggttatctaaaagtactgaggtttggggacagttcggagattatttgggtggggttgttaatcccattctcacttttttatcaattgtgttattgattaaatcaatagatttacaacgtgatgctaatgcaagtatcattaatgaaaataagaggcaggaaaagctcgattatctgaagaattttgaaatgcgattttatagtttgatcgacgcacaacgcactgcattcgaaaagtttacattattaaatgttgatggggtaaatataaaaggagttgaagctgtaaataaacttgaggattttatttttaacatgaagaatgaaggtaagagtaaggaggttgtttctaaatttattacagattgcgatgtgtctgaatcaatctactcttcagtacggcgcttttatttattagtccgtctcatagatgaaaagctggaacgtgaagagcgggatgaatattatgagatactgattaatatgactgattttccgttggttagattaattgttcttgcattatgtgtctatgattgggatataataaagtatattgactctagttctgttttagcgaaggatgagttggtacaatatcgtgcatattttcaattgtga

SEQ ID NO: 35012 - DNA, 765 bp, Escherichia coli
atggattatgggttgaagaccctggcaggaacttctagagttgtttcaactatggctgaggcaattttaaaaaaagaggtttcggaaagaagaacgagtgttaatgatattaggacacagctaaagcagagttttaaaagctcttatgggcaaaatttctgtattgaagttaatgatcccgttttaaaaagaaaattaaagaaaatgggacacgatgttttttgcgaagttatgtcctattatatttcagagtctatgtttttggaggctaataaattaagttcggctgctcaggatgttgtaaatgatcttaatgatatagaagataaattgctggaggtattacgtcgaggattaattgatatgcataaaataactacaatgagtagttttaatgtcgagctaaatcatcaccctcgtggtaataggcagcgaattgcaacattaacgccgaagacagctaaacatattacagagaccgaagagggtactagtgaatatcagattgatgtcatttttactcgttttaattcaatgacaggtaacggtcggcttattgtaagaaatgacgataaaacaaccgcctttggtcttgcaaaaggattacgatttgttcctttgcactttaaaaagaaaattactgagaatcttcataagaacaatggattaactaagcaaaattggcaatatgtaacgttaactgtacatgatttaaaattggctggcggggaagtagtaaaatattttattcatgagatttcatag

SEQ ID NO: 35013 - DNA, 672 bp, Escherichia coli
atgaaacgacatctgaatacctgctacaggctggtatggaatcacatgacgggcgctttcgtggttgcctccgaactggcccgcgcacggggtaaacgtggcggtgtggcggttgcactgtctcttgccgcagtcacgtcactcccggtgctggctgctgacatcgttgtgcacccgggagaaaccgtgaacggcggaacactggcaaatcatgacaaccagattgtcttcggtacgaccaacggaatgaccatcagtaccgggctggagtatgggccggataacgaggccaataccggcgggcaatgggtacaggatggcggaacagccaacaaaacgactgtcaccagtggtggtcttcagagagtgaaccccggtggaagtgtctcagacacggttatcagtgccggaggcggacagagccttcagggacgggcagtgaacaccacgctgaatggtggcgaacagtggatgcatgagggggcgatagccacaggaaccgtcattaatgataagggctggcaggtcgtcaagcccggtacagtggcaacggataccgttgttaataccggggcggaaggggaccggatgcagaaaacggtgataccgggcagtttgttcgcggggatgccgtacgcacaaccatcaataaaaacggtcgccagattgtga

SEQ ID NO: 35014 - DNA, 351 bp, Escherichia coli
atgcaaataatcattgattatctttgccatgctgcaaatacgctttttggtttttatcaacaaccattcctgaaagaatgggatgaaatgctaaatgacatcctcgacaaaggattaataatggaggttgacgagtttacaatcaaatttaattatgagggtgaaatttatctaatttgggtctggagtagatggtattcatacggtcatatttattcaattggcgataaatacattaaaaggggtcaagaattccgaccacgcttccgcacaatgcgccgcctgcataacctgcatataaatatattgaagatcaggaagcgcgggagctattcaaaatttacggggtaa

SEQ ID NO: 35015 - DNA, 1083 bp, Escherichia coli; identical to SEQ ID NO: 31946

SEQ ID NO: 35016 - DNA, 465 bp, Escherichia coli
atggttatagtcccaatcaagaataacatttataatcttccttttacagttctttgtgaggtacataagaactggcataaaacgccaaatgcagcgccacgtgtttttgaaaccagcggtaatcaaaccggagcagctattattcttggcttcggtcgtgcaacggatcatgacggattcccttattgtgatattggtggctcaagcccacgcgttaatgaaaacgcttctcttgaaaaaatggttatagggatgcgtgtaaaagcaaatcaatttacatgtgcaataagtaacggacgtatatccagcgaaacaaaaacaacctggacttatatcaaaagctcagcaactatttgtatcggtggtaaaacaaatactggagaacgtcatctatttggtcatgtcagaaatgttcgagtatggcacaaagcattaactgatacgcaattaagcgaaattgtttaa

SEQ ID NO: 35017 - DNA, 360 bp, Escherichia coli
ttgacaaggtgctatcggaattccggggggaactgtcagaatgttatcgataaatggaagaaaatcagtgatgaacagagcgcagaaatcgatcagaagctgaaagacaatccgctgggagcccagattattgataaggaagttgcgaagggcggatatgatatgacgcagcgccctggttggctgggtaacattggtgcggaagtaatgaccagtgatgaagccaaagcctatgttcagcagtggaatggccgggatctggcaaaaatagatgtaaacagccctgaatggacgaagtttgcagtgtttgcttccgatcctgaaaatcagccatgctggtcagcggaggtttactggtaa

SEQ ID NO: 35018 - DNA, 138 bp, Escherichia coli
atgcgagtcgacaaaaatactgtcaaggctgttttctgtgtggtcgctttcgtcttcatggtggtaatagctggcgcgactgcggcaattattagctatatcggcggggtgggtgatgctgccaacttactgatttag

SEQ ID NO: 35019 - DNA, 162 bp, Escherichia coli
atgaaagggcatcattatatgtcagataccaataagtttattgttctgctcaataaacttatcattaacaagcgcactcacagcagccataataattgcaaaacccagaatacctacaagggtccccggcatgacggaaaacgtccatgcggtaacagatga

SEQ ID NO: 35020 - DNA, 246 bp, Escherichia coli
atgcggcgggtctgcctgggggagccggttgcccgttccggaaaactgccgacactggcaccgccgttactgcgtcagctggccgccatcggaaataacctgaatcagacagcccgtaaggtgaacagcgggcagtggtcttccggtgaccgggttcaggtggtggccgcactgatggccatcggggatgagctgcgccggctgcgtctggccgtcagggaacagggggcgcgggatgatagttaa

SEQ ID NO: 35021 - DNA, 1050 bp, Escherichia coli; identical to SEQ ID NO: 11403

SEQ ID NO: 35022 - DNA, 894 bp, Escherichia coli
atgagcgccgtacttcaacgcttcagggaaaaattaccgcacaaaccgtattgtacgaacgatttcacgtacggcgttcgcattctgccgaaagacattgccatccttgcccgcttcatccagcagaaccagccatatgcgcagcactggcttgcctttgacgtggaccggatgggagctgcgattgactggagcgaccggaactgtccgcccccaaacatcaccgtaaaaaatccctgtaacgggcatgcgcatctgctctacgcgctctggcttccggtgagaaccgcgccggatgcatcggcttcggcgctcaaatacgctgccgcgattgaacgttcgctgtgtgagaaacttggcgcagatgtgaattacagcgggctgatttgcaaaaatccgttccaccgggaatggcaggtggctgaatggcgggaagatgcctacaccctcgatgaactggcggattatcttgatttgagcgcctcagcgtgccgtagcatcgataaaaactatggcatggggcgaaactgccacctgttcgaaatgacgcgcaaatgggcttacagggcgattcgtcagggctggcctgtattctcacagtggcttgatgccgtgatccagcgtgtcgaaatgtacaacgcatcgcttcccgttccgctttcaccgcctgaatgtcgggccattggcaagagcgttgcgaaatatacacacaggaaattctcaccagagggattttccgcagtacaggctgctcgaggtcgtaagggcggaactaaatccaagcgcgtagccgttcctacatcagcacgttcgctgaagccgtgggaggcattagggatcagtcgagcgacgtactaccgaaaattaaaatgtgatccagatctcgcaaaatga

SEQ ID NO: 35023 - DNA, 813 bp, Escherichia coli
gtggatgatgattatttaaagtcatttaatgaaacagcaaaacaatttaatacctcaattattgtatatttaattgacccaaaatactttgctgatctgccgacgtcacagttttggtcgtacgcgacatacttcagggtattgtcctttgaatatcttagtgaaagtatttccacactgctgtatctggatgccgatgtcgtttgtaaaggaagtctgaaacctctcacaaaaattatatttaaagatgagtttgctgcggttattcctgacaatgatagtactcaggcggcatgtgcaaaacgtcttaacattcccgaaatgaatggacgttatttcaatgcaggcgttatctatgtcaatcttaaaaaatggcatgaagcaaatttgacaccgtatttactcacgcttttacgagggggaactaaatatggctctcttaaatatttagatcaggatgcgttgaatatcgcatttaatatgaataatatctacctcgcgaaggattttgatactatttataccctgaaaaacgaacttcatgatcgtagtcatcgaaagtatcagcaaaccattaccgataaaacagtattgattcactatacagggataactaaaccatggcatagctgggctggatatccgtctgcatcatactttaatatcgcgcgtgaacaatctccctggaagaaatatcctcttaaagaggcgcggactgttgcagaaatgcagaaacaatataagcatctgtttgcccatggtgagtatattaaaggtataacttcattaattaagtacaagcttaagaaataa

SEQ ID NO: 35024 - DNA, 480 bp, Escherichia coli
atgccactgctggataagctgcgtaagctgtacggggtcggaccggtatgcagtgaactacatattgccccgtcaacgtattaccactgtcagcaacagcgacatcatcctgataaacgcagtgcccgtgcgcagcgcgatgactggctgaagaaagagatactgcgcgtatacgatgggaatcatcaggtatacggtgtgcgtaaagtctggcgtcagttgttacgggaaggaatcagggtagccagatgtacagtggcgcgcctcatggcggttatgggacttgccggtgttctccggggtaaaaaggtccgcactaccgtcagccggaaagccgttgccgcaggcgaccgcgtaaaccgtcagtttgtggcagaacgtcctgaccagttgtgggtggctgattttacttacggtgtgcccggagttcagggcgggcatggatgcttaaatgaaccgcgagtctgtctggaatattga

SEQ ID NO: 35025 - DNA, 510 bp, Escherichia coli
  misc_feature (43)..(43): n is a, c, g, or t
atggtcgggaagcgctgtcatgagcgcactgaccagcgtatcnagttcccagccggtgcaggccgatacggccacaaccggatgtacgggccggaacagccggaataccgcatctgttttctcacgaatgttctgtgcctgtgcgggagaaggctgaatgccggccatatcccattcatggcagggctccgttttgtcggcctgcgtcaccacaaacagcacctgctgatgtccccggtgcaggatgtgtcgccagaaatactcatccacagacagggcacggtcatcggctttaatcagccacagtaccaggtcaagttcaggcagaatgtcacggtacagggcttcatactctgcatccctgtcccggctctcgcccaccccgggcaggtcagtgataatcatgctgtgaccgtggccactcagacggaagcgccgcacttcccgggtgccggcgtgaacatcactgaccggggtgacctccccctgaaacagtgcattacagagtga

SEQ ID NO: 35026 - DNA, 1437 bp, Escherichia coli
  misc_feature (1377)..(1412): n is a, c, g, or t
atgacaaaaatgaaaaaacaaaacttgttaggttgtgcctttattgttgttacatattcctcttatgccgcatcaagtgataacgcaacctttgatcctaattttttaaagatgtctgacggtgaagaagcaagacatttagatttaaagtattttatgcgtccgggcggaatgagccctggtacatacactgtggcaatatttcttaatggggtaaaagttagtactgaggaatctgttgagtttatttcagataaaaaacaggagggggttacatttccattctttaatcagttcattttagctagttggggagtcgatgttgataaatataatatcgaaaaggaacctattgataaaaatatacctggcagcactgcatcgttttctgctaaagataacgcaatttatataaaaatccctcaggcgtcgatgagaaatgaagtttggtttcgggaaccatcagcaacatgggatgatggaataacttcttttcttgttaactataacttttcagggacatcacaaagttacgatgggaataaaacaggaaatacttatggtagctttgagagccaaataaactatggcgcatggcggttaaagaattttagtaattatgtgagaagtagttatcaaaaaaaatttaaatctgttagctcttatttagaaagaggttttgatttctttcagggaggtcggttgacgataggtcaaacgacaacagacggtaccatactggatagcattcctcttgaggggataacaatatcctcagatgatgggatgttaaaaccaatgcttgcgcagtacagtccgactattcgtggaatagcaaattcaccagcaagagtaatagtgaaacagaatggcaatataatatatgaaaaaaatgtgcctgcaggtgaatttgaatttaatgatgttactcaggtctataatggtgatttaaaaattgaaattgttgagtcaaacggaacagttagagaatttactcagtcagctgcagaattaccagtcttacaaagaaaaggaaggtttcgttataatatagcattgggtgaatataggagtgattataaggaattcacgaaagaacctagattcatacaatcatcttttgcttatgggttaggatataattatacattatacggaggggggattttctccgaggattacaagcaatcaaccttaggtttgggaaaatattttgaaaactttggtgcattctcctttgattcgtctttttcttctgctgaattggataacaatacagtaaaagatggtcaagcttatcgggttatgtactccaaaattttctctcctacagatacggcatttaatcttgcaggatataagtatcaaagtagtggnnnnnnnnnnnnnnnnnnnnnnnnnnnnnnnnnnnnttttataaccagaaatcaagattaa

SEQ ID NO: 35027 - DNA, 249 bp, Escherichia coli
  misc_feature (191)..(200): n is a, c, g, or t
atgaaaaatattgctgttattctatcgggtggtatggggtcaagatttggcggtacacttccgaaacaatttacaaaattagcaggtaaggctgtaattgagtacactgtagaagcttttgaaaaatcattgaatattgatgaaattattatcgtatctcacccaagttatgtggacctaatttggaaatnnnnnnnnnnggaaatttgtaaaaaaaaatcaatgggaaaaagttacaaaagtttttaa

SEQ ID NO: 35028 - DNA, 288 bp, Escherichia coli
atggcaactttgcaggaattaatcgacctgacgccagaacaggaaaaagcgtggaatcgccttgtgaaggctgtaaaggatttcagggcagccggaggaaagttttatagcgtcctggacacgctgagcgcatacaacggcgagcacgttgccagcattgataacgataagggctaccacactgcaagcgtctatatgcctagcattgatgcgccaggactaaccagttgggctgatgattggcacggcatcacgctgaaagatggcgttgaagtggatgaggactaa

SEQ ID NO: 35029 - DNA, 189 bp, Escherichia coli; identical to SEQ ID NO: 11611

SEQ ID NO: 35030 - DNA, 519 bp, Escherichia coli
atgaaaaagagtatctatttcattatatgtccagttctttctctatattgtggaatgacgatggctgaaacattaccaccgtcaagtactatttctagagatagcactgcatttgcgcaaggtacgatcgtaataactaacaattgtaaggttagtatcaccacccctacacaaattgaacgtcctgctacacaggccacacaaactcagcatgtgaattttactattactcaaagtccgtcttgtgcagatataggctccagaattgcttattggtctgaaggaagtcagtcaccttttcgtatggtcaatacaagtaatcctaattcattttacacttttactaccgttagtgaatcttctgtaacagatacattacggggggggaatggtaaacaatattcgctagctaaaagaggggttaagaacctaaatgtgagtatccaaattcccaaaacaaataattatattcctggtaattatacaattggtcttaacgcaggcttggtcatgaactaa

SEQ ID NO: 35031 - DNA, 327 bp, Escherichia coli; identical to SEQ ID NO: 15729

SEQ ID NO: 35032 - DNA, 1182 bp, Escherichia coli
atggcgttcgataactctcacctggctgacccgggcctgttctggcgtgctgtgtctgctgcgggggctccagttgaccgtgaggactggctgcgcctctgctccggcatcgcgtgctgggcgtctctctgcggcgaggatgggctggcggctatcgaggcctggtctgcccgccataatcgcggctctgcgcatgaccggtcgcagtaccggcacttcctcaagctgaaaggcgtaaccaatcctgaggcaatggctcaggtgttcctgcagttctccggcgaggtgtactggcggctcgactcgaagcgcacgccgccgacgcctgaacaggttgctgctctcgctgaccggaaacggcgatcgatcgaggcggtggccagacgcgaagatgccgaccggcgcaaggccgagaaggctgcggctgatgcggtcaggatgctggcgaaaggcgacggtaatccggcctataccccgtactggcgcaataagaccacaatcgccaggcgtggtggcgtcagcctcccgcccctccccgctgaccttcgtgtgggtggcttgttccgttcgttcgaaccgagggcgtactggtcgcgctgtctgcttgttcctgcctatcgcctgaccgacgatcgccagctggttggcgacgcgctggaggccatctgcggcgtctgctctgctggcggcaaaaccggcgacaagttctcccctgcgggtacccaaaaggcgggacggttctatccgatgcccggctttatggacgtgctcgatacctcaccgcatgcgccctactcgcctctgttcgtctgtgaggggttcgccacggcggttgccctgcatcatctgacgaagggcaaggtggcagtctgcgcggcgttctcaattgccgggttcggcagctgcgtggcgtcgctgcgtcggttctggccagatgttgatgtgatgctggtaccggatcacggcgaagcgtaccgcctggcgcataaagcggcctatggcaatgagcgagagccggtcccgacaattccaggtgcggcggttgtgtcgttcgacggcctcgatcgcttcacaccccgggataacctcgactggttcgacgtgctggttgaagagggcgaggatcgggctcgtgagctgctgcgctatgcggttcgtcatgcccggcttgagcggcgttga

SEQ ID NO: 35033 - DNA, 210 bp, Escherichia coli
atgaaaaaacgaatctataccgctgatctcgctgcgctgttgaacgtgtcgctgcgcacgctctcccgcctgagttcccgggggatcgtaccgactcctgcaggtcgttcgctccatggcgggcattactggctcgctggcgatcccgctatcacgcgcctgatcgccgaccagcgtcgtcccgggagggcttctgatggcgttcgataa

SEQ ID NO: 35034 - DNA, 1239 bp, Escherichia coli
gtggacgacgataacgacacgacgaatcagccgccagtcgaggcattaaggcgcgtcggcgctgcagagcgatacgatctcatgcccggcgtcctgttcgtgacctgcccgggcgggtgcagccttcgcgtcgaagcatgccgacaggtgtaccgtcgcagccacgaggacaagagcatcgacaacccccacctcgagtgtcgccggtgcccgatcggttttgcgctctggtctggcattgagcaggacaacgaagcccctgtcactaccctgccagaaacccgcaacctttgccctcgctgcagccgcacaacaaaccgcctcatcagcccgaaaaaacccggagcatcgctgtgcgtcagctgctggaaccgggagcgcgaagccagtaccggtgtcaacgcacgcggcagagccagccgcacgcccccgttcgtctcgccgttcctcatcggcatcagcgatggctggcaggtctggtacggcatccaccagggcgaagcactcgcccgcgccatgcgtgccaatcccggatcccgattccattcacgccgcccgggaccggtcgcagccacaccggacggtttcacctacctctgccccgagcacagcaagccgctcagatgggacacagacgagcaccagggcgtcgtttcattcgcatgccccagctgcacgccaacggcgtcagccctcagcgtcgcgccggtgatgcaacctataaccatccagactgcacaggacgccgcataccagtaccggaacgccaccctgccagacaatgccgtctggacggcgtcggtttgcgctagatgcagaacagccctgctcatcatcgggaaagccccggtgaaggggaagccgcgccgcacgatcaccatcacctgcccggcatgcggagacagcgcgacagacagacccggcggcatgacctggactgacgagaacatccaggtgccggagtacacgcagaacgagacgcgcagcctggcgaagatccccgtcaccatgtcgcagagggcgcagggcatccgcccagcgcagagccaccccctccgcatcgagcgtgtaccagagagccggttcaacagcctgaccctttccgtccttgccgccgtcgggcgctgggactacatcaacgacattatccggcgcatcgatcgggaccgcggcgacgccgccaccctgatcgcccttgccgaccacatccggaccaacagacctgagagagatttatga

SEQ ID NO: 35035 - DNA, 651 bp, Escherichia coli
atgaccgaacccacccgcccgatcctgaccatcaagcgacgcaaccgcacggtctacgtcccgccagaaaagaccgcgaaatctgagccacagccagccgaacaggctaccagcaaggcgaaggtacagccaaaggggaaagccccgcagaagcccgcacaggagcccacaacggcaaaggcaaaaaagacgcctaagcaggtcgccgaggggatccgtcgtggagaagaaaacaaccgccgccagcaggaggaagcgatagcccgcaagtcaggtcgcgcccttggcaacaaagtcaccaagcaattcctgcgcgagcactggccggacattctggaacgcggcattcaggggcgaccgttcgccaaaggcatgctggagctcatccttgcccggggagccgagatcggcatgccgccggagatgaccgggaaagccgtccgccgcgtccttggcatgatctcagacagcgcctcctaccagaaagccctgataggacagtccatgcgctacgacctcgacggcaaccccaccgtcgccgtaacaccagaggaagcagaacaggccagagtgcgcctgaaagcgatacaaaagcgccgcgctgaggaacgcgccagagtacgtgaaaagcacgaaaaaaagggcgcataa

SEQ ID NO: 35036 - DNA, 357 bp, Escherichia coli
atgccgcgccacctgcagggtaagacgcggatgccgctggcaggtggttgttattctgctggccaccgtcttgcgctgatctcgttgctgcctgttctggaggctcgtcctggtgacagggatgatggtgaacgatcgaagctggcgctgtatcaggaatcgctgatcaaggccgggcaaccgcacgcgttcgcgttgcatgagccgtcgctgtatcgctggggtgtgtatctgaagagccgccgcgcccggtatttgcaggagacagacgtaggtgttgctgcggcctcagacgcgcttgatcggcatgctttcgggcgtgctattggtgcggtgctggggactgatgatgagtga

SEQ ID NO: 35037 - DNA, 384 bp, Escherichia coli
atgtctgcattttcgatgttgtgtgaccggcttcgcaacgaggcgacgctggcaaaatctaccggggccggcgacgctctggtgcaggtgctggagacgggcgctggtgcgaaccagttctctccgatcggcgctccggttgcctcccccacggatgcgctccatcgggcgcgtgctcagtccattcaggatgcggcgttcctgactgagatgaaacaggcgggcgtggctcctgccgatctggtgatgctcgatggtgtactggaaagcacccggggtatggcagacacggcgcgtgctccggcgttcgctgcggtgcgtgctcaggtgcagcaacaggcgtctctctcccctgctgtccggggtatcaattgggacgagtaa

SEQ ID NO: 35038 - DNA, 657 bp, Escherichia coli
atgaccgaaatcaaaaccgaatgcccggacgcggcctggctgcgtaccacgcttgctgaaatggcgagtgaccattttcccgtttatgaccttccttgcctgtcggtggatccgaactcctccgctcaacttaccgcgcttgacgatcgccgggtggcgcgtgaaatgcgtcaggctgctgccgacgtggaaacgcgccgcattgacgccgctcgcgtggtagaagggctcaggacggaagctgaacggctgcgcgggctgattgccgacggcaagacggcgctgcgtgctggcgagactgtgagccccgatgcgggcgtcgctgcgttcctgctgccggatatcgaggccgagctggttgccgccgaggctgctgaggctgatgtggcccgggagcgtgacgtgatgctgcagaatgctgaccgccgtgatgcggcggctgcgatcggcatgttcaacctggcgcacgccgtgcgcgtacagcgtattgagctgctgttgaagctggcgatggatgaggcgacgctgcttgccgagtccgacgcggggcgcggttcataccgtactgttatcaatcctgatcgccgcctgaaccagttgttctccacgcagggtgcgatcgaaattctgcgccgcaatcgcggcatgggggtgtaa

SEQ ID NO: 35039 - DNA, 588 bp, Escherichia coli
gtgagcaaaacatacggttacgttcgcgtatcaaccgacgaacaaaccagcaacagccagcgcgacgccatcatcgcccggttcccaacagcctccatcctcgccgacgacgggatcagcgggacggtaccaccacgcgagcgtccagccctcggcatcctcctgaaccagatcctgcaggagggcgacacgctggtcatctacgcgatcgaccgcatcggcaggaacgcccgggacaccctcgaactggtcgaggagctggagaaacgaaaagtaaccctggtcagcatccgcgagggtgtcgatttgagcagcgccgtcggacaggccgtcctcggcatcatggcgagtttcgcgcagatggagcgcaagctcatactggaacgccaggcggcagggatcgaggccgcaaagagccgtggccagaagttcggacgcccgaccaagatcggcgcgaaagaagcgggggagatagtcatgcgccgcgccatgggggtaccaatagccaccatagccaagcagttaaacctgagcaggagcgcgatttaccgccaccttgagaaggtcgacgcggtagcgccggagtaa

SEQ ID NO: 35040 - DNA, 186 bp, Escherichia coli
atgataaaccaagcagcaacaccgcgctatcccggtctgagcattgaacacggcgagatccgccagttcggcaagccccgccattgcgccgccaaccgcaaaggccagtaccagaccaccctccgcgacagcgccggtcggtaccagacagtcagcatcatcagcctttacgcttgggaagcatga

SEQ ID NO: 35041 - DNA, 246 bp, Escherichia coli
atggcatttgaaaacattccccgtaggttccagagatggaaggtaatcatggttcccggagcaaagtcatatgagtcatgggacgagatggttaccggcgagaacttctccgaagaaaccaggatgagaacgtacaaaaagcaccgcaccaaggccatcgaccgcaccgtggcaaaccaggagtacatccataccatgacggaggacgggatcaccgtcaggtaccgcctcgaacgctggcgctaa

SEQ ID NO: 35042 - DNA, 468 bp, Escherichia coli
atgaagaaatacaccaccgagcagaaagcccaggcgctcagactactggagcaggacggcgcaaccgcagcagccgtcgcacgcaccatggggatcccaccccgcaccgtcagagattgggcgaaagcccgcaccgacgcacccagcaatgtcctcagcatcgaggagatgcgcgaacgcgcacagcgagccgtcgaggccaccccacaggcagcgatccgacgcctaaaaaaccactttgtacagcgccagtttgagctgctacagcgccacgccaccgacctgcaagccctccgcacagcttcgctacaggccatgctggagaaggacgccaccatggtcaaagcgatcagcggccttatgacatccctactcaagacgcaggaacgcgagcgcgtcatctacgagatcaagccaggcaccgaggccgacattatgcgcgagggcatgaaccgccagcagcagtga

SEQ ID NO: 35043 - DNA, 1560 bp, Escherichia coli
gtgccaaaaactaaacaagaaatagccactgtaacgccgatcaccgctgcaccgtcaccgctgtcgctaaaattgggcgatgcgctgttttctgtcttgtcggtgtctgcggactggtctggtgactaccgcgctcaattcgagctgtatggcctgaatgtaaaagctatcaactctgccgtcggcactgccgtctggcacgctggcaaggggcggttcctctctgtcctaaatggctccctgaccgagttcgataagggcgacggaatgaagctgctggaggactcctgcggcaagttctggcaccgcaccgatgcgtttatcgcccgcctgactgacctcaaaatcaagaccgacgacaaggtaaccaaggcgtgtatcgatatggctcgggctgttcgtcaggcggtggctgagttcatcatgctgcgccgtcaggtggcagtcgttcgcctcgacgtggacatgttcgccacggctcctcgcgtcgaactggtgggtgaaactgtgacgttcgtccgtcctcatgctccctatccggtggctaatgccgacagtgacgtggtggctgattggctggttcatttccctcaatgccatgagttcctcgacgcgctggttgcagcccgctttgcctcaagccgtaagaatgcctacctgtttttccgtgcgcagtccgattggggtaaggggctgctgtttggtgctggcggcgttctgtcacgcctgggggcgacggtggagctgtccgagggggagctgctcaacatcctgagcggtgccaactccggtgtaacggctagtcacttcatgggggcgctggcgctgatcgtcaacgaatgcaccagggtgacgaaaaagcactttcgtcttgaggagtcgctggctctgacgccgaagtacctcacgacgcagtgcgtgaacctgtacatgaaaattttcaccagcgccgatccaatccccggcctgtccgataccaatggcattgacccgcaggtggccaaccgtttttctatgctcgatctgcagggcgacatcaagacgcgcccgctgttcctgtccgacaagggacgctatgtcgacagcctgacgtcgttctttgccgccgagctaaatgctcgggtggcgtcctatcaggcgaagggctttgatgccgcccgccgcgatgctgaccatgttctggctgctttcaccgccgcgcatgggttagcgaaaaccgccgggctgatcaccgatgcgtatgacgaaatccgcgacgactgggttgcgttcgttcatagccgtgttgccgatgggcaccctgacttcctcaccttcgagtcgtctaacgggctcgttctccgctcacctgctggatgctggagtcggttcctcgagtggtacgtggacaaaagcgaaccactgcgccgtgctcgcctgctgcatgaccgcgacctgatcattggggtggcaaaggctgaaagggatgtaaccaccggcaaagtgaccaagggggtgatcctccccttcgtttccggttcgatgcctgacaacgttcaccggttcaggtacaaaaattaa

SEQ ID NO: 35044 - DNA, 492 bp, Escherichia coli
atgagagagaaaaccaaaaccctgaccgttcgcctacccgttagcctgatcgaacgtatcgagcagaacgcagcacgaaccggagtaacccgcacggatgctgtcatagaggcgctgaacgccggacttggcaagaagccggaagggatggacaccaaacttttagctgccatcgaagcgctgagggctgaagtcagggcgctgtccgtcggcggtaaacctgcacgacaagtcgcacaacaaacagcaccacaaagcgcacaacaacctgcaagacagatagtaccccggggagccgatccccgcttccaggccgtcagtgatgaggccgaccagctcattgtcagcatgactgcagagaacgcgactctgcccgccatcgcgtcggcgctgaacgcagcagggcaccggacagcgacgggacaggagtggaacaccagccgtgtccgggactatcgccataagttgcgggaaagtgggctactgaattag

SEQ ID NO: 35045 - DNA, 456 bp, Escherichia coli
atgaaatcaaaggctgaactacgcgaggccgcgacggctcgttcgctggcggtgatcgccactgaaatgtcggagtggtcgctcgacgggttctcccacctcaagctgccgaacttctccgctggggaacgccagcagacgctgtccgggtcggtggtggttgatcgcccgccgttcgactacgagtgggctggtaccgagaaatttaacgcgctggccacccgtgcgctgcaggtgaaacttccggcatcgcgtgagcgtaactacgcctggttgtgcggcgttgaacgggagacgctggcgacggcgctcctcatagagctgttctccgtcaccggctgcgtggcgttcgccgggctgggtaaggttgccgatctggcgttcctgacgctggacgagagcgaggcggggcagatcagggcggcgatgctgcagtggctcgatgaggcggcgtaa

SEQ ID NO: 35046 - DNA, 615 bp, Escherichia coli
gtgtataagagacagattgataactttattttggatgaggctatatcaatactttcttggaaagttgatgatgatttgaaagttaagctactcgagtttgttaaaactccgttggctatttatagtaagaattactctcaggtcgttaatgactatattttagaaaataattttaaaccagatgaacttctaatcttgacgtcatcttataaaacttggggaacctctactcagtcgctcatcttgagtcgagcaatacaggatatatcagcattgatagcaagtcctaatgatgtttctgaaccgttactaaaaaacctgtttgtcgcagagggactgaatatgcagaataaaatagcactgctaatcgctttgttgccgggtaaggatttgagtaagacgacttgcaaagagtatcttgatctgcttggtttatcggagttcagtaaaattttggggcgaggcaaacctaaaattgaagttgattcaactaatcaaagtttattaacagcattaagagataaccacttcttctctgattttgaggtggataatgaaaatcccacttattataaaataacaaggcggcgctctatgtttggctcagatacatag

SEQ ID NO: 35047 - DNA, 150 bp, Escherichia coli
atgcttgtgccggatgtggcgtatccggcccgtaaattcaatagattacaattctaccgttggcctgataaacatggcgtatcaggcattacggatcttttctttcgcccaataaaaaacgccccagtcattactgactggggcggctaa

SEQ ID NO: 35048 - DNA, 213 bp, Escherichia coli
atgtttcataaaagcggaccacggcaggcaattattcaggcgatcatgaaatgctgtacatcacttgaaattcaagtctctgctatgggcgtggcaacaccagaagagtggatgtggcttgaatctgcaggaattgagatgtttcagggagatctgttttccaaagctaaattgaatggtatcccttcagttgcgtggccggagaaaaaataa

SEQ ID NO: 35049 - DNA, 174 bp, Escherichia coli
atggctattgtcggtgccgcggtggttccggcaattcagggatatattgcagatatgttccactcactacagctttcattcctggtttctatgctctgctttgtctatgtcggagtctacttctggcgtgaaagcaaagtacgtaccgcactggctgaagtcacagcgtcctga

SEQ ID NO: 35050 - DNA, 174 bp, Escherichia coli
atggctattgttggcgcagcggtggttccggcaattcaggggtatattgcagatatgttccactcacttcagctttcattcctggtttctatgctctgttttgtctatgtcggtgtctacttctggcgtgaaagcaaagtacgtaatgcactggctgaagtcacagagtcctga

SEQ ID NO: 35051 - DNA, 1566 bp, Escherichia coli
atgctcgacacaaatatgaaaactcaactcaaggcttaccttgagaaattgaccaagcctgttgagttaattgccacgctggatgacagcgctaaatcggcagaaatcaaggaactgttggctgaaatcgcagaactgtcagacaaagtcacctttaaagaagataacagcttgccggtgcgtaagccgtctttcctgatcaccaacccaggttccaaccagggaccacgttttgcaggctccccgctgggccacgagttcacctcgctggtactggcgttgttgtggaccggtggtcatccgtcgaaagaagcgcagtctctgctggagcagattcgccatattgacggtgattttgaattcgaaacctattactcgctctcttgccacaactgcccggacgtggtgcaggcgctgaacctgatgagcgtactgaacccgcgcatcaagcacactgcaattgacggcggcaccttccagaacgaaatcaccgatcgcaacgtgatgggcgttccggcagtgttcgtaaacgggaaagagtttggtcagggccgcatgacgttgactgaaatcgttgccaaaattgatactggtgcggaaaaacgtgcggcagaagagctgaacaagcgtgatgcttatgacgtattaatcgttggttccggcccggcgggtgcagcggcagcaatttactccgcacgtaaaggcatccgtaccggtctgatgggcgaacgttttggtggtcagatcctcgataccgttgatatcgaaaactacatttctgtaccgaagaccgaaggccagaaactggcaggtgcgctgaaagttcatgttgatgaatacgacgttgatgtgatcgacagccagagcgcgagcaaactgatcccggcagcggttgaaggcggcctgcatcagattgaaacagcttctggcgcggtactgaaagcacgcagcattatcgtggcgactggtgcaaaatggcgcaacatgaacgttccgggcgaagatcagtatcgcaccaaaggcgtgacctactgcccgcactgcgacggcccgctgtttaaaggtaaacgcgtagcggttatcggcggcggtaactccggcgtggaagcggcaattgacctggcgggtatcgttgagcacgtaacgctgctggaatttgcgccagaaatgaaagccgaccaggttctgcaggacaaactgcgcagcctgaaaaacgtcgacattattctgaatgcgcaaaccacggaagtgaaaggcgacggtagcaaagtcgtaggtctggaatatcgagatcgtgtcagcggcgatattcacaacatcgaactggccggtattttcgtgcagattggtctgctgccgaacaccaactggctggaaggcgcagtcgaacgtaaccgcatgggcgagattatcattgatgcgaaatgcgaaaccaacgtgaaaggcgtgttcgcagcgggtgactgtacaacggttccgtacaagcagatcatcatcgccactggcgaaggtgccaaagcctctctgagtgcttttgactacctgattcgcaccaaaactgcataa

SEQ ID NO: 35052 - DNA, 1269 bp, Escherichia coli
atgaaaacgcttccgaccgttaacaccctacagcctatcctgcataaccaaatccctgtcattactaccgagttactggcacagctttacggcgtatctcctgtacgcattcgacaaaatcatcatgagaataaggaacgcttcattgaaggtaagcactacttcaaaattgaaggtaacgaacttcgagagttaaagcacaaagtgactcaagataatgatgtgaagaacaaaaactctttaagagattcagttaatgacgccccctctaaaagagagagcgacgagcacagagtagttttaaactactctgttaaccacaaggtaactaaaagtcactctgtgaaaatcgcccgtaacgttcgctccctcattctctggacagaacgcggggctgcacgtcacgctaaaatgctcgaaaccgatcaggcatgggatgtattcgaacggctggaagactgctacttcaaccagaacgcgcaaacggccgcgaccgtaaccgtctcaccaaacaatgctcgtgaggttgtcgatacgctcaacgctaaaccaatgtattacgttaaggtgtgcaacaacgagccactcacaacctcagccgatgttgcccaagcattcagcaccacaaacaattccatcgttatggccatcgatgcgttacgcattcctcgcacggctgcggcgcgtcacttctttaaagaacaacgaccgctggaaggaagcgaccgcgaaataacaatctatcgcatgacaaaagacggatttaccttgctcatggaaagtatcgacggtccaggcgtgaaggatatcaagctggcctacattgaagcctttaacgctatcagcagcgtgttaaaggcagaatacgagcgaatgctatacaaccgactgtatcaggaaacaaagattatccgaacggcaacagaacatcatcggctattaacggaaccaaactaccgcaagacactaatcaaagagtttgacaaggcgacggagaaaactaaagcggcactaaatctaccaacaatgactaaagatgatgtgatatcagccttacttcttgatctgctcagaaacgccagagcacttatcagttttgacgaaaacctgaatcctcagctcaagctactaccaccgacaggcaaagtagtcgaccaagcagatcacaacagcatactcagcgtactggatgcaaacctgccagccaggacactacaggatctgataaaaacatgtgctgataagctggcacagaaaagcagaccataa

SEQ ID NO: 35053 - DNA, 243 bp, Escherichia coli; identical to SEQ ID NO: 22245

SEQ ID NO: 35054 - DNA, 801 bp, Escherichia coli
gtgaatgtggggagcaaaaaggaaggtggtcatgaccagaaagtgatagtggcgaacgaccagtgcatcacggtacgtaatgaccagacgctgaaggtgacgaatgaccggacggtgagcgtgagtcatgatgacggcctgtacatcagaaatgaccgtagggtgacggtgaaagggaagcaggagcacaggacgacggggaaccatatcagcctggtggaggggaagcacagcctggaggtgaagggcgacctggcggagaaggtgagtggcgcgctggggataaaggtggacggggaaatcgtgctggagagcagcagtcagataagcctgaaggtgggcggttcgtttatcgttattcagccgggcggcgtggatatcctcgggcggaagataaacctgaatggcgggggcagtccgggaacgccggtgccgacgctgcaaccgacggtgctgaagacaccggggggtgagaagagtggtgatggcagtgactccggagaagaaaatgaagaccctggagggagcggcttggccggaagtggtggtggtgatcgaggtgacgatgaggatgaacctgaaaaatatactctccagttccattttacagacgatgacgggataccgtattcagaaatacgctacattgccttctttgaggacggtgcgcagattcgcggtgaaacggacaaggacgggtatacagaagttttctctagaaccaatgatgcaaatgtaaaaattaaactgttaactaatgattattatatatttgaggtgaattgtaatgagcaccagtaa

SEQ ID NO: 35055 - DNA, 462 bp, Escherichia coli
atgctccacacactcactgaccagatacatttccaccgacgaaaaacgagcgccccggttcaggatggcatcgagcaccacgggcaggttttcgtcgtcttcatcgagccagcaggggtgatcgctttccttcaccaccaggcgaaagcggcgcgtctggcgggtcagcaacgtctgaccggtggtggtcagcgccgcacggatacgccgcgcatcttctgccacctggtaactgatactgcatactgcatcgcgtaccgcaccaagaacggccctgatttcgtcctctgccagccactcaccggcatacgggaaagacacctgcgttccgtctgccggaagtaccggcagcgactgccactgactgccggacagaacaagttccgctccggttccggtcagtttctgaatggcagaggccaggagcggcggcagtacgccgccgtgacgcttgataagtaa

SEQ ID NO: 35056 - DNA, 462 bp, Escherichia coli
atgctccacacactcactgaccagatacatttccaccgacgaaaaacgagcgccccggttcaggatggcatcgagcaccacgggcaggttttcgtcgtcttcatcgagccagcaggggtgatcgctttccttcacaaccaggcgaaagcggcgcgtctggcgggtcagcaacgtctgaccggttgtggtcagcgccgccctgatacgccgcgcatcttctgccacccggcaactgacactgcgtaccgcatcgtgcaccgcatcaagaactgccctgatttcgtcttcggtcagccattctccggcatacgggaaagacacctgcgttccgtctgccggaagtaccggcagcgactgccactgactgccggacagaacaagttccgccccggttccggtcagtttctgaatggcagaggccaggagcggcggcagtacgccgccgtgacggttgataagtaa

SEQ ID NO: 35057 - DNA, 336 bp, Escherichia coli
gtgaaagacctgggggcggtggtgtccttcaaggggtattacggcgatctggccattgtggtggcgaaaacgtcttatgtggcagaagacggtaccgaaaaacgttatctgccggagggcacgctggtgctggggaatacggcagcagaggggattcgttgctatggagccattaaggatgcacaggcgttgtctgaaggagtggtggcttcttcccgttacccgaaacactggctgaccgtgggcgatccgtcctgtgaattcaccatgacgcagtccgcgccgctgatggtgctgccggatccggatgagtttgtggtggtacaggtgaaataa

SEQ ID NO: 35058 - DNA, 216 bp, Escherichia coli; identical to SEQ ID NO: 13330

SEQ ID NO: 35059 - DNA, 180 bp, Escherichia coli
atgtttccgcaatcgctgatgaggctgtatgacggggtgggggggcgttttcaggacaaacccgaccccgccgggcaccgaacgcctcctcaaatttttatgcacgggaattttttgaaaaataatctgacgaaaaataagcatggcaagaccaccgaaagcccccgcctacctggatga

SEQ ID NO: 35060 - DNA, 1824 bp, Escherichia coli; identical to SEQ ID NO: 28388

SEQ ID NO: 35061 - DNA, 201 bp, Escherichia coli
atgttccaggaattgccagtgaaattttgcgcgggcgcgacgttcatcaccggcttcaatggcagtggctacagcgactgcaccttcttcctttattgcctgttcgtccggaatggcggcgcaaataaagactttactcattttgttttacctcatgacagatttaaggatgaacaaatccctgccattgctggcatataa

SEQ ID NO: 35062 - DNA, 504 bp, Escherichia coli; identical to SEQ ID NO: 31644

SEQ ID NO: 35063 - DNA, 657 bp, Escherichia coli
  misc_feature (645)..(654): n is a, c, g, or t
atgcttcgtataagaaaaatactattgcgcggaaacagcgttcaagacgcttatgttgatttctataagggtgcgaatattctagcaggggaatctgatactgggaaaagttaccttgtgagttgtcttgactacattcttggtgccgaaaaactcaaaaaaaagcttaaagaggccaccgattacacccatctttatgttgaattcgaaaatgatgaagggggggtgttaacgctcaagcgcggtcttgagggggggaaattagaggcacatgatgtcgctattcaagacatccatggagaaggtaaaataattgctcctgtgcgtaaaggaacgagtaaggggccagatgtgacgtccatacttttcccttttgcggggatcaaagaggcgaagcttcgcaagaatgctcgtggcgaaacgcaacgtttctcgattcgaacgctcgctcctatatttttggtagatgaagtatccattatcgacgaatactcgccagtaacgggacgttccggttatgacgacactgctcgaaaacgcatgttttcatacatccttaccgggcacgatgatggtggtgttaccgtagaggaaaagcctgaaattgtaaaagcgaggttgatggcgaagcttgaattcatccannnnnnnnnntga

SEQ ID NO: 35064 - DNA, 291 bp, Escherichia coli; identical to SEQ ID NO: 17414

SEQ ID NO: 35065 - DNA, 477 bp, Escherichia coli
atgcgactgccacggccccgtgatttctctgccttcgcgggttttgaatggttcgcggcggcattcatccatccactcggtaacgcagatcggatgattgcggtctttgcggtaaatccggcatgtgcaggattcgttgtcctgttcaaagtccatgccgtcaaactgctggttttcgttgatgatgcgggaccagccatcaacgcccaccaccggaacgatgccattctgcttatcagggaaggcgtaaatttctttcgtccacggattaaggccgtactggttggcgacgatcagcaatgcgatgaactgcgcatcgctggcatcacctttaaatgccgtctggcgaagagtggtgatcagttcctgtgggtcgacagaatccatgccgacacgttcagccagcttccctgccagcgttgcgagtgctgtactcatccgttttatacctctgaatcaatatcaacctggtggtga

SEQ ID NO: 35066 - DNA, 444 bp, Escherichia coli
atgcaggaagcacaactgatcagccgctttgtggcgaaagcacgcaccgtggttccgaaaggtgaagtgatcctcaacgaatccaatattgattctgttctgcttgaagatggcgacgtcatcaatattccggagaaaacatcgctggttatggttcatggcgaggtgctgttcccgaacgcggtgagctggcagaaagggatgaccaccgaggattacatcgagaaatgcggtggcctgacgcaaaaatcgggtaacgccagaattatcgtcattcgtcagaacggtgcggcagtcaacgctgaagatgtagattcactcaagcctggcgatgagattatggttctgccgaaatatgaatcgaaaaacattgaagttacccgtggtatttccaccatcctctatcagctggcggtgggtgcaaaagtgattctgtctttgtaa

SEQ ID NO: 35067 - DNA, 531 bp, Escherichia coli
atgacagggatttcagccgcgatcttttccggtagctccctgtctttttcggcctcactgacgatattgtcgaaacggaaaatcacgcgacgacgtgccacacctccggcccgttcggtgaatatcatcgggttattgttggtcgccagcaccaccgccctgattacagccgtgaaacgcttttcgtatttcgggttaatttccacggggtcaccgcccgtgattttcttgatgcccgttccttcgcctgtatatttcggctggtcagccaggacgataagacgactcccgacaacctgcgcacgtccaccagcatcatcaagcgatgtcatttcagcgcttaccgtgttctgtttccctgccagaaggctggctatgtgcgtgaatgtacttttaccgctcccgccgtctccggtggcctcaataaacatctgccagtcgtaccggttcgccataatcatgtacagcgcggcacatatacgcatcatcttgcgcgggtcttttccggctgcgtgctcaagccatttatga

SEQ ID NO: 35068 - DNA, 309 bp, Escherichia coli; identical to SEQ ID NO: 10409

SEQ ID NO: 35069 - DNA, 228 bp, Escherichia coli; identical to SEQ ID NO: 17746

SEQ ID NO: 35070 - DNA, 300 bp, Escherichia coli; identical to SEQ ID NO: 17747

SEQ ID NO: 35071 - DNA, 141 bp, Escherichia coli; identical to SEQ ID NO: 11045

SEQ ID NO: 35072 - DNA, 375 bp, Escherichia coli
gtggccttcacctccacccgtgcggcacgggaatggctgattctgaacatggcgggactggagcgtgaagaattccgggtgctgtatctgaataaccagaatcagctgattgccggtgaaaccctcttcaccggcaccatcaaccgcacggaagtccatccccgggaagtgattaaacgcgccctgtatcacaatgccgcagccgtggtgctggcgcacaatcacccgtccggtgaagtcacacccagtaaggcagaccggcttatcaccgaacgtctggtacaggcactgggcctggtggatatccgggtgccggaccatctgatagtcggtggcagccaggttttctcctttgccgaacatggtctgctttaa

SEQ ID NO: 35073 - DNA, 213 bp, Escherichia coli
atggatatcactgttacccggaacagtccgactggtcagactatgacaaccgatgcggaagccgcagtcagtgaagccctgcgcgacctggccttctggttgtaccgtcaactggaaaacgagtacgactggctgacctcagacgccgctgtggatgaggccctgctcatcaacgaatacaccttcaccgaagccggtctgtgcaccggctga

SEQ ID NO: 35074 - DNA, 534 bp, Escherichia coli
atgttaagtgaaaacgcaaaagatatcgaaggatatgaaggactgtacgccatcactaatgatggtagagtttactcgcattcaagagtaaatttgaggggacgtcttattaagggtaggtggctgaagcataatcataacgtaaatggatataagtatgtgtgtttatataaggatggcgtaaaaaagaacatactaatacataagcttgttgcatctcactttgttggtggatttgctgaagggttacaggtaaatcatatagatggtgataaatataataataactatctaaatcttgaatgggttactccatcaggaaatatctcacactcatatggattggagtcgagaggtaatgtaaaaggagaaaggaatggtaattctaaaatatctaatgatgatgtcataaagataaaagaaatggttgccaatggatttcctcagtgtgaagttgctaaattatttggaattcacaattcaaaggttagtagaattgtaaatggcaaggcatggaggcatgttaatggctga

SEQ ID NO: 35075 - DNA, 390 bp, Escherichia coli
atgtcaaagtcagcagcgggtacgctcagccagccggggcgcaatgtccgggcaaaatcaggtttaaaccgttcgatactggatcagggctggtatgaaatgcgccgccagcttgagtacaagcagctctggagtggcggtcagttgcttgctgttccgccagcgtacacaagccagcgttgcgcgtgctgtggtcatactgcgaaagaaaatcgcctgtcacaaagtcaattcagatgccaggtatgtggatatacagcgaacgccgatgtaaatggcgctcgtaacattttagcggcggggcacgccgttcttgcctgtggagagatggtgcagtcaggccgctcgttgaagcaggaacccaccgaaatgattcaggcgacagcctga

SEQ ID NO: 35076 - DNA, 867 bp, Escherichia coli
atgaatcaaaatccattctcattctatgactttcttggatatttaataccaggtggtttttttatcctattaatgtatttctgtggtttgacattcgatctagatattgttattgacttaactgaattgctcagaggtcaaagtcaaatctttggcattttgaactatggttcaatagtaatcatatcttacatagctggacactttatatctatcacatccgcattttttattgaaaaatatatgaacgaagaattgcaatatccgtcagaatatctatttaataagttatcagatgacaaaaaaaacgtcttaacaccatcaagtgacaaacagaacgaagacacaaagagaaaaataaaatactgcataatcaaagtaatgttattcccgataataccatgggattacgccactcaaaaactatgttattcacaatcattgccatttcaattagctaataccacatggctaatgatcaaagaaggttatgaaaaaaaattcagaatagacgataaattattaaacatcaggacaggtcttcatgatgatcttttcagattggcttatcattacgtctatgaattttctaatcaacatcaaacaaaaattcaaaactatgttgcattatatggtttttgcagaaatatttgtttagtatttgtaattacattttggatatcatttctaacattaatttatcgtgctatagaaggtggggcggtgtcttatatttctatttcgacgctacttagctttttcttcgtctatgttttttatgttggattcgttaagttttatagacgatatactttagaggtattaatggcatttgctgtacttcagagcaaagatgctattaattaa

SEQ ID NO: 35077 - DNA, 624 bp, Escherichia coli
atggcgcaaaaagaaatgaccagaatcactgaagagcgtatatcagagattatttcccgtatcgaaatgtatggtcacggagctggatatacggcagatgaagtattggaaatagcccagcagatgctggccttgagacaaaaagagcaacatgaaagcaatacgtgtagattgaattttgagcagtggctggaacagcaacgcgggaaaatcgatgtggactgtggttgtgtgtccactgaaacattcatgcactggctgcgggtagcttacgaggctggcaactatccggatattccggatagttcggcgcaagcaccagggaaggggggcttccccggagagcggatccgaattaagccgcatgtttaccgtgaactggttaaccgcctccacgatacagcgaccaagtgtgctggcacccagcaattacgggaaagaattagccgcgttttgggcgaagttattacaccagatcgtcataaacaagccgagaaaagcggtctggaaaggagtcatcttgaagcggcattaaacattaaaccggggcatacgctaggtgtcattgatgccatgttggttcatgaaatggctaaggcgttattgccactggaggctgattaa

SEQ ID NO: 35078 - DNA, 648 bp, Escherichia coli
atgatgacttttaccagcgaacaattagctaccttacgtaagatagcgcaacaggcaacacagggcgaatggcgtgcattcatctcgccggacactggtacatatgcggtgcatacgccgggggatgaacgttgcggagacattatcaaatggcctggctttgacggccagaaaaatgcagagaacaacgcagaatttatcgcagctttcaaccctaaattagtgcagacactgctggatgaacgggaaagaaatcagcaatacatcaaacgccgcgaccaggagaacgaggatattgcgctaacggttgggaggctgcgcgttgagctggaaggcaaagacaagctgattgcagagcttagaaaacaatgcgctgaatgggagcgaaaagcattaagcaactttgaagagtgtgctgcgatggctgaacgtatcgaagagatgagtaagcaaagttgcgaagcccgtgagcgtgatttgtttgaatcatgggtaatgcattcaatttgtatctccaaatcgacgcttgaaggattgcgcaccgaaaccggataccgtaacgcaaccttatcaggcacagacttcaaccgaatgtgggaacaatggaaatctatccgcgccgctggcattcgcatcaaaggagagtga

SEQ ID NO: 35079 - DNA, 288 bp, Escherichia coli
gtgagcaagattgactatcaggcactgcgtgaggcggcggaacgtgcaattccagcaatggaacgcctgttaatgttgccagctgatgatgacttgttaagtgaacaggaacttaaagattacggtgtggatattgatgcgctcaacgccttcaaatttctggccggaccagaaaccgtgctggcgctgctggatgaaaacgaaagactgtgtcgcgagctgatagctcgtaatggtgagattgaagggcttcggaagtgggcagaagaacgggagatgcaaccatga

SEQ ID NO: 35080 - DNA, 297 bp, Escherichia coli
atgattatcaacgatgccctgcaccacagcgaaactccagctaccgatgcttttctagctgaagtgaagactgaagcacgcaaggaaggcgcttattttgtggcgaacagaatgctggctgcctgggaagctggttttattgatgatactgcgaagaacgccgcggatattgcccggatgattcttacctctactgagtttatggctaatgcgccggaaggcgattttgaccgctcattctctgatggcgttctcgaagatatcgccgcccagcttcgaaaaggaggcaaccagtga

SEQ ID NO: 35081 - DNA, 396 bp, Escherichia coli
atgaaacacactgatatccgtgctgcagtgctggatgcactcgagcagcatgaacacggggcgacgctgtttgatggtcgccccgttgtttttgacgaagaggattttcctgcgatcgcggtttatctgacggatgcagagtataccggtgaagagctggatgcagatacctggcgggccacactgcatattgaggtgtttttaccggcacaggtaccggattcagagcttgatcagtggatggaaagccggatttatccggcgatgactgcgatcccggcactggcaggactgattaccacgatggttacgcagggctatgagtatcgtcgtgatgacgatatggcgttatggagctctgcggatctgacttattccattacatacgagatgtga

SEQ ID NO: 35082 - DNA, 261 bp, Escherichia coli; identical to SEQ ID NO: 5979

SEQ ID NO: 35083 - DNA, 1119 bp, Escherichia coli
  misc_feature (1042)..(1051): n is a, c, g, or t
atgggaataaaaagtatacggattaaaaacatactctcctttgatgacgtatatattgatagctttgaagattttaatttgattattggtagaaataactctggaaaatcaaatcttttaaaagtatttaaatacttttatgaaaaattagacgagcaacggagcattcctcttactctaaattcgaattacacgccctctggaataataacaattacatatgatacaacccggataaagaaaatagtaaccagcactaataataactctcgatttcataaacatatatacaacactctttttaaagaaccaaataaaaataaattcaccgcacttttcgcacccgaaagaaaaaaacaaaatagcgaatattccttaacacttacaatatcaaatgatgactcaatatcatggtctacgaaagataaaaaacttttatccctaattaaaattatcttcccttttttttatatagacacacgtagaatggatttatacaactgggaagacatatggagaataataagtagcattaactccttcaactttcagaaaataagcgaagatgaaatcctgaaatttttagatgaaaatatttcatctagagatggcgactacaaaaaatacatcactcgcattactgatgtaattgacacaaaaccatacacctataaagagaaagtaattaattatattaagatagcattgaaaggtcatattttcacgaactcaggtgaagatatccttcatcagtctgatggaacaaattcacataaatatattgaaacaattattaagttgctcatttcgttatcacgaaccgagttcataacacctaccatatatatagacgaacccgagataggactacatccaaaacttggcgagcaatttattacaacaattcacacaacttataatagatataaaaaaagcgttcccgaaaaggaatcaggaaaatactcaacaccttatccttgtttaattttcagcacccatgcaccaaatattttaaagcaaactattaaacttttttcaacannnnnnnnnnattttggaagacttccatttcagtggaaccttctacgaaaagaatatacactccacaaagatatctaa

SEQ ID NO: 35084 - DNA, 1113 bp, Escherichia coli
atgtttagcgataatgaagctagactttttttcagtgagtatattcttttcgtagaaggttccactgaaatggaagtcttccaaaatagttctttagctagaatttatcctgatttaggcaggattgacatatacgccagtgatgatgttatgttgagaaatataaacccaacttattctcaagcagcaattccttttttaattgttaaagatatagacaaggtgattaagcttgactataaaaatgaaatattaagtctggatggtgatgtttctctagttaataaactaatacgaaaaggcagtttaaagttttataatccatccttaataaaaaaaattgacagcgcaaaggaaataataagagcggataagtctaagaaggaaatgtcggttgatggcttgtttttcaaaacatttaaaattgaaaattttgtgagggatttcaataaactgttaaaatcatttaaccttaattatatgacaactacaatagagggtgcattaataaatgagcattctttaaaatacttttacagatggatttgtcatatcgtttttaaccagctagacgtcaataatgaaaaccctaaaaaaatgtttgctggcttaatgagaacgtacaatcttaaagatggagctataagtatattaaattcggcttttgttctctcaactcatttaagtatattagatccagtggagcaaaagctggtattcaaggttaaaaaaagggctctttttttaattaaaaaaagcattaaaggagattttaaaaacaataaagaaattacaaccctatttagacttctttttggaggaaaaactgccacacttataagtttagaaatgaatctgaaaaaaagctgtcaaagaatagacccatctattacagccacaataaagaaatataaaagcaatgagcttaaattcttactcccctataccacaaaaactagtggctgggttaccagttttttggattttacgatagctaagttagagcaagaaaatgctgataagatagccgagaatttacgcttccttttccctgaaattatatctataatagagcaagcttcttcttcgatagatataggggagtttcactga

SEQ ID NO: 35085 - DNA, 624 bp, Escherichia coli
  misc_feature (612)..(621): n is a, c, g, or t
gtgtttttaggatcattctatgttgataggattttaagtttttcttcattcccatcaattcttctcatcacaacgttatttcgtttggcgctggcgatcagtaccagccgacttatacttcttgaggcggacgccggagaaattataacgagttttggtgaattcgttattggagatagcctggtagttggttttgttattttctccattgttactattgttcagtttatcgtgattactaaaggttcggaacgtgtggctgaagttgctgcccgcttttcgcttgacggtatgccaggtaaacaaatgagtattgacgccgatctacgcgccgggatcattgatgcagatttagcaaaagaacgtcgtagcgtattagaacgagagagtcagctgtatggttcctttgatggtgcgatgaaatttatcaaaggtgatgctattgcaaacattattattatctttgttaatattatcggtgggctatcagtaggagtaggccaaaatggaatggatttctcgacagcgttgaccgtctacacaattcttaccgtcggtgatggtcttgtttcacaaattccagctttattaattgctattagtgcagggttnnnnnnnnnntga

SEQ ID NO: 35086 - DNA, 1251 bp, Escherichia coli
atgtcccagttattaagtaattcttttgtcattattgtgacatgtgtcctcgcgctaagtattgggttgcttccaggttttccccttcttgtgtttttatgtttggcagtaatcttaggaatttatttttactttaaattcaaaaagaaaggggttgaagaaacggttgttgagggagatatcaccgttgggttggaaccctataatcaggatgatgatatttcattaggtattattaataaacttgatcaggttattaccgaaacggtacccttggttttgattatgaatagtgtacaggctaaaaaatacactgaaatcaatcttgctgataggattcgtagtcagttttttattgagtatggtatccgtattcccggtattgtcattcgcgagggggaaggccttaatgatgaagatgtcatattaatgctaaatgaagtcagagcctcgcaatttaaaatttatcatgatcttgtcttgttggttgaatattcagatgaagtggtttcgactttgatcaagaaacctgtcatcgtaaataataatggtgaacaatattattgggttacaaaaagtgatgcccaaaaattaacaaaaattggctgttatactcgcacggccatggatgaaatgtacaatcatttatctgtatgtctggctcataatattaatgagtattttggtatacaagaaaccaaatatattcttgatcaattagagatgaagtatcctgatctattaaaagaaatattaagatatataaccgtgcagcgcatttcagaggtaattcagcgtctgatccaggagcgaatttcagtgcgcaatatgcgtttagttatggaggctttagcattatggagcccacgagagaaagatataattacactcgtcgagcatgtacgaggtgcattaggtcgctacatttgccataagttttcatattctggagaaattaaagcaattgtgatttcgcctgaaatagaggacagaatcagagatggtgtcaggcctaccgctggcggtacttttcttaatctcgatgcatccgaagctgagatgattctggataattttaaactggctctttctggaatcaatattcctattaaagacattattttactgggatctgtggatattcgtcgttttatcaaaaaacttattgaatctagttatcgagacctcgaagtactttcgtacggggaactaacggaaaatgttcccgttaatattctgaaaactatttag

SEQ ID NO: 35087 - DNA, 234 bp, Escherichia coli; identical to SEQ ID NO: 8563

SEQ ID NO: 35088 - DNA, 534 bp, Escherichia coli
atgaacaccaaaatcaaatatggcctgtcggctgccgttctggcgttgattgccatcggtgcgcctgcgcctgatattctcgaccagtttctggatgaaaaagaaggtaaccacacaacggcataccgtgatggtgcgggtatctggaccatctgccgcggtgccacaatggtggatggtaaacctgttattccgggcatgaaactgtcgaaggaaaaatgcgaccaggttaatgccattgaacgggataaggcgctggcatgggtggagcgcaatattaaagttccactgaccgaaccacagaaagcgggtatagcgtcattctgtccctataacattggccccggtaagtgtttcccgtcgacgttttataagcggctgaatgctggtgaccgcaggggagcgtgtgaggcgattcgctggtggattaaggacggtggcagagactgccgtatccgctcaaataactgttatggtcaggtatcccgtcgtgaccaggagagcgcgctggcgtgctggggaatcgacagataa

SEQ ID NO: 35089 - DNA, 534 bp, Escherichia coli
atgaacaccaaaatcaaatacggcctgtcggctgccgttctggcgctgattgccgctggtgcgcctgcgcctgacattctcgaccagtttctggatgaaaaggaaggcaaccacaccacggcataccgtgatggtgcaggtatctggaccatctgccgtggtgccatcatggtggatggcaaacctgtcgttccgggcatgaagttgtcgaaggaaaaatgcgaccaggttaacgccattgagcgtgataaagcgctggcgtgggtggagaaaaacatcagagtgccgctgaccgaaccccagaaagcggggatcgcgtcattctgtccgtacaacattggtcccggtaagtgtttcccgtcgacgttttacagacgaattaatgctggtgatcgaaaaggtgcctgcgaagcgattcgctggtggattaaggacggtggcagagactgccgtattcgttcaaacaactgttacggtcaggtatcccgtcgtgaccaggagagcgcgctggcgtgctggggtatcgacagataa

SEQ ID NO: 35090 - DNA, 357 bp, Escherichia coli
atgtaccccagactggcaaaggcttatccgaccaataaattaccggatttacggggcgaatttatccgtggctgggatgacggacgaggtattgatgcaggacgagagatactttcatttcaggaaggcactatcgtctccggttttgatgataatgatactggggatatcagttcactcagctcaccacaatacggatttggtgacactttaacctctaatcaatggggggccataaatggcaaaaagtggatatttgatgcatccagtaaaggtgcccaaaaatatgactggtgggcttatgtatcagctcgtccgcgtaatattgcatttaattacatcgtaagagcggcatag

SEQ ID NO: 35091 - DNA, 345 bp, Escherichia coli
atggcttaccccaccaataaattaccggatttacgcggtgaatttatccgtggctgggatgacggacggggcgttgataatggacgcaacctactgtctgcgcagtctgacgctattcagaatatagttggcacttttgggcgtactcagctttttaaagatgcgctgaattcagggccatttagtcaaactgactctatattatcagtaggcttacaaccaactgagatcattgaaggatatggtgcttctgtatggacattcgacgcctctcgctcagttcgcacagcgtctgaaacacgcccccataacattgcgtttaattacatcgtaagggcggcataa

SEQ ID NO: 35092 - DNA, 1224 bp, Escherichia coli
ttggatggtaccctaaaaaacctatctttaggttcagtaccaagaaatttagggagtatagagaaagactaccgtcagtatcgcgatttagagattgatgctaaaagtcttttaaagcagattaataactctgtatactcagcgcttgatcattttactgttaaagatgattattcaattgctgagaaagactttcgtagcaaagcagccatattacatgcgaaaataagaaaattttccaataaaggacgcaatatattaaaagaagagatgttgcgtttcgaaaagataacaaacaatacaaataaagctttccatgaaaaaacatctcaatatttatccgatctacaagaaaatagaacttcactcaaaaaaacacttgaaaatttagatcttgcttatcagattcaagacattgaaataggtcaaacctacgccccatatattaccgcattagaaagcttaagagaggaaattgatttagaaggcctcgcgatctcttcagtcaacgaaaatacacggttgaagaaacaggtagagcaagtgaatgcactcgctcaacttggaataactgtggagataattggtcatgaaatcgaaggtttcgatatgactattgagcgaggtataaatagactgtcatcaacaaacctcgatgaatatcagaaaaatgctttatcaagtattacccaagcacatcaatcattaagcgattcttggcgttttttaagcccattaaaattatcaggagataaggtaagagctttcttgagtggaaaagatatttttgattatgttaatcattttttcaacagtaaatttgaaaaagattcaattgaattttcttgctctactaatttcctagatatttcattatatgatcaaccagccagaatttatcctgtgtttattaatttagtaaacaactcacgatattgggttaaagaaactaaagaagagcgtcgaattattaggttagatgtacttgatggtttgatatatgttagtgataatgggccaggggttgatcctgatgacgtgtccgaacttttcactatatttttctccaagaaacaaagaggtggtcgcggggttggcctttatctctgcaaacaaaatttagcggtgagtggccatagtattttctacgaaacaagaacagagaaaaaaatactaaatggtgctaattttgtaattaatttcaaaggaattaaaaatgcttga

SEQ ID NO: 35093 - DNA, 1617 bp, Escherichia coli
atggtaatttcagcagcttttcaaacaagagcaaggacaattgatcatctagggcgtgagcaaatagctgattgtccaaccgcaatttccgagctttggaaaaatgcatatgatgcttatgctcgtaatgtttctctaaatatatttgacggcaatacacctgtggcaactttagttgatgatgggcatggcatgtcgttagatgacattatcaataagtggcttacagtaggaactgaatccaaggctacaaaaaaagatattccatatgaagatagaaacggaatagatcatattcgagcaaagcaaggtcagaaaggcatcggtcgtctttcttgtgcggccttgggctcattaatgcttttagtttccaaaaagaaagatagccctcttgtagcttgcctgctcgattggcgtatatttgaaaacccatatttgatgcttaatgatataaagatacccattatggaatgcagtgataacaatgaattaatcactgttataccggaaatgtttgatgctttgatgggaaatctatggggtgatggtgatgatatattacgagataaccgtattgaacaagcttgggaaaattattctgaattagaaagaaatgaaaataattatattacaaaagaagctatcgagaatactgtaattaatgctttttttgaggaaaggcattttcaatcttggcctgtgtggaataataaaaccactcacggcacagccatgtttatagctggaattcatgacgatttaatagctcagctatcaacagatgctggttcagaagctcaaggtgcagaggttcgggctaaagaacgctttcttcaaacattaaatagctttgttaatccatttaaaagagaaggcgaagaacagattactgatttcaatacaagtgttgtcgcatggaatggtaatctgcaacgatttatcatcgatgaagttagaaactttgatatttcaaactttgaccagctagaacatatagttgaaggaagtattgatgaaagtggattattttccgggaaagtgaaagccttcggagaatggtttgataatattacagtcaaacctaaatctgcatataagaccagaaaagatactcgctttggccctttctttttaagattaggcacatttgaagttataagaaaaaatagtacattatcagatgaacagcatgcaaccttcgaccgtatccgtgatcagtttggtggagtaatggtttttcgtgatgatttacgtgttatgccatacggacgtgaagataatgacttttttgaaatcgaaaaaagacgttcaaaaaatgctggtttatatatgttcagtaatagggcatgttttggtggtgtatgtataacgaaagaacataaccccaacctacgagataaagcaggtagagaaggtataattgacaataaagcatctaagttatttagagagatagtcgaaaacattttaatagaaattgcaaaaaggtttattggccgcgcatcaaatatacgagatgaaaagctagaggaaataaatgctaaacatgctgctttgaaagcagacgaagatagaaaaaaattattacgtaaagagcttagaacatttaagaaatga

SEQ ID NO: 35094 - DNA, 387 bp, Escherichia coli
gtgtgccagcaccacagcagcggcattgtgatacagggcgcgtttaatcacttcccggggatggacttccgtgcggttgatggtgccggtgaagagggtttcaccggcaatcagctgattctggttgttcagatacagcacccggaactcttcccgctccagtcccgccatgttcagaatcagccattctcgtgccgcacgggtggaggtgaaggccacgccgggttcatgaagatggcggtccagggttttcagggcccgttgaatgaggctgcgctcaccgggcgtcatttctccgggcagaaaggaaatctgttgcattgttccggcccctttcagtcaatgatgcgcataatggcgctgcattccggatgctgcagggcgtaa

SEQ ID NO: 35095 - DNA, 1683 bp, Escherichia coli
atggttacctggacccaaatgtatatgccgatgggaggactggggctatccgctctggtcgccctgatcccgataatattcttcttcgttgcactcgcggtattacgtctgaaaggacatgtcgctggagcaataacccttatattatctatcctgattgcaatattcgcctttaaaatgccgattgatatggcatttgctgctgcgggctatggctttatttatggattatggcctattgcgtggattattgttgcggcggtgttcctctataaattaaccgttgccagcggtcagttcgatattatccgcagctcggttatctccatcactgacgatcagcgtttgcaggtgttactgattggtttctcctttggcgcgctgctggaaggggcggctggctttggtgcgccggtggcgattaccggtgcgctgctggtgggcctgggcttcaaaccgttatacgcggcggggctgtgtctgattgccaatactgcgccggtggcgtttggtgcgttgggcgtgccgattctggtcgccggtcaggtaacgggaatcgatccgttccacattggcgcaatggcgggacgtcagttaccgttcctgtcggttcttgtgccgttctggctggtagcaatgatggacggctggaaaggggtgaaagagacgtggccagcggcgctggttgctgggggaagcttcgctgtcacgcagttctttacctctaactatattggtccggaactgccggatattacttcggcgctggtgagtatcgtctcactcgctttattccttaaagtctggcggccgaaaaataccgaaacggcaatcagcatgggacaatccgcaggtgcgatggtggtgaataaaccatcttctggcggtcccgtgccttcagaatatagtctggggcaaatcattcgtgcgtggtcaccgtttttaatcttaacggtgctggtcaccatctggaccatgaagccgtttaaagcgttatttgctccgggcggcgcgttttattcactggtgattaatttccagatccctcatttgcatcaacaagtgttgaaagcggcacccattgtcgcccaaccaacgccaatggatgcggtgtttaaattcgaccctctctcggctggcggcaccgctatttttattgcggcgattatctctatcttcatcctcggcgtgggcatcaagaaagggattggcgtctttgccgaaacgctaattagtctgaagtggccgatattgtcgattggcatggtgctggcgttcgccttcgtcaccaactattccggtatgtccaccacgctggcgctggtactggcaggtacaggcgtgatgttcccgttcttttcgccattcctcggctggctgggggtattccttaccggctcggacacttcctctaacgccctgtttggttcactgcaatcgaccacggcgcagcaaatcaacgtctctgacactctgctggtggcagcaaacaccagcggcggcgtaactggcaagatgatctccccgcaatctatcgccgtggcctgcgccgcgacgggcatggtgggccgggaatctgaactgttccgctacaccgtgaagcacagtctgatttttgccagcgttatcggcattatcacgctgttgcaggcgtatgtgtttactgggatgttagtctcgtaa

SEQ ID NO: 35096 - DNA, 189 bp, Escherichia coli
atgatttacatcccgtttctggttatcgacctgattgtcgccagcgtattgatggcgatggggatgatgatgctgtcgccgctgattgtttcgctgccctttaaactgatgctgtttgtgctgatcgacggctggtcgctgacaatcggtacgctcaccaccagcattcgcgggctggggctgggctga

SEQ ID NO: 35097 - DNA, 813 bp, Escherichia coli
atgagtacaaacacatgtaaacctcttgatccgaaactggtgcaatacattttaaataccttcaaagctgacttcacaactggaaaaatcttctggaaagttgacggcaaacgtaaaaaagctggagatgaacttcctcgtcgaatctgcgataacggacatcagaaaccccgtctgcattatctgacaacaatccagtttgatggcaagcaaaaaactctcaatgcatcacgtatgatcttcattctttggaatcaacgagatgtcaaaccaggttatctcattgatcatgctgatcgtaattccttgaatgacactgctcagatggttgatggaaaacttactttaaatcttcgtgaactgactccatctgaaaatcggctgaattcaggttctcgtcgtggttcaagcagcaaattcaaaggtgtttcccttcataagaaatctggtaaatactgcgctcagttcggacacatgaaggatggtcagcgtatccgtaaacacctcggtctgttcgaaaaagaagaagatgctgcccatgcttatgacagagcagctctcgaaaactccggtgacattgcacacacgaatttccctatctccgattatccagacgtgaagatcgctaaacgtaaaggctcaagttaccgtggtgttgtgaagtctggtaagaagtttgctgctcagttcgttgcggataagcagtcatactacggtggtctattccagacaccaggcgaagcgtttgcagttactcagtccatgcgtcagggactaggtcttaaaccctatccgcaaccagtgggagtatga

SEQ ID NO: 35098 - DNA, 759 bp, Escherichia coli
atgagcagctacttactctctctggcaaatctgccaaccaaagaaaccattctgactctgcaagcaaacatctcaactcaggaactccagaccatcaatgacagcagactcaagttcggtctgctcatgaatggtgatcagaactgctatgtcgatgcaaagactctgcatgaagtgttaggtcagccctatggagagttcagagactgggttcgttacatcgtcaaacccttcattatggaagctgagtccagttatctcgaaaggttcgttgaatctgggcgtcagaagacagtgactttcgaagatcttcaagtgggaaatctcccacatgggggaaaacgtaaaaatgttggtaaggcgaaaggcatcttcttgaaactggaagacgctcaggatctggcaatgctgactcgtaccccagaaggggcggaagtcagaaaatacttccgtacagtcaaccgtgtcttcgagaagtgtctcaagtgcaatgagctacgaaccagcctcgaaaagcattcgaaagctgttgcttcacatgctggtaaagcagctttgatgacaggctctggatttgacaatgttgcatcaggtaaagcaaagaaacgcttcaaccacttggtgaagacaattgctggatctcgcaatgtcgcagagacagaccttcacgcatacgcacacattcaggaactcgttgccacgctcatgaaacgtggtgttagtaacgagaagatcctctttgcgatggagacagcataa

SEQ ID NO: 35099 - DNA, 225 bp, Escherichia coli
atgacactggtattcactccaactgtatacgccaaacttaaccgtcttccttctgatgtacagaaacgttttaacagcatctcaagcaagtttcccgaaattgatcgtccagtggtcttgtccaatctgatgagacttcatgaagcggaaccagacataactgatcagcagcttgtagctaaggttcggaaacgtctgttcgagaacgcttcgactgacgaataa

SEQ ID NO: 35100 - DNA, 213 bp, Escherichia coli
atgaaactttccaaagcaaataaatcaggtgtgacaggtgtccgtaagcgccctgactgcaccatcctgaaccatgaagcgtacatccaagtgttcggctgcaagctctccatgcattcagcaacgatgaagcaatctgtcagggatcgtcaggtgatggaaatggtggttcgtcgcctcaagtctgctggcctcttggtggatacgcgatga

SEQ ID NO: 35101 - DNA, 519 bp, Escherichia coli
atgaaagccaacaagaacaatcaaacaggtcttcgtggtgtaactatagataaggatcgcggtatttatcgtgctcaacttatgcgtgacggtaggaagcaacacctcggctggttcaaaactccagaagaagcacatcacgcatacctaaccgcgctccagctactcgttccaggaaatcacatcatcgtgtctgctggctctgatgtgcgcacacggaaacccaaacacaattacgtaagtaagactgaacctgaaccacggaaacaacctccaggagtcatcttcgacaagaagaagaatgtctaccgtgctcgaatcagagtcggtggaaaacaaacttggctgggaacctgtcagtctccccacgaagcacatcaactttacctcgaagcaaaaaactcctaccagaaacacggcttcgtcagacgtagctcgatccagaaggtggacaaccatcgaagcatcaggaagcagttcttcatgacggtgcaggattcgacagctacgcacatctaa

SEQ ID NO: 35102 - DNA, 348 bp, Escherichia coli
atgaccaacaaaaacttctacgtcccgactcagtgtcagggcgacgaaaaaccacgcttcatcgccaacatgcgtaagggtgcattcttcatgctcactgatcgtggagattaccgcgcaattgaatgctatttaccagcagcaacatacaaaactcctgaacagtacgctgatgagcgttgtgagcgtcttctgaatagcacccttatcatcagaaacgcgataggcaatacaggcaggacattgaccactcgttaccactggaacggctctgagctaatacccgtgcataagaatggcgaatttgaccgtcttcgtcagacatcatcagcaaaggtaatcgcgtaa

SEQ ID NO: 35103 - DNA, 219 bp, Escherichia coli
atgagtgacgacatttatcaaatccaattcgaacgtgacactgctaagttccgtgcagcacgtgactcatacgaagcgacgtctcaagctgaacaccagaagaagattgctcagttccgtaacatcaagttaagtccgaagaacgacaaaagtcacttctatctgaactcggaaggtgcaagagtcacccacggaagctacccgatctcattgtgttga

SEQ ID NO: 35104 - DNA, 312 bp, Escherichia coli
atgaccactatccaaaaacacaccgttctggacgtagatcaagtcatcgaacgtctggatgaccttgacaacccgatcacaggtaaggctcgaatcctgctacgtgagtatggagaatccctccaacgtgcagagatccagcagaagcagcagaagcctagcctcttgaatccactatcagcagcacagtcagcagactggcgacaggtacaccaacttgttgaagacatcacttggaacaatcttgaccagcggcttcgcagcaagatcagtgaactcgaaggtcagttgaaagacttggaggttctgtaa

SEQ ID NO: 35105 - DNA, 360 bp, Escherichia coli
atgaacgtaaatgacatcaatcttgaactcagctctgctgctctgatggaagaagccattgccgaacttgcagagaaactacctgttcgacaacatcgtattaatcttgctgagttctttccgaatggcaagatcgagagttttaaagacttccgtctgatgagaaacacttttcgtcagatgaaccaaaatcatccgaaccgtaatgagatgctggcgatgctccgcaacttcccacgaccacaagctggggttgctcgtgtcgaattcgagatgaattctgcaaacacaatcttcaacgatgagacaggtcaggcgatcttgcttggtcgtgacccttggcagaaggaatacagataa

SEQ ID NO: 35106 - DNA, 237 bp, Escherichia coli
atgaaactcacaccgacagaggttgcaggaatccaggatctacttcgcggatcaactctggaggaacttttgcagatctctcgaaaactcgaagaaatgcctgaaaaattcgttgaagacatctctcaggcagaacgtcaaaacgggcataactattatgactctcagcttcgtgcaattggcatcctgacagtcatcaacgacttcacaaaacctctcaaggcaatgtcacaatga

SEQ ID NO: 35107 - DNA, 633 bp, Escherichia coli
atgaaacaacttaatccgaaataccttcttcctactgttgacagtcttggtacaaagtcaccgactgcacagagtatcaaactggaagaaatgatcatccagactttggaagtgttacgcgctgacattgcctctgctcaccagtacgtcagtcaattcgaagctacgaaagctgatgaagttctgcttcgcacaaataatactctcgctggttatggtgatgtaggtattcgctctattgtaccgatccacattgcacagtatctgattggtgaagaagctcgcgaaggcgacaaagatgaatctcgtcttgtatgggcgtatggtagcagcactgtcagtcagcttgaaaacgctgttgaagccatcatgaaaagtggtcagaagatcctcttcaaaacaccaatcagtaaagacgctaccattcgttataccctgaacggagacatcgaagttcttcgtgagaagattgaagcattccacaccaaacagcttgaagctgagtttgccaaacatcaggccaaacttgatgaagcgaagttccagttcgagatgttcaagaagcacaaagataagcgtctaaaagaagtcactgacattgacgcgctctgcaagtctcctttactccagtaa

SEQ ID NO: 35108 - DNA, 192 bp, Escherichia coli
atgacacacgctctacagatgctcatgatcagcgcgaaataccatccacttaacgatgaagcaacgtcaatgctcatcgactttctgaaccgtgaccttttcgaaggtactacacgcgctcaagtcatcaacgcctgtcatcagtcttgtgatcttcgcatgtctccggcaggtatcttctacaaaggataa

SEQ ID NO: 35109 - DNA, 405 bp, Escherichia coli
atggctaatccaaatggcaacccaaatccaaattggacaaagggtgtgtctggtaacccaaagggcagaactccaggcactaaaaatgctttccgtaaatctcagacactaatcgatgcacaacgtgacctcaagaaagctaaggtcttttaccgtgcgatcatcaatgctgacatggacattttgaaagaattcaacatcacaaaagtgactgttgccaatcagcttgaagctcagaagcagctacgaaccatcgcgaaggaagagattgctcttgaaacagctttcctacaagaacaggccgcagaaaaggctgctcgtgccgctcataaagaagaacagtctcgtaaagcgacattctcaccttttgctggtggcgtggctccgatcaaacaggcggtctga

SEQ ID NO: 35110 - DNA, 465 bp, Escherichia coli
atggtcaagcgcactgttcttccagcaagacagaagctcgtatcagcaatgcgcaatctcggtaaggaaaagctctcagttggtttcttctccgatcagggacaacacgagtcaggcatgaattacccttcactgatgttcctgcaagaagtgcatggtgtacgcagcaaagacggtcttgttcatcgccgtctgttcgaacaagtcattgacagagatcgaaaagaaatcgtcaacggcattcgtaaaagtgttggtcagcatctcctgaacaacacctctcaggtttacaaagatgctggtgttctcatccagaagaaactgaaatcaggcttcggtgacactggcattctcagggcaaatgctccttcaaccatttcgaagaaaggcttcaactctccacttatcgagacaggcgatcttcgtgacaaactcactttccgtattcgacagaaagttaaataa

SEQ ID NO: 35111 - DNA, 393 bp, Escherichia coli
atgttcaacaacactgcttcaaaagacttcatcagcaaagactctaaagttgtcaaactgactatcatcaaattaccagcatcaaaaggtattccactgatccagaaactgtctggtgtcatcggtggtctgttctctcaggaattcacctcgctacctgctgcaatcgcttcggttgctgacaaagtggacatctacgacactgcaaagactctgttcgctggtgctctgatcaactgcgaagataccagcttcgaagacttcccgcttgatgctgataagttcttcgctggtaactatggactgttcatcgacttcgttgctttcgctctggaagagaacttcggtagttttttcgacagcaagacgttggcttcaaaaatccctgcttaa

SEQ ID NO: 35112 - DNA, 210 bp, Escherichia coli
atgaaggacaaaatctccgaagctgatgtcttcattctgaacatccactcaagcgaacattgcaaatgcagtctccctgacttgtacgcaatgaccttccctgatctctgccatcttcacagctacatcgcctaccgtgattcgatcaccacgttgcagcagtaccaacagatgaaggacatggaagcagcgcagcaaaaacaacactaa

SEQ ID NO: 35113 - DNA, 2232 bp, Escherichia coli
atggctggaaataaagtcaccattgagcagttcagtattgacgttctactgaattcacctcagttcatcaaacagttgcagcaggttgagtcaaaggtcatgtcagcctgcaaacgcatggagaaacaattctccggctccttcaatcttcgtggtaaaggtgcagctaactttcaaaaagacctcaaccgcgtagtaaaaaattctcagtctgctgcacgtcagattaaccgtgccatgaccagcgcattcaagatcaacagtgtcggtaatggtgctaaccagtgggcggcttcgtatgtcagagcgtctgagaccgtccgtcaggccgttggacgtgctaaccgtgggatcaatgcgcgtggtggcgctcttggcctcggtggtgctggcagaggtcaacctcgtgtcactccagcagaacgtcaggaacgtacccgtctgaacaatgcctcacggatggccgatcaggttcactctcagatgtacggtgcaaccctccgtcaacttcgtcagggtggttaccgtgaacaggctcgtcagttccgttcaagtgtccgtgaatcgtattcccgcaatgctgcaactggcgacattcgtcaattcagacgtgatgtccgtgaagctaccgctgcacaacgtaacttcctgaatgctcagagtcgtatgtcaactggtgtcggtcatgcgtcagaaggtctgatcggtcatcttgctggtcttggtgctgctgtcttctcggttcataaagcaatcgaactatggcaggaatcacttcaagttggtatcgatcgttatcagtcacgaatcatgatgcaaggtgcattccaggagaacactccggcagctatggaacgtgtcaaacagatcgttgatacatacggtttgaacaaagctgagacagaatctcaggctgctcgtcttcgctctaccatgtcacatgaagtctctgacaagcaggttcttgaccttctggaaaacgaagggatctatgctcaccagaacggtatggacagtagtatgatcttccgtaccaatcacatgctttccgaagcggcgggtatggttcatgcaacaggttcaatcgtcatggctctatctcgtgatgcccctggtctggtgcataaaaccgccgaacgtcttggaatgtcacttgagcagtacaacgcgcaccgtaagtcgatctctggtactcagtttgcgatggaacaggccgacactatggcttgggataatgcgaagacaggtgctgctaaagctgctgctgaatctgtgcaggctgaacttggtaagtatcgaaatggtttcgatgacgttcttgaaggtttcttcaacggttactcagacggcttcaaaaatctccttcgctcactaaccagcttcttcgagaattctattggcgctgctgaaacactcggtgaagctctcggaaacatcttcgatgacttctccaaagcggtagacatcctgaacgttgcccttgttcgtggtggcgcatacttcgatgaattcgttgttgctattgagaatggcttcgctgatctgcctaaaccgcttcaagacgcactgaggtcactcggtggtggtatgtctgaactcggtggcatggcaaaacacatcattgaaattgccgttgggctaagagcgttaggcggtgcattgtcattattctcatgggtgacaggtctatcaggcgctattgctggtgagggtgtcctcgctgggatcgttggtatcttaggtggccccgctgttgctgctgctatcgttgccgctgttgcaggatacgaggtctacaaggctgctcagaatcgcgacaaaccgattgaagaggcgaagcaacaagcgaaagctgtcaacggttaccagcaagacttccaacagcagattcagaacaacgcttccatctacggtaaagacattccgtcacttctccctaagaaaccagacttcaactctgatcttctacttcgcaagaatgctgatgcagcgatccagaacgccaacattgctctgagcaaagcggcaataatcgcagcagaaaacgccattccgaagaagcaggaaattcacatcatcatgtctacccctgatgggaaagaacttcaacgtcttgtaatgaacgcacgagatgacttcaacgcgatggttcgtgctccttcgatgacagatcaatggggtactaagtccactggaatgaacgtccctctgacaagacctcaacaaaaataa

SEQ ID NO: 35114 - DNA, 819 bp, Escherichia coli
atggcaacagggcttcctggctacaatgtctcgccacttgactacaccaaacaagatggaattttgttccatcttcaagatgacatgtcgatgttcctgaatctgacggcaacaacagacatgacgtataactctccaatcactgtcaccacgaaccctgtcatgtcaggtgctaacgtcgctgataacttctctcgtcaaccgaagaccattcagatctctggtgtggttgtcgttggctacgaaggtgcattcttcacacaaaagagtgcatcagtcgtcgaagattttgttgtgaccgtggaacgttggcgtgatcagaagcgtcttgttcgagtcctctgcaaagacggtatctcccttgataacgctgtcattcagaccttccaggcgaagaaggataagaacattgccaacggtctgaacattgagatgaccttcattcaaatcgacatcgtgaaggaagcgacaaagacaactgttcatgatgttggcaatgctaacggatcaggctcaggttcatcgacgaagggtgttgcgaagacgaaggataaagccgtcacttcgatgaaacagactggcaaatctgcaactcaactgtcagaagcaactatcaaatgtaaggttctgaacagcatctcctatgccgaagcagggagaattacaggtgctcgcggtgagcgtcagaagtgcaatgaatcctttgatacaactgctggcgtagacagttattcatacaacccgaacgacgctgttgtttcacgtgtacgtgattatctcaagtcgcagggcgttaacgccaatcactcgaaggtataa

SEQ ID NO: 35115 - DNA, 369 bp, Escherichia coli
atgagctattcgatcaacatccctgcttctccttggtcagagcagactgtcactctggacggaagtctgttccgtatcgaaatgaagtacaaagaccgaacacaacgctggtacatgactctgaaagacatggaagggaatcatcttcttactgagaagaaatgtgtcgctgaccagacgatgactggcctcttcgatgtacctggtctgtcaggtgcaatcttcgtgcaacgtacaattggtaaagaagactatccgacctacaacaatttcggtatcggcaaggattttgaactgatgtatgtaacagaagcagagttcaccatgttgctgtccttgccaaaagcatcagtctacagggggcaataa

SEQ ID NO: 35116 - DNA, 1104 bp, Escherichia coli
atggcagagggtatcccacttaaagcgtatgaattctcaattggtacggaagccaacggattcaacaacgcacctaaccaacatgcgactgacaaaactgctgacatcattacgttcggcaatgtccacttcgaagggcagtgttcagttgataatgatccgacaactaccagttccgatgacgtgaccttccagatctacaatctgaacaagactactcgtgaagctctgatgacagagaacgcaacgttgatgctccgtgctggctacgatacagaatggaagcgtggtgctgatggagaaattgtccgtgatgtcaccactcttcctgtcatcttcctcggtggtgttgtccatagttatacgaagaaggacactgggtcgaatgacatcgtgacgcttgtccaatgtagctctgatcagaagattcgtgagatgacaaagacatccatttcattctctccaggtacgaaaaagagggatgtcattcaaactctggtcaaaatgctgaacctacctgtcatcaggatggaacttgatacagttggcgacaaggcttatccagcagggttggcatgttttgatcgtgtcgacaaacgtctgacaacggtctgtaaagaatgcggtctccagttctccattcataatggtgctatctcgatccttcgtgcagataaccagcttcgtgaccagcagtcgaaagagtcagaagcctggctcatcacacctgatcagatccgtgaacttgacgcttacttcaaacagaagtcctctgagtacaaggaaggtgagcatcataattccaatcgcggaaagactcgcaagaagaagactgctccgaaacctcttccagaagataccactgtcacgaaatctggcggcaaacgtacacgcactgagcacggtatttcgctgactaccttcctgaacgggcagtttaagattcatgacctcatcaaactcgaaggtctggatgcaatcatgcctgatggcgcagaaggtgatctccgcgatggcctttaccgcattatcgaaattcaacacaaaatgggctatccagagggtgattggacatctgctctgaaaatggttgctctctcttaa

SEQ ID NO: 35117 - DNA, 417 bp, Escherichia coli
atggcaaaagttatcaaagcctacgctcatctattcccgaaattcgttgaagaaatcatcactcagcgtgacatgaacaacttccacgagttcaacggaaacaatctcagcttccagtattacagagacagaatctggaaagcgtaccctacatctgatctcccgctgacctcgacgaagccgaagatgaagaccttccattacctcaaggattatccgaaggatggtctgaaagggacagaagttctgtccccagagtctggtgtgaagtatttcgtcaatctccgtgagttcttcgacttccttcaaaactctacgctgacggctgctgacttcgtgatcagcaatgtgttcagcatcggtgaaggtatcgttgaattcaccgcttcgtcaggctatccagcaggtaaaccgtaa

SEQ ID NO: 35118 - DNA, 516 bp, Escherichia coli
atgacatgcaaaactcctcttccttacactggcgaccccatcaacaaccctcttgaccgtgttcgtctgtactgcactgacactgacaacgatgacattcttgttccacaagagatgatcgaatggttctacgaagaatccggtcacgatgagaaacaggctgctgtcaaagctctcagtttcctgatggtacagatcgcgaagatgggagatgagaaagtcggtggagtggagatcaagaactcagagcgtatcaaaaacatgcgcttggtactgactcaactgaaagctgaccttctccgacagggcatcggtgacgtttatgctggtggagtgagcaaggcagatgtcaacctaagacgttttgaccctgattcaccgaaacgaggtgtcatctctggcgatgctttcagtctctcaggcactggttatgatggtgtcggtgtaggcttccatttgtatgaagcaccagttgggatggatgtaccttctgattgtgtgctaatccctatctga

SEQ ID NO: 35119 - DNA, 144 bp, Escherichia coli
atgggacagaaaacgacatgcagacggcaaccaaggcaaaacaaccgctttgaaatggctgtcttcaagaagtctgctgacaagtatggctacgaacgtgaaaaggaatttgaatggaaaccttcacgccctacccgcagataa

SEQ ID NO: 35120 - DNA, 576 bp, Escherichia coli
atgatcgagatctcaccggaactcagacagcgccttcaagagatgtctgctgcgaacatcctgagaatgaactcagagtttgacgcgaaatgtgcagatgttaaccctcgtgtgaaacgtgtcggtgacatcaccggatcgaacatcaagacagaattccatgacatggacagaccgtctgaaccgtggttcacaacacctcgtagagttctggacgggcgtagagcgccaggcgtcactaagcgtggtgaagggaagaagaagtctcgtcctcgttacatgcactacgaccttgaggttcaggacggtctagatctggtattcaaagctgatgctgctcttgctgagaaacctgacaacaagactctgcaacgtcagcttcgcaaagaaatacgtcgattgctgaagtctatcttcgacctgaacatgttcggtgtgggtacgaccactgagcagcctgatggaacgtttctgttagaagtaaaggtcaaggatctggtcgaagctggtgcagtacctgatgagtataaggacaagctgactgatcagttacttgacagttggcaggcatactga

SEQ ID NO: 35121 - DNA, 423 bp, Escherichia coli
atgaaaagtaaacttttagctgtcgtggcattgatggcttcgttctctggtgcagtacaggcagacggtatcacgggtgaagagtatcaccacatgcaggcgctttctcagtgcgtctacatcgcaaacacaatgcgccctggctcgttttctgttgatagagctattgcactatcgaatcaggcaatcgccgtgtttgtgactgatacagcggctatgcgtggcggtctctacaatccgtcaccgtatgaccttgcatctgactatgcatttttctatcagtcagcggcaagtgacatcgaaggggaaatgatgcaatcgatgagtgctcaaggcttacagcttgccccagaatcctggtttacggttggcgctcaattctgggttagcagaaattgtgcagcagtcgaaagggctaactga

SEQ ID NO: 35122 - DNA, 318 bp, Escherichia coli
atgaaacacattcgtcttacccgtggtcacgtcatcggactggctgtcgctgctggtctcattattggctgttccgtacctgcgaaagctgccacgttgaagactcagtacattgacagccgtcaggatcgtatctgcgtttatagcgcacacttccgaacctattcggtgaacgttggtttcaatggtcactgtaacttcaacgtgcctgacacaataggtgagtaccagaaggactacatgaaggactaccagtcaaaggcatctatctacgggaaagacattcccgcaattcaaggtaatgatgatgaaaagtaa

SEQ ID NO: 35123 - DNA, 1737 bp, Escherichia coli
atgaacaccattaagggctatctttatacaagggtaagctcattgaagcaggttgaagacaagaacggtttgcagcgacaatccgatctcgtcagcaaatggttgaagcaacatccagaggttcagcttgatactgagtttaccttcaaggacgctggcaagtcagcattcaaggggaagatgcttgagcagggtgcatcactggcgaagttcctcgcagcggttgagtcaggtcttatccagacaccctgttacctgctgattgagcatctggacaggatcactcgactacctccgacagaggcacgagaacgagtcgttatccctctgctgaaagcaggtgtgtcaattgtcaccgtcagtgatggcctgatgtactcgttatcgacggtgaacaacgttgacggcactacaccgcacattgacatgctgttgaccttgttcctgaacatggcgtaccagtacagcaagaaattatctgaccgtgtgtctcatgcgaagaaggacaaacgtcagcaagcagcggaagcagggaagtcagacaagtaccttgctccaatgggcgctatgtgtccacagtatctggacgtggttgaagatgcagatggtgatcgtgtctttgtaccgaaccctgagaaggttgctgtcatcaagcgtatcttcaaagaacgtgcctttactgacatcagcattaaccagattgctcgtgacctcaactctgagggtgtatctgttatctcacatcaccacgcgaagagaggtaagtcagaatgggcggctgcaacaattggaactctgctcaagaactctgctgtcttgggtatccttcgtgaatctcaacacaaaggtgtgaacggtcagcctaagtatggtgaagaggcaaactattacccgcaggtgatcgacctccagacatgggaagcagttcagcgcaaatctcttcgtggtaagccagtgtcaaaacgtgagttcccagcagcaacgaacattttcagaggctacatcgactgcaagcattgcaaccgaaggatgacaattaacggtgttcggcctgacttccctggttcaattacctgtcgatctacaaggtctggtctttgtactgcaccgacttactcgatggcgaagtttgaagatgctgtcattggatgtctattcgcgaaactctctcagattgaaacgtcagatggtgctgaccagaatcttgaacaagcgaagattgaatgtcaggttgcagaacgtaagcgtgacaacttccttgctgctttggcaggtgctgaatctctggttgtcatcaatgccatcacgaagaacatggaagctgaacagcgtaaggttgacatcctcactgaccggatcgagaaacttcaacgagcagtaaagtcacggacgaagttcacactcgatggacttgacctgacggtgaagaccgaccgtgagaaagctcgtagcattatcagtgagcacatccagcagatcgttcttgataccattgcccgaactgttgacgtgtaccttcgcaacggtaacggcatcgaacgtttcaagctggagaaccctcatgatcagaccgtactgttatctgagatgctggcaccaaatgaacgtatgcttgaaaactatgctttgacaggtatttctaaagttgttgcattggcaagttcgacaggtgtcaatacagttgatgacagagagtttccagacgtagagcctgactataccaatacagacgaataa

SEQ ID NO: 35124 - DNA, 864 bp, Escherichia coli
atgagcactaaaacgaagtcagacgaagtcattgcaccacgtgagatctacgcaacacggacaccaactgtcaaatttcctggtgattccatcctggaggtttttaatactctttcgaacatccgagaagggtctattgctcaaattggttataaagaagcaggagtgttgatcgaagcatttgcagtatttccgatgatgcctaaactagcgaatacacgctttgctcaggaagctacgaattgttacgttgagattgatgaagaaggtaatgttaatcgcctcgatgataaacctgaatggttgaagtcggagacagatttccatgttgaatccgtcctgtctcgctatccaggaattacttttgaagattaccttcgtaagatgatggatgctaaaccacatgttcgcagtgcgatgttgttggctgacttcaaacttgaccttcgtgatggaaaggcttcggctgtacctgagcagcaatcagtatccagtaagaaaggcaaaactcagaatgtcgcaatgatgtcactggaagagttcaaagaagctgctgaggtgatccagacagcgatcaaagataagaccttcgctgattttgaatacctctggaaacatgtcagtgatccagtctcgaagaaagacaacagcacctataaattcgcttatcgcactttctacaaaggtctgttgaaccaacctttcccatcaagaaagatggaaagaacttatgatgagttttggattgaacagcagaaacgctatgacctgatgatgaaggacgggatcgaagctgtttatcagaagattgctgctgctgttgagaaaaatcctgacctaccaatcaaagaattcaaaatctaa

SEQ ID NO: 35125 - DNA, 327 bp, Escherichia coli
atgtctatgacaatcacacatctatttcctgagtcatcctcaaacatcctgaaaaccttcggttacctgcacaaagagcaagttcactatgacaatagtcctgcatcagtatttgaacatcctgaccatgaagaattctgcaatgaccacatggattatcgtgtcgctgcgtgtaagaagctgctgaggttaggtgtcactactgacctcattcttgagcatgaaggtctctgtgaagctgccggagttgaaccaatcctgaccttcggtgaattcctcgctactcagctacacgtcagcaaacatccagaagtggtggtggcgtaa

SEQ ID NO: 35126 - DNA, 195 bp, Escherichia coli
atgagcattaaacaacttgaatccggtcgctacagcgtcactggtaactttggcagcacacaatttcatgtgggcatctttgatcatctcgacgatgcagaacgtgcagagcgtcaattaggaaatgtacagccagcaccgcaggtattcagcggtgaaatttcggtatcactggcagcggtggtgaccgaatga

SEQ ID NO: 35127 - DNA, 873 bp, Escherichia coli
atgaataacgcagactttcagaaatggttaagacgttcaccagaagagaagaaacgagagcagcgccttagtaagcgtgaccttaacaaaaaatacgctcttcctgctgactataaagcaccgaccgctaaagatgttgcccgtgctgttgatgaggttgcaggccagccagcggagcagattaaacgccctggtactggttcgagattggttcaacgcagaggtaaaatgatcctgaacccctgcaccgtctactttaaaccgtggggtaactacagtgtgatcccgtctaagattgaggacgttctgatcggttgttgccgtcagtcggatagcctgggagacaataccaacattaacccccgcaccgtgtttgctgtactccgcgcattaccattcattacaactgaggctgttcaggagttcctgaaccgtaaacgcaatgtgctacaggatgcaggggggatgaaccaacgttacgcgcaatacatcgttgcaacttgccagagggttattaacgtgttccagcatcatcaactattcattgaaaacattcttgtgagtaacggtgtgcgtgtgcatgtattcgatgactcagcaacccaggaagagatcgaactctgcaccttgcctgaatgtgagccatacgcagaagactacgacaacgatcagatgtctgatgcaatccgcagtaaagaccatcgctcgatgtccagagggtgcgaacgtttcaacatggtacacatcgacgctgaccaggtaacaggctggtgtgcataccgtggtgctgaactctcagcgtgtggagtatggaaactttcgaggctggttaagcagaatccggtgctgaatttggcaatgtggtctttgtga

SEQ ID NO: 35128 - DNA, 570 bp, Escherichia coli
atgtcacgtagcgtagcttactgccgcattagtaccaaagataaagaccagactgttcagactcagcttcatgagatccagcaacaatacggtgaggttggactgtacttctctgatgaaggtgtgtcaggttctactgaacctatgcagcgtgaaggattcagcaggatgatgaagctgctcaaggcaggagaccgtatcctgattgctcgtaatgatcgccttagtcgtgacaccgtcgatacactggaattgttcaaacaactgtccagacgtggtgtacaggttctgtcagtgaacgatgagacatacgacatcaacgatcctgatggtgagtttatgattaccctgaaagctggtcttgccaaacgtgagaaagctctgatgatcaaacgcataaatgctggcatcaaacgtgctcaggcagagggtaagcattgcggtcgtactgagtcaccaatgaatgctacggttcgtcagatgctgtcagaaggtcgtacagtggcagagatcgtcaccgtgacaggtgtatctacagcatctgtctacagaatccgaaaagacatgtga

SEQ ID NO: 35129 - DNA, 627 bp, Escherichia coli
atgattgcatctcttttctctgctaacggtgtcgcggcggccattgattcatgtcagggatatgatatcaaagcgagttgtcacgccagcaggcaaagcctttcaggcattacgcaggactggagcatcgccgatgggcaatggctggttttttcggatatgaccaataacgccagcggtggggccgtatttttgcaacaaggagcggagttttctctatcgccagaaaatgaaactggaatgactctgtttgccaataatactgtctcaggagaatataataacggcggggcaatatttgctaaagaaaactcaacgctgaatcttactaatgttattttttccgataacgttgcaggtggctatggtggcgcaatctattcttctggtactaacgataccggtgtcgtcgatttaagtgtcactaacgccgtgtttcgcaataacatcgctaatgacggcaaaggtggtgcaatttataccatcaacaatgacgtctatttaagtgaagttatttttgacaataaccaggcatatacatcaacaagttacagcgatggcgatggggcgcaatcgatgtcaccgataataatagcgatatcacgcatccgtcaggtttcacaataa

SEQ ID NO: 35130 - DNA, 537 bp, Escherichia coli
  misc_feature (6)..(15): n is a, c, g, or t
atgctnnnnnnnnnnactaaattagtcggcgaacgtactgcggaattggatgaagtaacctatggtacgatgattagcgtgctaccacgatttgctgcgcgaaatcaaattgaattactcttgaatattgaagatggcaatgaaatcaattccgacaaaaccaatgttgatgatctgcctcaggttggtagaacgcttataagtactattgcacgcgtaccccaagggaaaagtcttttgattgggggatatacacgagatacgaatacctatgaaagtcgcaagatcccaatattaggcagtattccatttattggtaaattatttggatatgaaggaacaaatgcgaataacatcgttcgtgtctttcttattgagccaagagagatcgatgagcgcatgatgaataatgcgaatgaggctgcggttgacgcaagagcaataacacagcaaatggcaaaaaataaagaaatcaacgatgaattactgcagaaatggataaaaacttacctgaatcgtgaagtcgtcggaggatag

SEQ ID NO: 35131 - DNA, 246 bp, Escherichia coli
atgttgcgttgcgatggccatctggtcgggtgtactcatatcaatgaccagatcgctcgtgagatcgatctggctgttggtcatggcataaatccccctggctcctgccgcgccggtgatagccaaactgtctccggttattctaccgccgttgagcgcccacaaacccagcgccagactgccattacgatcaaccgtaatatcggtattttgcatgttgacaacagccgttgccgtctgggctga

SEQ ID NO: 35132 - DNA, 366 bp, Escherichia coli
atggctatcagcaccgatagtggttgtaccaccacgaacttcgacgccatttgccgcggctccagttacatcaacagtgagtgcattcgcgctcacctggccaaagctccagaggccgtgtgcattatcgccattggttttaatggtactgtttgttccgagatcgacaacagagtttttctgtacgtttatccccatggcgctgtagccctgaacatcgattgtcaggtctgtcgccgtaaaacgcgcagcaccattggcgttattgccgttgagaccaccgatataaacacctgtacttccatcggtcttgattttacttccgcttccaagatcgacactggtgccatagtcattgatggttag

SEQ ID NO: 35133 - DNA, 852 bp, Escherichia coli
atgaaaaagactctgattgcactggctgtggctgcctctgctgtatctggtatggcacatgcctggacgaatggtgatttcaatggttcggttgatatcggtggtagtatcactgcagatgattatcgtcagaaatggtcatgggcagttggtagcgacatcaatggatttagtaatgcattaacggatctgactgaaggtggaaccaaactgaccattactgtaaatggcgataaaccgattctgctggggaaaactaatgaagcattttctacgccagtagcaggaggtgtaggtgcaatcccattaatctcattatctgatgcgactggcgaagtccagttgttaaaaggaacaaacgatgctcaaagtggtgttggtacttttgatctggaaatcaaaaatagagatactgaccaaaaaattgggacactacgtgcaacaatgactggtatggctgtggcgggtattgctggtgctgaaaatacaggtaaattatcagcactatatgcttatggaagctcaagaatcttctctggtggtttagtcacagagagtggttctgaaatgaaagatgcaaatacagctgtggcatttaccgagaaaatgggttcgctatcatcagcagatattctttcacaaattcagcaggttaagcagaatgttgaatctcttactcctcagacaagtagcgtgtccgagaatatgaaatatgatgatggcaatgttgtttctgccgcatatgcacttggttttgaaaatgggcagaccctcgaggcaacgtttgacgaggcgataactgccagcactcagtggacagctccattgaatatttctattgcttataactaa

SEQ ID NO: 35134 - DNA, 375 bp, Escherichia coli
atgaagaagcgtttttccgacgaacagatcatcagtatcctcctcgaagctaaagccggggtttctgcccgtgagctctgccgcgcattggatcaatgggcctttgagcatagtgtcgagttgcgtttaatccagccgggcaagccaacgcagaacggatttattgagagctttaacggacgatttcgcgatgaatgcctgaatgagcactggttcagcgatatcgttcacgctaggaaagtgattaatgactggcggcaggattataacgagtgtcggccacattcagcactgaattatcagacgccatcagagcttgcagcactatggcgaaatgaaaaatgtgaaggtaaccaaaccgacattactaactga

SEQ ID NO: 35135 - DNA, 588 bp, Escherichia coli
atgtacctgcatcttgttccaaaactttttcatcgcatggctaataaatgtagcctgaaatccatttccatacctgaacttgattttataattgacagcgattcgttatctgtaggcaggccatggcctaataaatgtgtatgggttggaatgaggaaaggaaggaaagccgttaatggtctgattttgcaaacaaataaaaaattaagacggtttaccaccatatacacctgggatattgaaaacatggggttaattcatcatcaggtcaatgcttatatagaagatgatgaatttgatatggtgtcacaggaatttcttttaaacggtgcttttgataagtggagcgacagagtacataccgcttacgagaataagccgccagcaagaatccagcccaaaatggagtccttgttaaatagtcccggtaaagacagtcatgatgtatgggaagagtttgaatggggaaacttccttatatccagagaagaaagtattttacttcacacaattcagtctgaacgattaaacaccgacttctctttattcaggagacagccaccagttaatcaaccattacttgtttaa

SEQ ID NO: 35136 - DNA, 318 bp, Escherichia coli
atgaaaatgccatcaggatatacccgtattctcattgcggcggccattatgagctgctcaggaatggtatttgctgcaccacaacctgcaccatcggctgaacagctgccgcctccatgccaggaacaactggtaccaccaccggcacagccaccgttctatgcgttatcacagcagaccaccacaccggcagaaacactgagcacggtggtgaaaaatattcctgccgtggaaaaagggaagaagtatgaaatccgcgtggaagttcgtgaggtgacaccaccaccggcaccggatatggatgcaccaaatccttaa

SEQ ID NO: 35137 - DNA, 324 bp, Escherichia coli
atgagcaaaacgaaatttattgagcaggctgaaaaactgaaaaacctggtggattctgccagattacaaacttcttctcctgccgtaacatcaacagtcccgtctcagccaaatgaaaatggtaattcttctgtcgcagagggagtttcagcccgtcctcagattgccagaacgaaggctaagaacctcaaggccataccgctgtcttatttcgatgctcatgcagaactcaaagcgacaagtaaaacatctctggattttagctcatatattattgaggctataagggagaagcttgaacgagacggtgcaataggtcaataa

SEQ ID NO: 35138 - DNA, 141 bp, Escherichia coli
atgttgcgagggagtacgaaagtttacactagttcgtactacgaggaatttcaagggattttgacagtactgaaacacagactgtttatgtttttgatgaatggcaagccagatctcttacagataatattgagtatatag

SEQ ID NO: 35139 - DNA, 1041 bp, Escherichia coli
gtgagtaaatatttgaaaataggattttatggcatttggggagtgtttttattccttgcgtcaatggagaaatttggtgatcttttcgcagtcggtacaggcttctggtcggtaatcatgctttccgtcgctggattgtgccagctactggcaagtactgccgcgataggctgggctgttttgggttatggtacgcttaaagcgaagttcttaccctataaactcgttaataattatacggttcctgtactgatcattgtgctcgctttcgtggcaagttctgcccgatcttcaagcgatggagccagagcacaaaaacttggttttaaagatagtaaagagttttctatcgctcgtgaaaatcacattacaaatactgatgactacgcgaaatttgtagaagaacaacgagttaaagcggcggaaaagaaggttcaagatgcgttagtagcagccgagaaagctaatcaggatatagtaaagaaatacatttcaatatttgataaggataaaagagaacaagctcaaataactattagcaaagatttagaagaaaatgcagtattaacagagtcaatacttactgaaattaaatcttaccctaataactcagttgatagaactgctggacaactcacatacttagatattggcgttagtatgaaagaatacatgtcagctatcgagcaatctaattgtaggcaaaggcttaacaattctttatttcctttaaatgaatggaataaatctcaatttaatttattgaacgaaagatttaatgctatgagaaatggaattgatatggataggattcagcttggcaaagaattgcaatacgaaagagataaaatcaccatgcagtacttttatgaaaaaaataaatatcaaaaatcatttaatgagtgtgttttcagtctgttgtcttctatatccaatcgtctttcaagacctgatgccagacctgctcccgtaactgattatattcctgaaggaattaaatgcatgagaaaacccgaaggaaatataaaatattgttattaa

SEQ ID NO: 35140 - DNA, 177 bp, Escherichia coli
atgatccagattgatcttcccacgctggtaaaacggcttaacctgttctcccgccaggcgctggagatggccgcctctgaatgtatgagccagcaggcagcggaaattaccgtcagccatgtgcttattcagatgctcgccatgccacgcagcgacctgcgggttattacccgctag

SEQ ID NO: 35141 - DNA, 246 bp, Escherichia coli
atgctgcatctgttcagcggcaaaccgatccccgacaatcaggaaaacatcacccttcgtctggatgagcacatccggtctgttcagggtaaagagtactatgaagacgagatgttcagaattaaatactttaagaaaggttccgcgcacatcacgttcagaaaaccagaactggttgacaggattaatgatattattgccagacactatccaaacgtgctgcctacaaaatggcttaatttctga

SEQ ID NO: 35142 - DNA, 4500 bp, Escherichia coli
atgggtggaaaaccggcggcgcggcagggtgacatgacccgcaagggactggatattgtgcagggttcagcaggggtgctgataggtgcgccaaccggtgtggcctgttcggtatgtcccaacagcccgatagaggagcagaagggtaatccggtaaacccgctgctgggagcgaaggtgctgcctgctgaaaccgacctggcactgtccggcccgctgccgtttgttcttttccgcgcctacagcagctaccggaccaggacgcccgcgccggtgggggtgtttggtcccggctggaaagcccccttcgatatccgcttacagatacgcgatgaaggcctgatactcaacgacagcggcggcaggagcattcactttgagccgctgtttcccggcgagataagctacagccgcagcgagtcgttctggctggcgcggggcggggtgctgaaacagcagaaaggccacccgctggcccggctctggcgggcgttgccggaagcggtccgcctgagtccacacacctatatgatggctgtcagcacaaccgggcagtggctggtactcggctggccggagcgggtgccgggggtggacgaggtgttgccgccggagccacccgcataccgggtgctgacgggcgtggtggacggcttcgggcgttcactgactttccaccgcgaggccgcaggcgaactggctggtgaaatcaccagggtgacggacggcgcgggccgctgttttcacctggcgctgaccacacagtcacagcgggcggaagcgtcccgtaaacagcgcgagtcttccttatcttcccctgccggtccccgttctgtttcctcttctcaggttttccccgatacgctgcccgtcggtacagaatacggtgccgataacggtatccggctggaggcggtgtggctgacacacgacccggcatacccggatgaacagccgactgcgccgctggcgcgctacacgtacacggccagcggagaactgcgggcggtgtatgaccgcagcgggacgcaggtgcgcggggttacttatgatgtggcgcacgccgggcggatggtggcgcaccattatgcggggaggccggagagccgctaccggtatgatgataccggccgggtgacggagcaggtcaacccggaggggctggactaccgctttgagtacggagagagccgggtaatcatcacggacagcctgaacaggcgggaggtgctgtacacggaaggcgaaggtggcctgaagcgggtggtgaagaaggaacatgcggacgggagcatcacccgcagcgagtatgatgaggcggggaggctgaaggcgcagacggatgcggcgggacggcggacggagtatcggctgcatatggcgtctggaaagctgacttcagtgatacttccggacggcaggacggtacggtatggttacaacaaccagttgcaactgacgtcagtgacgtacccggacgggctgcgcagcagccggaaatatgaccgtcagggcaggctggcggaagagatctcgcgcaacggtaacattacgcgctggttttatgactccccccgcagtagcctgcccggcgcggtggaagacggaaccggggtgatgcggagaataacgcgaaaccggtacggtcagcttcaggcgtttacggactgctcggggtacacgacgcggtatgagtatgaccggtacggtcaacaaatcgccgttcaccgggaagaaggcatcagcacttacagcagttataacccgcgtggccaactggtcagtcagaaggatgcgcaggggcgtgaaacccgttatgagtacagcaccgcaggcgacctgacagcgacgatatcaccggacggtaaacgcagcaccatcgaatatgataaacgcgggcgtccggtgagtgtgacggaaggcggactgacgcgcagcatggggtatgacgccgccggtcgcaccaccgtgctgaccaacgagaacggcagccagtccacgttccggtatgacccggtggacaggctgacggagcagcgcggctttgacgggcggacgcaacgttaccactatgacctgaccggaaaactcacgcagagtgaagatgaggggcttatcaccctctggcattacgatgcgtcggaccgcatcacgcaccggacggtgaacggcgacccggcggagcagtggcagtatgatgagcacggctggctgacagaaatcagccatatcagcgaaggccaccgtgtggcggtccactacggccacgacgataaaggccgcctgacgggcgaacggcagacggtggagaacccggagacgggggagatgctgtgggagcatgagacgaagcacgcgtacagcgaacaggggctggcgacccgtcaggagccggacggtctgccgccggtggagtggctgacgtatggcagcggttatcttgcgggaatgaagctgggtggtacgccactggtcgagtacacgcgggaccggctgcaccgtgagacggcccgcagcttcggcggggaggcatatgagcttgccaccgcctggaataccagcggccagctccggagcaggcacctgaaccttccgcagcttgaccgtgactacgactggaacgacaacggacagctaattcgcatcagcggcccgcaggagagccgggagtaccgttacagcgacacgggaaggctgacgggcgtccacaccacggcagcgaacctggacattgatatcccgtatgcgacggacccggcaggaaaccggctgccggacccggaactgcacccggacagcaccttcacggcgtggccggataaccgcatcacggaagatgcgcactatgtctaccgctacgatgaatacggcaggctggcggagaagacggaccgtatcccggaaggggtgatacggatgcacgacgagcggacgcaccactaccattacgacagccagcaccgcctggtgttctacacgcggatacagcacggcgagccacaggtggagagccgctacctctatgacccgctgggccgccggacgggaaaacgggtgtggcggcgggagcgtgacctgacggggtggatgtcgctgtcgcgtaaaccggaggtgacctggtacgggtgggacggcgacaggctgacgacggtacagaccgacaccacgcgtatccagacggtataccagccggggagcttcacgccgctcctgagaatcgaaacagagaatggcgaacaggcgaaggcgcggcaccgtagcctggcggaggtgttgcaggaggacacgggtgtgacgctaccggcggagctggcggtgatgctggggaggctggagcgggaactgcggcagggcagcgtgagtgaagaaagccagcagtggcttgcacagtgtgggttgacggcggaacagatggcggcgcaactggaggcggaatacatcccggagaggaaacttcatctttaccactgtgaccaccgtgggctgccgcaggcgcttatcagcccggaaggggaaacggcgtggcgcggggagtatgacgagtggggaaacctgctgggagaggaaagcacgcagcaccttcaacagtcactccgtctgccggggcagcagtatgatgaggagtcggggctgtactacaaccgtcaccggtactatgacccgctacaggggaggtatatcacccaggatccgattgggctgaaggggggatggaacctgtatgcgtatccactgaacccggtgcaacggctggatccgctgggattaagtgcggcgttgggcgcaggagcattaactgccatgggaactggttctgaagtaggtacagagatcggttcggtaggaggccctccggggatgttagtcggtgcggcagtcggtacggtggttattggtggtggtataataatatacaacaatcgcgaggctgttggggacgcgattgagaaaagtatggagatgcagggtgaagccgaattattaaatgcacaaagtcaaatggaattctggcgagatccctatggtgctttttccagcgtgtttggaaatgatgattcatcaaaagagaatccaaatgtcgggaaggatttgacggaggaagagaagaactgcctgggtggtggcagtacgggaagcccgggaggatggggaccagaagatgagaatagcgcaagagatcgtatgcagcatgaacggtataaagatgaattgcgacagaagatgggaaaacctgacgttacagattcaaatttgaaaaatattatagacgatctttatcggccaaatgcaaaagtaggaagtggaagcacagcagatgctgttcgttatgaattggccacaggtgaaaaagttggtggtagaggacatgtattgaaagcacaggattatacaagggctttacaggattggttggataagaatccaacagcatctccaggggatcgagcagcagcagaaaacgttcttcaggatttacagaatgctttgggaggcaagtaa

SEQ ID NO: 35143 - DNA, 885 bp, Escherichia coli
atggacttagaaaataaattctcatatcattttctcgagggattaacgctcacggaagatggaattcttactcaaggaaatgagcagatttatattccaccgaaagagttaggagtattgatcgtattacttgaatccgctggtcatgttgtcctgaaagatatgatcatcgaatcagtatggaaaaatattattgtaagtgacgagtccctgacaagatgtatctattctttgcgctgcatttttgaaaaaattggctatgatcgttgcatagaaacaatctaccggaaaggttatcgtttcagtggacaggttttcaaaactaaaataaatgaagataacacttcagactattccatagctatatttcctttcaccacttcattgaatactctggatccattaatacttaatcaggaattagtgcaaaacatttcgaataaaaaaatcgatggcctttatacctatccgatggctgcgacaaatttttgtaatgatcacatatcgcaaaattcatttttgagaagattcaagccagattatttcgttacaggaagaataaaccagaataacgcggtgaaaactttatacattgaactgatcgacgctaaaaatcttttcctcatcgccagtaatcatcttcctgttgatgaactacataacacatcacaatttattatagataatatccttcaaacggtacataatccagagcgttctgtaagattagctaaaccggaccaaggttacaagaatcattatttatcagatgaactgttggctggtaagaaagaactttacgagtttactcctgaaagcatttacagggctatggctatatttgatggattacaaaataaaagtgatatacagacgctaaaatag

SEQ ID NO: 35144 - DNA, 462 bp, Escherichia coli; identical to SEQ ID NO: 24245

SEQ ID NO: 35145 - DNA, 459 bp, Escherichia coli
atgggggacgaaaagagcttagcgcacacccgctggaactgtaaatatcacatagtttttgcgccgaaataccgaagactggcgttttacggagagaagcgtagggcgataggcagtattttgagaaagctgtgtgagtggaaaagcgtacggattctggaagcagagtgctgcgcagatcatatccatatgcttgtggaaatcccacccaaaatgagcgtatccggctttatgggatatctgaaagggaaaagcagtctgatgctttacgagcagtttggggatttgaaattcaaatacagaaacagggagttctggtgccgagggtactatgtcgatacggtgggtaagaacacggcgaagatacaggactacataaagcaccagcttgaagaggataaaatgggggagcagttatcgattccctatccgggcagcccgtttacgggccgtaagtaa

SEQ ID NO: 35146 - DNA, 156 bp, Escherichia coli
atggcacattgtatagcagctattacatcactgttcactgtttccgttgaaagctctgtggcacattatctggcacatacagctactgagcggaaacagctcgtgatagttccggtacctccgacaacccaacgtttattattccagtctgggtaa

SEQ ID NO: 35147 - DNA, 1335 bp, Escherichia coli
  misc_feature (1259)..(1268): n is a, c, g, or t
atgcaagatattaaaattcattttcaagattacagtttcgttaaggttgattgctctccttctatcggaatggaattaagagattatttctcgtttgaggttgaaggggctaggtttagcccccgttacaagtattctggctgggatggacgaataagactgtttacgcatgaaaacaccctaccaattggactattaaaaacgttgggtgtctttgttaaaaatatggggtattcagtctggattgacccgcgattgcttgagaaggaagatgtaaccaaagacgcgattaatgaatggattgattccttagaagtgtattccggtagcaataaaatcaatccttactggtatcaaagggaggcagtctttcagggtattcataatcgccgtagaatgctggttcttcctaccagtgccggaaagtcattgattgcttgtatgctgtctcgctggtacttagagcattacaccggaaaagtgttaatcattgttccgactacatcgctagtggttcaaatgagggatgatttcatcgattataggctattcccttatgaagcaattcatacaatgatgagtggtagcgggaaacatccgggagacaggttaatcacggttagtacctggcaatcagcttgcaagatgcctcctgaatggttccgacaatatggaatgttgatagttgatgaatcgcataaggctagtgccaaaaatattaccaatatcattaacggaatgaatcattgccagtttaagatcggtatgactggttcccctaaagaatcaaaatgccatcttttacagtatgtcgggcttttcggtgatatttctaaaatcgtgagtattgaccgcctgatggaagaagggcaggtgacaaaactgaaaattaactgtcttttccttcgttataccgatgaggaatgtagcgcggttaaggggagagaatatgcggaagagatcaagtatattacatctaacccacgacgaaataagtttgcttgcaatttggcgctaaaactcgctaagaagggcgaaaacgtattccttatgttccgcaatactaagcacggaaaacttatgtatgacgcgttacagaaggtacacgacaaggtttattatattgacggtggagttaagacagaagaacgtgatgaatttaagaaaatggcggagggtgacaccgggatcatttgtgttgcgtcttatggtgtgttctctactggtgtttcaattaagaatttgcaccatgttatttnnnnnnnnnnttattttcggtcatccagtgaaggaatctactatcgttcgtcagagtatcggtcgtgcattgcgtaa

SEQ ID NO: 35148 - DNA, 1176 bp, Escherichia coli
atgaaacttgcttacgctgccgaaattccttttgttaagaaaactcgcggtttatcgccggaagagtaccaacaacgaatcatcgctaaactggaacctgctttcgtatttggtggatttatcctaccgtggaagggtaatcacacttactttcgaatctacaatttagatacacaagaatataaggactacaaattacgcaaactggaagatactaacgggggtgagttattccagactgaaaaggctgtatggttgaaaatggaatctcgttgtaatgagaagggaaagaaattcctcggatggcaaggagaatggaaagggcgaaatagaacgaaagcccgtgttttgtgccctgaacacaatcaaatcatgacaccatctctattacatgctctcaaagatgatttcgattttgattgcaaaatctgtatggctgaaaaatcccaacgggtaagaagtggcaagacttttgatgaagttattaaggacaaagagacaatcatcaatgcacgttgcgagagtacgccttacaccttcaaaggattcatcataaacaccccacacctaaaggatgttaaatttaaaacctattgcaagacacataaccacgaatgggaatctcatttaagatgtgctgattctttcacttgtccgctttgcattaaagaccaactggtgcaactgtctaaccggacttatcagggtaaggctagtttctacattcaattattagatgacaaatttattaaatttggaatcactacccggaaaccagaagaacgaatgagagagcaaaccagaaagagcaacttcactcaccgcttaatctttactcatgagtttgaggatggttggaaagccgttgatttagagcatgaagtaaaacaacgcttcaagactcatgcagcaccctacaaagatttcaaggatggatggtcggaaactctgactattgatgagttaccacacttacagcaactggtttatgactacctaaccaatcaaccggacgaggctaatatgtgggtatccccgaaagatgtatttgatgacgatacattcaagctacatactcacttctacggcatcaataaaccggaatttttctgtattgatgacgacagtcctgatttaatggatgaatactttaatactctcttagaggctctctaa

SEQ ID NO: 35149 - DNA, 246 bp, Escherichia coli
atgaaaaagattatcgcgggtgttgttcttgctctgggtttggttggtgctgcaaatgccgaacaatatgtacagggtgatagtgtcaaacgtgctgccgttgcaccttctttaaatcaactgtgtactgaattagcacaggttgccggagttggtgacgatgacgactttattactgcgtgtgtatggagtcatatcgaggatattaataaacgtgatgcaaaactaactggaaagaaatattaa

SEQ ID NO: 35150 - DNA, 1296 bp, Escherichia coli
atgggcgctctgttatttggaggcgctacggctgctgctggcgtgatggctgttagtaaagcctctgaatttatggctaacagctttgctaacgctgaaacgctgggtgaattgtatagccgtgcgaagctgggcggtgtagacgttaaccagatgaacaatattgaacaatgggcgtataaaaacggcgttgattcaatgatgggggatcaaggtcgtcgtaagtatctggatcagatgaaagacgtcagggaacgtgctaccaaatcttatgacgaggctgaatatgtagttgataagaaaacagggaaaggcatatggaagggcggtgattctggtattaacactttaatgaatgaaggattcttaactaaaaaggatttaaaagactttgctgataatccggctggtctggttagtaaagctgtcaatggaatggtgaaaaagggctattcagatgcgcagatcggtagtcgtctggaagatctggctgatgatttgatgctcacctctaaatactggacacgctccgctaaagaagtggaacaatcagcacgagaacaacgagaatcagggcgctgggtaactaaagcccaacaggaaagcgtgattaaattccgtgaactgaataactcacttaccggactttctgactcacaagggatcgcctttgttgatggctttatgaaatctctcgatcctgctgtgattgaagaatttaaaaagagtatggttgcaatgctgccaatgtttaccaaattgggcgaggcgatcgggggactgtttaacgccataatgaaagcaatcaactggctgatgaaaaatgacgagaagacagatgctattcagaaaaatttaggtgatgcaccgccattaagcaatgaagggatgaaacagaatctttctgatctcgttcctgaacaatataaaggcgctggcaccggaacaactacacctgataatagtcattctctctttaacactattaagggattgcttttcgatgataatgcttcttctgtgtcagatgtaaaaatgtcagtcagcgaagcaccgataaccaatctcaaacagggtgctttaaataatcttgcaatgacaactccggcttataatttatctcctgtgtttaatctgaatcctacatttgaagtggtaacagaagttcctcttactattaattctgacacatccagattaagcgattatgtggattttacagcgagagcaagtcgggatagcttcttgaaatcattaacattaaccagcttatcaggacaatctaacggcgggtaa

SEQ ID NO: 35151 - DNA, 2019 bp, Escherichia coli
atgcttaaatttcgccgcgatcttaacggttacggtggagttattaacgaagggcataacgatcaatacgaatttgaaattgctttctccagtgaacagccttatcagcgccaattctgggatgagcaaaatcaagagatggtggtactagatgaaattctggtacatacaccggaagcggttgatctgtctcgtctgaataataacgctccgttgctgttcaatcataatttcgataatcacattggtgtcgtttgtaacgctcgaatcgatgcggataacgtaggtcgtgctctggttaaattctctaagcatggcactttggctaatgatattcgcaataaagtcattgaaggtacgatggaaaaaatttctgtcggttatgacattaaagaatatcacatcgactacaccaaaggacaattgattgttactaagtgggcaccctatgaactctcatttgtcaccgttcccgcagacgatacggtcggtttaaatcgctctctaaatactatcacagttaatttggaggctaaacgcgatatgactaaagaacaaatcgaagaaatcaaagaagaacaagaatccgctcaggttgaagaaactccggtagaagaaaataaagaaccggaagttgaagaaactcaagagcgccaagttgaagagaataaagaagatgaaaatctcgaagacggaaaagacgctgaacatcctgaaagtgttgatgatgatagttcaactgttcgggaaacagaagaagtaaaagaagaacgtgaagctgctccggttgaagaagaaaaaaccgaggaagtggctgaacgttccgaagaagacgaattagaaattcgcgaaattgcacgcgaactaaatattaacgaagacgatgaagaatttaaacgcgcattgacaaataaagaaattacgccggaagcattccgcactaaggcactaaataatctcgtcaatgctcaacgtaataacgaacaaattaataaggaacaaaacatggaaaaaactttcgatcttaataacgtaatccgctccctggtagatggcgaagctctgggtgctcacgaagccgagttttctgcaatggctgctactgcaactatgcagcgtggtcgtgctgctcgcggtggctctgtattcgttccgactgctgctatgcgtgctgctgctgatggtaacaccaaagctactctgaccgctgtaaccgacgaaaaactgctgaatgattcctatgtagcgatgctgttgccggaatccgttctgggtcgtcttggtgtgaaagtcctgtctggtctgacttcgccgaccgctattcctaaaatgaccgcttccagcgttgaatctttcggcttcgttgatgaaaacggtgctgcgccggaaggtaaagctgaatttgcaaacgtgaaaatggctccgaaaacttttgctggtggcaacccgatcagccgtcagtctctgaaaaccgttccgggtatcgctaccctgatcactgatcacattaaccaggctgttcgcatcaaactggaacaactgattctgtctgataaagataatgctcgtggtccggctggtctggttaaacaactggtagacgctagccgcgtgactaagaaaaccgctttcagctacaaagacctgttgaaagagattgccgcattgaccgacgctggcgttcctgctcaggcgatcaagttcgctatgagtggtgcaactgctgctgaactggaatctaccccgaaatctgatcgtggtgacgctcaaggcttcattatggaaaacggcaaaattgctggttatgaagtagttacttctggtgttattccggtagaccacatcgttctgggtgacttctccgctattaccatcggtgaatggggcggtcttgagctagatctggacgattcaacctacagagcacagggcgcgatcgttccgcgtatctgggtagatctggattacgttgtaacccagccggaagcgctgaaagttcttcacatctccgctgaatga

SEQ ID NO: 35152 - DNA, 834 bp, Escherichia coli
atgaatattacacaagataacttagatattttcactggatcacatgttgaagtgtcgatctctaaccagatagacaatcaggtcgactttttcgatcctagctttagttctatggagaacatcgcagcattccctacgctaaccgaatccacagagattgaaactctggaagagtacgatcaggacgctacggggaaacttgctggttatcgtagactggaaccgacgacactcacattaaaccgtgttcttgacgatgaacatcaagcaatgttgatgaaagcggtagaggataaaacacctttacgcttccgtatgttctatgttgtgaactctggctatagtgctgctaacacagggtacttttgtatattcgatgcttacgtcacatcacataaaacccgtggtagtgataacaaagctgtaacactggaatttaaacttgaaccagatggcgggattctggcaaggggtattgctaccgaaggccggatcttacgtcagggtgattttggtttgggtgctggtgtaaatccattcacaggtccgattgacagcgaggcattagccggaaaccgtttcgtaacttacaagggaactgctagcggtaatccatattcaaccgacacagcattaattcaccttcaagctaatgagcatggcgcatggcaattaacctgtaatacttctggcgcaccgcgtttacgtgttcgaaatattcaggaaaacggtcgttctgaatggatcaaggtatattccaccaatgagaaaccgacacctagcgaaattggcgcagtggctaagactgaccggatcgatttcggcgaatactaa

SEQ ID NO: 35153 - DNA, 3528 bp, Escherichia coli
atgcaatcaatccaatttaaacgcacacagacggctggtaaaaagccgacgccggaacaattatcacagggtgaaatcgccttacagttggcggatcatgtgatttacaccaaagacaaaaataataacgtagtccaaattagtgtttctccagaaaaacactctgaactgaatacgaaagtagacaataacaaaactagcactgaccgtgttattgcttccaacaaacaagaagccgctaataatctggctagtgctaaagctgaactgaatcagactatcacttctacccgtgatgctctcaatgcttcaatcactgctggcgacaccgcagccaacaaacgaattgatgctttgactaccacagtaggtaacaataaaaccgaagcggctaacgctctggctagtgctaaagctgaactgaatcagactattacttcaacccgcgatactatcaacgcaacaattaacaagaacaagacagatattaatgcacgagttgatcagactaataccaacgttactaacttaacgaatactgtttcagcaaataaatcagccatagaaacgaccgtagcaaataataaacgcgatgccgacacgaagatcaccaatcttacggggacagttaatagcaaccatacagcaattaacaacaaggtagaccagaataaatcttctactgatgccgcaattgccgcagctaaccagcgaattgattctattgaaggtagtgccgatgctgcttacatcaagaagaataccaacacttaccatcacggctatctgttaaccaaaacagctaactattttgatgatgctggtgctcgtaaccttgattattttggtgcattccgtccaaacaatgccgaaggttggggtaacttaatccttaacattcctcattctggcggtaaagcacacggtcgcggttttgagttccactatgggtctagctcatctcaagttaaaacctatggctttgataaagatggtaataagcgattcagctaccgcatgtatcacgaaggtgataagccgactccgactgaattgggtgtgtatagtaaagccgaagttgatcagatgttcgttaaacaagttcatatgtcaactggtgaaaatgcggttggttactttaaactggcaacggcaacaatcccgcaaggtggtcgaggtggattcattcgtatctatggtggtaatggttataacgttaatagtcctgaccagtgcgatattgtagaaattgtcatccgttccggtaatggaaatccgaaaggtgtaaacgttgttgcttatcgtcgtaatactaataacgagtttgaaacctttgcggttaatacttctggtgataactatgatatctatgtgaaatatcgcaaatacaccgataaagttactgtagagtacggtaaaagtgctgatgtttctttaagtgtatatttcacacctgaattaactctcgttaagccgtctactggtgttaacgaaggtcgtgttattaccttgtttaacactgaaaataaacgcggtactctgtcttttgataataactcacagacgacttacgatattatcagtttgagcgccgcacaggaccgtaacaaaaaatatctgcgtaaattccgtagtcaagcggtagagaccatctggcatgaagttgttaacggtagttcatatcgtttagctactggtgttaccgattctactgatgtttttcagattgattctactggctctgttgctggtccatataaaggcaacgtgactactggacgtatggaattaaacggtggtagtaatgcattaactttgcgtcgtccggctggtcaatctaaccacattgcgtttcaagataatcgtactggagatattacccgtcaaggatggatcggttatgcaaacgctgatactaacgtttttgaatggtatagcgatgttggtggtacttctattcgtcaccacatcgacggacagatcgaacttgcaacaggtagaacaaaacgagtttatactaacgctcaattcatctcaatgaatagcgacgcctaccgcatgatctacggtaattatggtgcattctggcgtaatgatggtggtaaagtttatcttctttctactgccgaaaatgataaattgggcgggtggaatggaaacagaccgttcatttacgatttgactaacggtaaagttactttaggcggtgatggtaacgaaggcgcattagttctcgaaagagatagccgtgctgcccgttttagcaacaacgtattcttagaaaaaggattgcttactttctctgcgggtgggaatcagtcaatggattctttcacgattaaccattgggggaatagtaacgctggacgatataacgttttgcaattccaggacactagcggaactcactttaccactgaacgtaacggatctggcggtttgcttgctcacttccgaggggatttaactaccgaaggaaaattaacgtggggtaagggtacagctacttctagtttcaatattcgtgcatggggcgctgatgctcgtaaacaagtatttgaatgtgctgatgaaagtggttggcattggtatacccagcgaccgggcggtcctggtacttctactattgaatttgccatcaacggtactgttaagcctcaagcaattcacactggcggcaatattcttttgaacggtgctgatattgaatttcgtcgcactggtaataagcatatctggtttagagatccaactggattagaactaggtttgatgtattccgatgatgctggtgttattcgcttccgtggtcagaaacaagcccagacgtggaaacttgcggataagatgattcatcttgaggcgggtagtgttggtggatctgataaaggtttgattcgtggtaacgtttctggtggtagctgggctagttggcgtgaccgcgcttccggtattcaggtcgactgtcctcaatcaaccgattctgctcataacatctggaaagcgacacattggggtaaatatcacattgcagcaatgggtgtgcatgttcctagtggtactatcggcaacgctcttgttcgtttgcatgttaacgatacaaactttgactttaacgctgctggtgattttaccgcaggtcgtaacggtagctttaatgatgtttacattcgctctgactcccgtttgaagattaacaaggaagaattacaggacggcgcattagagaaagtaaactccctgaaagtctacacttacgataaagttaaatcacttaaagaccgtagtgtgattaaacgcgaagtaggtattattgctcaggatctggaagaagtattgccggaagcagtaggtattcaatccaccgaagatccagaacatccagaagcaatcaagactatttctaactctgctgtcaatgctttaatcatcaaagcaatgcaggaaatgaccgctaagtttgatgctatggctaaagaacttgccgaaactaaagctgaattagccgaactgaaagcaactaaataa

SEQ ID NO: 35154 - DNA, 477 bp, Escherichia coli
atgtctcaacaattcaaagatatttttactggtggtttggtaagtctgttctatcacgctgataccactaacaccgatcttgctgatgaagcatacgaagaaattaaagagtgtgctggttggccttcctactccattgagaggggcacggttgaggttaagtcgttctcttctcagtataaccgtaagctggttggtaaactgaacgttcctgatctggaactggtgatcaactacattccgggtgatgcggtacacgagaagctcattaaagctgccgaagacggcactcgaatccagattaaagtagagtattacgtatcagcggataagcagactggtattcgtactgcatttaacggattcatttctaaagtcaatctgactggtgatgacgagagcgtcgtacagcgtgaactgacgtttgcggttgatggcaagcccgttccacagaagatctttactgttggtggatga

SEQ ID NO: 35155 - DNA, 1269 bp, Escherichia coli
atggaaattaggtcgctgtcagtgattcgttttgctaaagatattccctttgttaagaaagcacacaattcaaaaagtccgtttgagtttgaagccagctttattgagttgggtaagcctcgcggtctaatctattgtggtttggttggtgatttctctggcaggaaaactaaagcgttaatgaaatgcggaatcatcaagcacaaatatttttctttgatcatcggtgacttaaaaaaaggtagtgggtgtcctgaatgtggcatacgcctgattaagtcaaaacagaaaagtaatgaaggtgatgttgttagagaaattgacgaagagtgtgctagaagaggcaatataaaatttatcggttttgaaggtggttatgtaaatgttaaggagagaaacttaaaacttgagtgtttattggggcatggtgaacatctcactagtttagttctttttcgccgtgggcgtgggtgtcctacttgtagtggtaatagaagggtggaaaagaactccataccatttgatcaaatcatgaagatggtaaatgacttttgcttatctaaaggtaatataaaatttgtttgttttgaaggtggttataagaaggttgtggaaaataatctttgtttagaatgcacccgccacaataaagaatttaaaacgtcggtttctcgtatatctgctggtaaggctggttgcggggaatgtggtattgaacaaagagcgaatagtcagaaagtaggtgagcaaaaagcacttgctgcggttatagctgaatgtgaatcgaaacagacttatgctaacccgttgtttgttggtggttatatcagaaaccacgaaagaaatttaaaaattgattgtcttgaatgcggtcaacctttcatgacgacctatattgattttactaatggtgttggttgtccgttttgtattaaatgtggatttagacgaaataagcctggttatgtgtacatccagaagataacaggtgatgttaatgctggtaagattggaatcaccaataaaacaccagaaaaacgaatggttgaacataaaagagcatcgaaactaaatcatgagattatcttttcttactactttgaagacggtaacaaggtgtgggaaattgaaagactggttaaatccactctcaaagataagatgcggtttgttcctcgtgaactaatggaggacggatacacagaaactttcccgattgagttactaacacctgttttgaatgaagtaaaatcaatttgttgtaaataa

SEQ ID NO: 35156 - DNA, 507 bp, Escherichia coli
atggcaaatgtcgttaataagcccggctgggtcggatcatcggctgtttctgtaactggcaagcgatggatgcgtgaggctatgcaagcgttaaaagttggtgtacctggtaatatgagtgcgatgtgtggtcgtggtatggatacggttgtagctactgctgcgtggtctacttcattgggtaataactggggtgtaactgcttcaaactatccagtaactgacatgcgcggtaaaggatctatggagaaccccgaaaacgtgggcgtagggcgtctgattggcgttatcgttggtcaattcaatggtggtactcctactatggctgtatatctccagaacggtagagcggggaatataaccgttaatttgggtggtgctgctgtcactgttccttataacagtatgcaaagtggttttcattactactggttaagcaatcctccggctgctttccttaccaacattaagaagactggcactaagcagactttgaaaatctcttaa

SEQ ID NO: 35157 - DNA, 2433 bp, Escherichia coli
atgacaaaacatatagtaacaatagaaggggataataaaggtctaaggagaagtaccaatgaagccgccgaccttctcgatagtttgtctgaaaaggcaagtaatattgattttggtggtggcttatctggtctgactggatctcttcgtgggatcgctggctctgctggtttggctgctggtggtatcggcttagttgcgaccgcagtggttgcagccgctaaagctggcgcggaatacgttaaacaatattcagaagtatctaaggcgaccggactctcgattgaatcccttcaaagactggaaaaggaattttctggcactggcctaacagttgaaaaatttggtgatatcaacaaagacaccttagataaaatgggtgatgcatgggctaacggtggtggtattgctgatgacttagaatcggttggtcttaagttagaaaactatgctcacttcatgacagatccgcaaggtggtatgaaagcggcgatccaagtgttctatgacatgaagaaagccggaaaatcaatggctgaaatcaagttcatgatggaatctttagccagtgattcaagccatatgaccagccagcttgagaaatataatagtgctcaagaggcgatgatcgctattcagaatcaatctgttaacgtcaccgaagaaaacgctaaaaaatatgataaattttctcagaatattaataagctggaaaataacctgaaaggtgtcggcatgaccattactggtcctttggttgatagcttaaactggttatttgactggtttaatattgattgggaaaagagttctctattcagggcattagatcgactgaataaagaaggcaagaccgcaactggtggtattcttaacaccaaccataaagacgctcaaaagattattgacaagtacaataaagaaaatcgttggaataatctggcagattgggaaaaggccgcgatccgtggtgctggtgtcgatcctcgtactgctggctttgatgtggaaggatttaagaaacgttttggtgggtcttataaaacttcaagtggtgctctgattgtcgtagatgcaggtgaacatctgacacgcaaggcagatcctaacactgatttgagtataccaaataaaccagtaagaccagaatcattgggtaaatctggcaacgagaagaaagaagaggaaaacgccaagaagaaagcggaagaggcagctaaaaaggctaaggaagccgcagaaaaagcacagaaagaacgtgaggatgcaatcaagcgactgaatgcacttgatgttaaattgcaagggcaggtcgccgcttctattgcttctcaaaacaagcagttagaatccagcttgaaagatttggacacggctttagatctgggcttaatctctcagcaagacgcagccgcgaaacgccaatccttaatcgatcagaatactgaaaacgtatacaagatgattttaggtgctgatccggttgatgctttgaatgccttaacacaattgcaacaaatcagggacaacgagttagaaagccataaacggttacttgatggcaaggctatctcctacgaagaatatatgcgtcgtgtgaacgataccgagcaaaactattctcagattgaaaattctttacagggaatggatggttttaaaaccaatcagttgaccaatggtttagactatcaggactcgaataacccgtttgctaaatttaatgcaatcgataaagagaaatcggaagccgaacaagattataaaaccgataaactcaagattgatgggatcaccgatccggctaaacggatggctgcattagaaaaactcaatgaaaaccatcaaaaacgaatggctgcaattgagaagaaatatgctgatgctcgacagtcaatagccgatgatatgtatggcggttttgctgctgcaatgactctcttcgggcaggaaaacactaaagctatgcagatggctttcaatgctcataaggcattctccattggacaagcgacggtgaacatgtggacggctgctaccgatgcatggaacgatccgaccaacgtcaccacaggacaaaagatcgctgctgctgcattggctgtttctcagaacatggggaacatcgcaaacatcaagtctactaacgttagcggtatggctcatgatggtatcgataacatcccgcgtgagggtacatggttgcttgataaaggtgaacgagtagttgatcagcgtactaacggtgatttgaaagacttcttatctgctcaaaaatcaggcggtggcaactctcagccgattgaagttaatgcgcctttgaacattaacggcaacgttaatagctcagacaagatggtcatggatgctatcaaacgtcacgctaagttagttgctcaggcggtagaagacgcacagcgccgtaagatgtaa

SEQ ID NO: 35158 - DNA, 654 bp, Escherichia coli
atggcaactattcaagaatcattcagcaaactatgcaccaatctggacttcatcgaggtctacaacgaccagacagggcagaatgtatctagattgacgctaccgcaacttttctccactggatcgatgtttcacattatcgaagcagtcaccgcgtcaggggacgttctacggcttacagatgggtatttcgatttggactataacggttttacgtatctcgcaacgggtgattttcttcaaatctcatcgaataccgaagagaaggagatcaacaacaacgggatcaacgtaactgtttctaacgttcgcgaggaatacattaccttgattcgtaacaagcaattcgataaatctgatgtgaaaatcgagatggttttcctgaaccctaacacgggcaaggttgaaaccacttaccctgttttccgtggggtagtcgattccatcgggattaacatcgaacatgaagatgatgagtgtaaaaacgaatctgaatttcagcttaatagtatctgggaagttctagataaaaacgctcgtagtcatgcctccgatggtatccaccgttcctatgttggaaacgagaacgatctattcttctctcgtgccgggaagtggaatagcgaaagccgctggcattcatcgaagaaataa

SEQ ID NO: 35159 - DNA, 3783 bp, Escherichia coli
  misc_feature (3604)..(3613): n is a, c, g, or t
atgggatttgaagtattggtaggcgcggttattgctggtgcttcggcggggatggcggcagccgcaacattttcggttatgaccgcagtcgctatcggtatggctgctggtgcaatgactttgatcgcttccactgtaggagcaccaaaaacaccgaaagtacaaagcccagataatgcggtgacactaggaacatcaaacgatcctaagacagtattacccgttattttcggtactacccgcacgggtgcaatctgcgtttacaaagcaatttccaagcaagaaaacaataagttagtgcaaatcttcgctattgccgagggtgaaatcgaccattacaaagcactgtttatcgataacaaaaatgttcttgttggtaagaacatgacgatccgtgatggtgtactggacaaaggcaacattaaagaagaatatcggaaagtcttagaagttgagttccgcacgggtaagaatcctaacaccgctttgtcactggcaaaacgtcatttaggatcagactggaacgacaactacaaaggcaatggtattgcaaccatgtgtattgtgttacgccgtgatgacaaatctcttgctgctggtgttgatattctccagccaaatagccaggtagcagtcgatgttatgggcttaaagattcgtaaccttgaaactaatgctattgaggctagcactaacggcgtggaccagattttccactacctaacaaatgaaaaatatggtttatcagtaccaattgaaaacatcaacgttgattcattcctgaaagtacgtaaacaagtacgtcagatggacctacattcaaacggtgcatgtgatccgaacgccagctttaaagagaacttgaccagtcttatgcagactttcggcggggtgatgttcgaatcctttggacgtattactctgaaactggatgctcctgatattgttaagcataccttcaatgaagacaatatcatgatgggtaaggtatcactgaaaacaggtggcactaacggttatttcaataccattaacgcaatgtatcaggaaccatcaatcgactattccgagcaaatgctacgttatccggctgatgctgaaaacgatgctactattcgtcaagatggtcgaattatcgctaaagatattgaatatcgttttgttaagtctaaagcccagattgataaacttgcgagtattgaacgaaataaatctcgtatcactcaggttatcagctttatgactactgacgcattcactgccgaagtttgggacgttatcagcgtaacctatgatgaattaaaactgaataattcactttggcgtattactgcaattgatcgctctattgattctggtattgctgggatgatgacgatcaccgccacagaatataattctcaggtttatactgacctgaactatgcggcaactccagacaatagaccaagtggtttaccggattcaatgacagtacagaagcctactaatttcaggattaaggcaactggtgagacgatttacggtaaaaacgttactttgacatgggatgcaccggaagattttaaccgttatggtttccagattgattaccgtgtaagcggatcgcctaactggattaagctgggacagacttcacagcaaattttcagtgtcaatgcactggcgaaagatcgctcttatgattaccgagtttgtgctttcggtatcatcgctcgatccgattgggtagaactgattaaccagaatcctactgttacctatgaattgccgactccggttattcgaatcaaaaatcagggtagcacgccagggactttcgaaggtaatgatctgattatcgaatgggaaaatcagcaacaattagatgttgagatcaacggtgaaactaacaagtttagtgacctgtttgaagcatacattatcaaggtgactaacaaggctggtaagtctattcagtaccgtacccgcgatcctgaatcatggacttatacgcttgatatgaaccagtttaacggcctttcgcgtcaactgacggtagaagtatcggctaagggctataacaactcagagagcgccccagcgcgtttagtggctatcaacccacaacataagccaatgaaaggttttagtgcgcgtggtggctttaatactgcgtttgttagctgggcggatgacgtagaacatgattatgcagggtcaatcatccagtatgcaaccgataacactttctcagatgcaagggcggtaagcacgaatagtgttagccatacttcctttgatttggcagacggtgattattatatccgtggtgctcactacgatattttcggtatggatgatgctgtttggtctgaaccgtatttcatgcaaatgaaatctaccattagctgggacgatcaggacaaagaagcactggaagacctgattggtttacaagaccgcttagatgaaactatcgcggatgctattgctcaagctggcgctaatgccgatgctaaaattgatgcaatgcataagcaaatcactaccgaaacagggcagacggtccaagcctcagccaataccttaaagagtctgattgctaccagcgagcaagctagctccactaagattgatcaggttaaagctgaactgaaaggcgatattaaatccgaagtcagcgcatctgctactaccctgaaacaagcaattgctaccagtgaggcagcaagcgcaagcaagattgatcaagttcgggtagaaatggatggcaagattgctggcgtgaatcaggaagcagatgtaaaaatcgatgctttgaaaggaaccattaacagcaaatataatctggcagttaatgcagatggtcgcgtggctggtattcacatgagcgcaaccaacgatccggcgcaaccgacgagaatcatctttaatgctgataaaatcgcggtagctccacagaacggatcggaagtatgcccgtttggtatcgaaggtaacaaggtttatctcgataatgcgatgattcgtaatgctgcaattggtacagcccagattaatgatgcggcgattaccacggctaaaatcggcaatgctgcaattaacagcgcgaagattcaggacggggcaatcactaacgcgaagatcgtaaacggtgcaattgataacgccaaaattggtaactatatccagtcttccaactggaacggatctaccggatggcatatcaacaagaacgggtccgctacgttcatgaacgctaccgttaaaggtaatatcacggctgattctggtactctgaacaacgtcacgattaactctagctgtgttattaagggtatgcttgaagctactcaggttaagggtgatttcgttaaggtgattggacgtaagttcccgcatcgtgatgttaacgttgataatggttatgctggctatccacagggtacggtcactgttcgcgttgaagatgatcacaagttcgatcgtcaaatcgttattccggcaattagttttggtggattgcgagcgcgtgaagggtcgaacaataatacctattacgacacctgtcgcctgattgttcgtaagaatgggtcagagttgtataatagggcgtatggcnnnnnnnnnnatactggtctttactcaggtgttattgatatgccagcgggtaagggtgctgtgaccttgacctttgaagtgcaatcaagcgcaatcaacaactggacgcctagcacatggatcagtgatttaacggtaatggtaactaaaaaagcaactaccggtattactgtttcttaa

SEQ ID NO: 35160 - DNA, 3693 bp, Escherichia coli
atgggaaaaggtggcggtaaggcacacacgcctcgtgaggcgaaggataatctcaaatccacgcagatgatgagtgtgattgatgcgattggtgagggaccgatagaaggtccggtgaagggactgcagagtattctggtgaacaaaaccccgctgacggacacggacggtaatcccgtgatacacggtgtgactgcggtctggcgtgccggggagcaggagcagacaccaccggaaggctttgagtcctccggagctgaaaccggactgggcgtggaagtgacgaaggcaaaaccggtgacgcgcaccattacgtccgcgaacattgaccgcctgcgggttaccttcggggtgcagtcactggtgcagaccacgtcaaagggcgaccgtaatccttcctctgtccggattctgattcagttacagcgtaatggccgctgggtgacggaaaaggatgtcaccattaacggcaagaccacctcgcagttcctggcctcggtgattctggataatctgcctccccggccctttaacatccggatggtcagggagacggcggacagcaccacggaccagctgcagaataagacgctgtggtcgtcatacaccgaaatcatcgatgtgaaacagtgctacccgaacacggccattgtggggctgcaggtggatgcggagcagttcggcggccagcagatgacggtgaactaccatatccgcggtcgcatcatccaggtgccgtcaaactatgacccggaaaaacgcacgtacagtggtatctgggacggcagcctgaaaccggcatacagcaacaacccggcctggtgtctgtgggacatgctgactcacccgcgctacggcatgggaaaacgtctgggggcggcggatgtggacaagtgggcgctgtatgccatcgggcagtactgcgaccagacggtcccggatggtttcggggggaccgagccgcggatgacctttaatgcgtacctggcacaacagcgtaaggcgtgggacgttctcagtgatttctgctctgcgatgcgctgtatgccggtatggaacggccagacgctgatgttcgttcaggaccgtccgtcggatgtggtgtggccgtacaccaacagcgatgtggtggtggatgataacggcgtgggtttccgctacagcttcagtgccctgaaggaccggcacacggcagtggaggtgaattacaccgacccgcagaacggctggcagacctccacggaactggtggaagacccggaagccatactgcgctacggacgcaacctgctgaagatggacgcgttcggctgtaccagccgcggtcaggcccaccgtgccgggctgtgggtgataaagaccgaactgctggaaacgcagacggtggatttcacgctcgggtcacaggggctgcgtcacacacccggtgacatcattgaaatctgtgataacgactatgccgggaccatgaccggcggacgtgtcctgtccatcgatgccgccagccgtaccctgacgctggaccgggaggtgacactgccggagaccggcacggccactgttaatctgattaacggcagcggtaagccggcgagcgtggccatcaccgcacaccccgcgcctgaccggatacaggtcagcaccctgccggatggtgtggagacatacggtgtgtggggactctccctgccgtcactgcgtcgtcgcctgttccgctgtgtctccattcgggaaaacacggacggcacgttcgccatcacggcggtgcagcacgtaccggaaaaagaagccattgtggataacggggccagctttgagccgcagtcaggcagcctgaacagcgttatcccaccggcagtgcagcacctgacggtggaggtgagtgcagctgacggtcagtatctggcacaggcgaaatgggacacgccgcgggtggtgaagggtgtgcgcttcagtctgcgtctgaccagcggaagcggagaagacagccgtctggtgagcaccgccatcaccgcagacacggagcaccgtttcagtggtctgccgctgggggaatacaccctgacggtgcgggccattaacagctacggccagcagggcgaacctgcgaccaccaccttccggattaacgcgcctgcaaaacccgccaccattgagctgacgccggggtattttcagataacggcggtcccgcgtcttgcggtgtatgacccgacggtacagtttgaattctggttctcagaaaaacgcatcacgaacacggcacaggtggaaaaatctgcccgttatctggggaccggcagtcagtggactgtccaggggagccggattaagccggggacggatttctggttttacgtgcgaagcgtcaacctggtgggaaaatctgcttttgtggaagccagcgggcagcccagcaatgatggtgaagggtatctggaaattttccgggggctgatagatgagacgcttctgggccaggcactgaaagagcgcattgatgcttcagcgctgcgtacggaggtcacgcaactggaagaagacatccgtcagcggatggacacggatatcgcagaagtgacccggaaaatcggggaggcggaaaacagcctcacgcagctggttgcgaaaaagaatgaggaccagacactggccatcgcgcaggtgagccagaaagtggaccgggtgagcagtgaaatctcacagactgtcagccaggggcagtcagaaaatgcccgacagatagcacaggtccgccagtacgtggataaaaaagggagtgaaattacctcgaccacggataaaaaactgggtgaccaggccgtgaccatacagcaaatccagcgggttcagtcagacacgcgcaatgagctgaatgccatgtatatgctgaaggtgcagaaaacaaaaaacggtattccctatgtggccgggattggtgcggggattgaggatgttgatggtcagacgctgagcagtattctgctgcaggctgaccgtatcgcgatgattaccccggagaatggcaacaccacgccgctgtttgtggcgcaggggaatcagctgttcatgaacgacgtgttcctgaagcgactgtttgcggtgagcatcacgtcatccggcaatcctcctacgttttccctgacgccggatggcaggctggcagcccgcaatgcggatatcagtggagccatcacggcgaataccggcacgctcaataatgtcaccattaacgagaactgtgtcatcagagggaaactgtctgcaaaccagattgaaggcgatctcgttaaaacagtgggtaaggctttcccccgtgactcccgtgcaccggagaggtggccatcagggaccattaccgtcagggtttatgacgatcagccgtttgaccggcaaattgttattccggcggtggcattcagcggtgccagacatgagcgggagaataacgatatttattcgtcatgccgcctgatagtacggaaaaacggtgctgaaatttataaccgtaccgcgctggataatacgctggtttacagtggtgttattgatatgcctgctggtcgcggccacatgacgctggagttttctgtatcagcatggtgggtaaatggctggtatcccacagcaagtatcagcgatttgctggttgttgtgatgaagaaagccactgcaggcatcacgattagctga

SEQ ID NO: 35161 - DNA, 240 bp, Escherichia coli
atgatgcagggggtgtttgtcgaagttcaccagattttcactaggatgcacgtcatactcttttttctccggaggcagtgccagcatggactgctgctcttcgagccagcgatcgcagggacgggcctagattgtttcatgctttcgttggttagcgacatcgtgcagccagcgcagaccgtggcggttggctgtttcaacatcgacagtgatccccatcgggcgcaggcgagtcattag

SEQ ID NO: 35162 - DNA, 285 bp, Escherichia coli
atggctacttttattacctatgctgtcatcattactattctggctgttatttctgcttataaactcggaaccgaaaatagagagcgtgctgaattattcttaggtgcgtttgttgcattttctagtctcgcgttaattgtcgaagggatttcttatattgttggtctagttagtatgacactttttaacttccatccggctatttctatgcatctactgcttactgtatgctgggtatattgcttaatcgaatttttaacgtttgttttcaaacagactaaataa

SEQ ID NO: 35163 - DNA, 183 bp, Escherichia coli
atggcacgacctgttaagttcactcgcgaaatcatcttagaaatggctaaacgctactttgagttaacgccgggtgtgagaattgaagagtggtttaaaaatgagggcatcgataaatcaacctttcataaactattaaagaagtatgatattcgcgtaaagattaccgcagaggtgtggtaa

SEQ ID NO: 35164 - DNA, 1152 bp, Escherichia coli
atgagacgaacatttacagcagaggaaaaagcctctgtttttgaactatggaagaacggaacaggcttcagtgaaatagcgaatatcctgggttcaaaacccggaacgatcttcactatgttaagggatactggcggcataaaaccccatgagcataagcgggctgtagctcatctgacactgtctgagcgcgaggagatacgagctggtttgtcagccaaaatgagcattcgtgcgatagctactgcgctgaatcgcagtccttcgacgatctcacgtgaagttcagcgtaatcggggcagacgctattacaaagctgttgatgctaataaccgagccaacagaatggcgaaaaggccaaaaccgtgcttactggatcaaaatttaccattgcgaaagcttgttctggaaaagctggagatgaaatggtctccagagcaaatatcaggatggttaaggcgaacaaaaccacgtcaaaaaacgctgcgaatatcacctgagacaatttataaaacgctgtactttcgtagccgtgaagcgctacaccacctgaatatacagcatctgcgacggtcgcatagccttcgccatggcaggcgtcatacccgcaaaggcgaaagaggtacgattaacatagtgaacggaacaccaattcacgaacgttcccgaaatatcgataacagacgctctctggggcattgggagggcgatttagtctcaggtacaaaaaactctcatatagccacacttgtagaccgaaaatcacgttatacgatcatccttagactcaggggcaaagattctgtctcagtaaatcaggctcttaccgacaaattcctgagtttaccgtcagaactcagaaaatcactgacatgggacagaggaatggaactggccagacatctagaatttactgtcagcaccggcgttaaagtttacttctgcgatcctcagagtccttggcagcggggaacaaatgagaacacaaatgggctaattcggcagtactttcctaaaaagacatgtcttgcccaatatactcaacatgaactagatctggttgctgctcagctaaacaacagaccgagaaagacactgaagttcaaaacaccgaaagagataattgaaaggggtgttgcattgacagattga

SEQ ID NO: 35165 - DNA, 450 bp, Escherichia coli
atgatcaatactaaaactcctttcattcttctgggtctgaaccatgatgataatctggctatgatgcatgttttcgctaatcgtggttataacatcattcgtcattccgaagactccaatttctcaactgctttctatgctcttaaacgtaatggtcgccctacggtgatcgtagactgctttactgatgaaggtcgtgaacaatacaacaacattccggcaattattgttcgtgatgacctgccttttgatgttcgtgaatatgacgttgatttaggctcttactacgggatcgcggatcttgaccagattatggctgattacggtaaacaacccgctaaggaagcccaagaacacgatgaagacgacgaagatgatgattacacaccaatcgcgttttcttctcacaatagcttctacggctacgatgaaggcttagaaatgctgtaa

SEQ ID NO: 35166 - DNA, 333 bp, Escherichia coli
atgaaagaatttaccatcactaaatccctgtatgactggactgttaaaatctccggcaaaaccgtttctgtaagccctagccatgtagaaaatgattggggcgtatcccgtgaaactatctcccgtagtatgcatgttccgtttgatctgatgtccttaactggtattcatgcaatgctggaagttcgcgagcaattcgaagctggtaatcacaatgcgactccagttagcaatcaccttcttactaatgaagaacgtgaaatcatcgaaaactggcgttatgaatatgcgattccttattatgaagaagaccaagtagaaatcgattggtaa

SEQ ID NO: 35167 - DNA, 258 bp, Escherichia coli
gtgattggttatgttggtgtgtactatcttaatattccccatctgacctggctcattattggcatcactatctggtttggtctggggacggggggggtatattacattccgtggagtgtatatgtattccttgccgatgttgatgaggtcttaactggtcgtcgtcgtgaaggtctttatgctggagcaatgataaatgggcgtttaaatcctcgtttggcacaccacatcataaagaatgctgtagagaagaactga

SEQ ID NO: 35168 - DNA, 489 bp, Escherichia coli
atgaaactggccctgacgctggaagctgacagcgttaacgtacaggcactgaacatggggcgaattgtcgttgacgtcgatggtgttgagcttgccgaactgattaacgtggtctgcgataatggctactcccttcgtgttgttgatgaatctgaccggacctcaacagacagcatacccccctctgctgccctgagcggtatacgctgtagtaccgcgcatatcacggaaacagacaacgcctggctgtactcgctgtcgcatcagacgaatgacaccggcgaatcagaatggattcattttacaggcagcggatatctgttacgtaccgatgcgtggtcatacccggttctgcggcttaaacgcctgggcctgtcaagaacgttccgtcgtctggtcgtcactctcacccggcgttatggcgtcagtctcattcatctggacgccggcgcagaatgtctgccgggtttacccactttcgactggtaa

SEQ ID NO: 35169 - DNA, 324 bp, Escherichia coli
atgactgtacgtcatcagacaggcagcaatgccggcggcttccgggctcatttcagcgcggttaccgttcatggcattgaacagtacccatgtttcgtcatcatcgtcatccggttcgggtgccataaatgccccgccgttgttcagggtgtacagattccagataccaccgcagtagtcttcatacagacggtccatccagccgaagacacggggctccagggtcacccactgtggaatgaggccaaaatgctgcggccagaagctgatgcgctgttcatcagggactatggtggcaaccaactgaggctggtcattccctga

SEQ ID NO: 35170 - DNA, 228 bp, Escherichia coli
atgactactaaagctactcgcggtcgccctgcccgttttaacgctgaacagatggctgatattgcctacgcttattatacagcggatcgtggtaaggaagcgaaagaacagattcttagtgaacatgggatctcaatcgcccaattctataagaatatgaagaagttagacattaaattctatgttcagatcggtgatggtcagatcgtagaagcaacaggtttttga

SEQ ID NO: 35171 - DNA, 768 bp, Escherichia coli
atgcaacgaaatcaggataatgagatttcgcatactgcttcgtggtatgactcttccgatcgaaataattcctggagcgtttctgcttcaggcgacaatgatgaattcaaagatatgaaagcgtcactacgcgccagttatcagcataataccgagaacggtcgactctacctctccggtacatcacagcgagacagttattattctctgaatgccagttggaatggttcattcactgcgactcgccacggtgccgctttccacgactatagcggtagtgctgactcgcgttttatgatcgacgcagacggcactgaagatattccgttgaacaataaacgcgcggtaactaatcggtatggcatcggagttattccatcagtcagcagttacataacaacatcattaagtgttgatacccgaaatctgccagaaaatgtggatatcgaaaactcggttatcaccaccaccttaaccgagggtgctattggctacgccaaacttgatacccgcaagggctaccaaatcataggggttattcgcctggcagatggtagtcatccaccactggggattagcgtaaaagatgaaaccagccacaaagaattaggactggttgctgatggcggctttgtatacctcaacggcattcaggatgataacaaacttgctttacgctggggtgacaaatcttgttttattcaaccacccaatagcagcaacttaaccaccggaacggctattttaccgtgtattagccaaaattaa

SEQ ID NO: 35172 - DNA, 930 bp, Escherichia coli
atgaaggtttggcttatttctcaaaagtggttctggaaattaagaacagatcttgtgagggttagatttattttagaacgtgcgtcatacatacatcgtacgtctgtttttaaagctaagtctaacgctcatgtttttatgtcttttgcgttggtaggtttaaaaaatttgttatgggtcatattaacgttatttgcactgggttttgttgaagattatattcggaataatacgattttgcttcatcctcttagctatgatgaaaaaaaatttaatattgatcaacttaggttgtacgcacagatacttaccgctatattttcaatatactttgctacaataggtatcattctaagtacaggatataccagacttcggcgagatattatacaaatgcttactaccgagcaggtaggtaatgtgtattcgcggactttagtgctttctgcggtgttttgtcttagtgcaactgctctccacttgttcggggttgaacccggtcttttcgtttatgcaatgggaacattgctgacacttgttagttccttagctctgttcccattaggtcaaagattattcaatttttttgacctaaatcagttagcccgaagtgaaatactcccacgaattgcacgacacatcgaaggtgcgtctaatcccaagaattcagtatctttagctaatcatcactctaaagccgcacatttggcctttgagcagttaaactacattgatgatcgcctgatatgtgaaaaagtaggactcggagataatttacctgctctcagtaatgtttattcggcattacttcttcattaccttaatcagaaacacagaattgattatcaaagttactggttccctagacgaataaaacataagcaatggttcttagctggcgacagtgtaacatctttggttagagaatga

SEQ ID NO: 35173 - DNA, 126 bp, Escherichia coli
atgaatattgaaaacttaaaaacaaaagcagaagcagatatttctgaatatataacaaaaaaaattattgaacttaagaaaatgacgggtcttgaaagctatgatgtcaagattaatttaatctga

SEQ ID NO: 35174 - DNA, 1092 bp, Escherichia coli
atgaaaaaaccaatacttttctcttttttttctggttcaggttttcttgacttgggttttgaacactcaggcttcaatgttggcttcgtaaatgaattccacgaggcatttctcaatgcttacaagcattcgagaataaaaatgaaaataaaagaaccatactacggatatcataatggtgatatccgcgatcttatatcaggagatggatgcatcgaattattgcataaagttaatgaggctaaaggagagtctttggtcggttttattggtggaccaccatgccctgatttttccgtcggtggcaagaacaaaggagaatacggtgaaaatggcattttgacgaaatgctatattgatgccatattgactcatcacccagacttttttattttcgaaaatgtaaaaggtttatggaataccaagaaacacagagcgttctacaaccgaatgaaagatgctttatctgaacgatacgatttaacagacagactgacaaatagtattgaatatggctctccgcaagatagagatagaatatttctttttgggatcaataagaaactatctgcaaacatagcagagtttccatggcagaagttcataaagttcgacagagatatcgctcttaataaagaaatttggccaaaccaaacaggtgatgatgccaatttcaaactggttcatgaatggcaacgagagttaacaataagtcactggttcaagataaatgacacagaaaaccacccaaacgcgaaaaagcatttcacaccaagaaaagggttaacaaagttcatgacaataagggagggagatgtaagcagaaagtcatataaaagactccatcgaaacagattctcgccaactgccgcatatggtaacaatgaagttcatatacacccataccttccaagaaggctatctgcggcagaggcgatggcactccagtctttaccaaaagagtttgaacttcctgatgatatgaccttaaccgacatgttcaaaaccattggcaatggtgttccatacctcgccgctaaaggacttgctgataccgtgtttgatttcttaaagaatcagaacattatctga

SEQ ID NO: 35175 - DNA, 858 bp, Escherichia coli
atgtataactctattgttctagataataatggacgggtggttataaacccggcgaatgtatttgttaatatggtcagggaaatgccgttgggctatgaagatagtctgtcagattatttattgcacattaaacaatgtgttcttcgcgaggcgaagaagcaagggtataccatatcagatggtgcgtttaataagtgtaatggagattggtatgagtggattatcgcaatcggagctatagatttttttaggagaaatggaacaaaaaaattactcgttggtttgccaaataaaagttcattcaacttgattgatctatataaaccagagttgaactattatctgtccgatctggccgataaactcaaattaaataaagtaaatttggtgacatcaaaccccgattttgtgatattagatgtctctagttatggagagattctgatggataagttgcttgatgtctctttttctcagatagatgtttcgactattaatgtcatcgattctctttataaactatttattggatatgctgatattgattcgatatatggttatctttctgtaaaaactacatttagacctgatcgacggttgcaactcgctcatgaaggaagtttaataaaggcgctttatgctcaccttcaaacaagaacgtggactatatctagcaatactgttagatattatggggcagcaacgcatattggattttctgatgctgatgcattacagacggttgcaacccattctataacggatgtaaagagtttaccccaaagagcagtggatgatttgttcagaataaactctcttattgaattggagcggtgtttgtctcagataatgttctga

SEQ ID NO: 35176 - DNA, 669 bp, Escherichia coli
atgatcgcattcaatcacgttgttccggtacttaatctgtcggtgttcaacgtcagacgggcaccggccttcgcgtttgagcagagcaagcgcgcgaccataggcgggcgctttatccgtgttgatgaatcgcgggatctgccacttcttcacgttgttgaggattttacccagaaaccggtatgcagctttgctgttacgacgggaggagagataaaaatcgacagtgcggccccggctgtcgacggcccggtacagatacgcccagcggccattgaccttcacgtaggtttcatccatgtgccacgggcaaagatcggaagggttacgccagtaccagcgcagccgtttttccatttcaggcgcataacgctgaacccagcggtaaatcgtggagtgatcgacattcactccgcgttcagccagcatctcctgcagctcacggtaactgatgccgtatttgcagtaccagcgtacggcccacagaatgatgtcacgctgaaaatgccggcctttgaatgggttcatgtgcagctccatcagcaaaaggggatgataagtttatcaccaccgactatttgcaacagtgccatatcaagcgacttctcctatcccctgggaacacatcaatctcaccggagaatatcgctggccaaagccttagcgtag

SEQ ID NO: 35177 - DNA, 747 bp, Escherichia coli; identical to SEQ ID NO: 23091

SEQ ID NO: 35178 - DNA, 762 bp, Escherichia coli
atggagactgtttttgacgcactgaaagcaatgggaaaagccacatccatagaacttgctgcgcgacttgatatcagtcgtgaagaagtgctgaacgaactatgggaactgaaaaaggctggttttgttgataaaatcgcgtacacctggcgtgtggctgataacaacgttcagcaggaacagccagagcaggcagaactgccggaagaaaccaccacggcaacagtagcgaaaatctcagagtgcgatttaaccgcgacgattgaacaacgtggcccacaaacggcggatgaactggctacgtttttcggcaccacatcacgcaaagtggcttcaacgctggcaatggcaatcagcaaaggccgtctgattcgcgttaatcagaacggtaaatttcgttactgcatgccgggcgatgatttaccagcagagccgaaagctgcatcggtaacggaaactgatggtaaagcctttcctcaaccagcaggtgttgcgttaccgggacaggaagctgcaacacaggaagatattaaaacagaaactgtggcggacattgtgcagtcgttgccatcgtttaccgaaacgcgagcggatgacctcgttctgccatcgctgcatatggcaaaccgcgaactgcgtcgggcgaaaaatcatgtccagaagtgggagcgtgtctgcgccgcgctgcgggagctgaacaagcaccgggatattgttcgacagattactgattcttctcgctgtgttgcatcggaaaagtga

SEQ ID NO: 35179 - DNA, 348 bp, Escherichia coli; identical to SEQ ID NO: 8336

SEQ ID NO: 35180 - DNA, 123 bp, Escherichia coli
atgggggaggcgatgctctatcagttgcatagtctgctggctgctacagcgctcggttttgccgattggcaccaactttctatttgttaccatttttcgccagtgggaatataccaacagtag

SEQ ID NO: 35181 - DNA, 645 bp, Escherichia coli
atgcctgaagtagagctatttataaaggatagatttgataaaatatttaaaaccaagatgttaaaatacttttggaacgtgattaaggaatattattctcaagttgaagtcaaagaaatctgggtggctcgtcgtccgcaagttgcttcatcggtattaatgaactaccaaacaccattatctggtttaattgatgattattttaaaaatttgccaaatgaggtaaagagcatttttgatgaagcactaaaaaaagctaatgatagtgttacgtctattgatgactatattcatcgtttgatcggttgcagagtcgcgtcgatttcagagcatgtccatttcgaaagtgaaatactgagtagtgaaaaggatgtgaaggatatgattaaaaattacatagagcaaagaaaaactggaaaaaatgcggtaaatcttgggcagttatatttctcgagtgagtcagatgtaattacaggtgatcagttgagtgatgcgatcgatgaatatgagaaaaagttggcacttatggcaataaacgataatgatgatagtgataacctattgtgccatatctatattaaatcatgtgagatagttgatgaatataagcgtgaaacattaaaattgggcgagtacgcacaatag

SEQ ID NO: 35182 - DNA, 555 bp, Escherichia coli
atgaagaagtgccatctcaatattttcgcatctctaataattgcgttaacactaacagggtgtaacgaatctgaaatagatgaattaacgttaataggcaaagataaaagtgaacttgaacaaaattataaagcccaattcaagaagctaacacaaaatgttgaagtgtttattcttcaagataaaaatagtccgactgaaaaagaaccgcatacgaatggcaacctgatcgacggaaaagtcgaaatgtcattaaccagtaatgttggtaagtatacattcatccagataagtgaaatgctgacaaaggagtacggaaaacccgttgctacaaaagatcgtgtttttaacagagaagcagtatctggcatggactgtattgaaactaaaacttgtggagctggtaaatattatgaaatctttcgagggaaggatagattgattatggtgtcaaacggtgccggtcttttacacgaaaaggaaggtgtaacactactcaccatcaccgataaacaatttaaattttctcgtttagaagaagataaaataaaataa

SEQ ID NO: 35183 - DNA, 1236 bp, Escherichia coli
atggaatcgatagaagtatttttaaaaaattttttggactcagatcatcgggttgctgtcataaaaggaaattggggagtaggtaaaacgcattattggaatagcttttatactaaacattctaaaaaattagattttaatgcatattcatatgtttctttgtttggaataaattctattggagacattaaaaaagctctttatcattgtgccacaccaattaatgaaaagaaatataaagaactgattttatctgaaacggatcgaactatgattcgttatagaaatgggttttggggatggttgaaatacaactccttgtcaaaatttttaatacattttggaaagaacgatttttttgggttcaaaactgataatctgctgtcatctcttgagtataaatttgttaataattatttggtttgcattgatgatattgaacgaaaaggtagtgcgctagaaattaaagagattatgggggtaattgatgagttggcaagaagaaaaaattgcaaggttgttctaatattaaatgaagataacttacatgaagaaactgcacaacaacagtttttagagtatagagaaaaaataattgatgtggaaataaaatacgatcccacgcctgagaaaaacttaagaaaagttttttatgagactgaccctgattttcttttgttaaaaaacctagtaaatgatttaaacatcaaaaacattagaatattaaataaaataaaatcatctctagttatatttagagatgtgctaaagttagcagaggataaggttagagaaagttttattaatagattggtcttattttcagtggtttactattttggtgttcctagcgttgattatgcttcatttaaggagtcaatcaaaaatatacatgcattcgactatatgttagatgataaagatgaaaaggaagaagttaactctgtatattcatttgttaatagccttgatgttatttatgaacgagcagaaagtgctttcgatgatgatatagatttttaccttaagaacggttatgtttcttctgaaagtaatattctaaatataataaaagaaaaaaatgaacaatatagagataatagggttttatgtgaggtttataaaatttgggatgtttttagaaactcttttaaagataatgaatcagagtttatttttcaaattgagcgcgtaattaacgatagtctgttgcgtctgtctcttatacacatctga

SEQ ID NO: 35184 - DNA, 147 bp, Escherichia coli
atgagccgacgggaaacggccaggattttttcgggaaacggctgcattcgcctttatgtagaaaaaaacatcgggaagctggtggaatccaaccagcggttgtcggacaggcgagcggggaaaattatgatgactttcgtcgcctga

SEQ ID NO: 35185 - DNA, 249 bp, Escherichia coli
atgcattcttcttttggtttgccatatcctgctggtcactggatgtattcgttatacgatttactcgacaattctgtgtttgtactttttttcttagtcttctgggtggcaacgggtcaatttttattaagagctgtacacaggaaatttaatatatctgaaacagttgagatggttatcatcgctttattagggatactaatgactctgtctttttatctttgtgcaattttaaaggcttctctttaa

SEQ ID NO: 35186 - DNA, 318 bp, Escherichia coli
atgatgtccattaagagttattttaactggaataagttattcgtgtttttagctgtggccttatactggttctggcgggttctttccagaagcgtaaagctgatgccattaatgctgttagttacactggtgatagcattttactttgtgcctgaacaacttctcactgatgttatcaatacatgggaaagtactactacagatgagaaaatcatcacggtaaggcttctcttaaaatccgcatttctcttgtcatttgcatcctgttttctggatgaacttattacatatccacaaaaaggtgaacataagttatga

SEQ ID NO: 35187 - DNA, 129 bp, Escherichia coli
atgaaactacttattgtggctttcgtgacgctttgtctggctggttgtcaggcgtcacataaactaccgcccgtttccgggaaaagcgaacctgttaattctgctgaggtaatgcaaaatggaatttaa

SEQ ID NO: 35188 - DNA, 252 bp, Escherichia coli; identical to SEQ ID NO: 9417

SEQ ID NO: 35189 - DNA, 219 bp, Escherichia coli
atgaagcacataactatgagtttcactgcctatgtgccccgcccattccagaagacgctctggcgtccaggtggcatgctgtcgatgagcttcaggcatgtgctcgttgcgggtactgtagccataagtacgcttgcgcgggtgcacagcaacctcctgcccctgattgaagagtcttaccagttctccggagatccatgcttccagttgctggcctaa

SEQ ID NO: 35190 - DNA, 696 bp, Escherichia coli
gtgcaatatctgttaagtcataatatcgttccttttatatatgtacttacagatgtccgctttttacatcagcgtcgtgatgatttttataaatttagccagagaagccgttataccatagtaaacgttgacgtttatgaacatgcttccaaagaagataaactttatatcctccagaactgcctcgtattacggtccttttatcgccgggaaaaaggtggttttataaagaagattaaatttaatatattgagtcagattcacaaagaactgctgatctctgtaccgttgtctaaaaaaggtcgtctggttggattttgcaaggacattagttttggttattgttcatgccatactattgcctttgctgcaattcaaatagcatattcacttaagtatgcacggattatttgttctggtcttgatttaacgggtaactgctctcgtttctatgacgaaaataataatcccatgccctcggaattgagtaaggatttattcaaaatcttgccatttttccgttttatgcgtgataatgtagaagatattaatatctataatttatcagatgatacagctatttcttacgatgtaattccatttattaaatttcaagatatcagtagagaagaatcaaaagataagacaagaaaaaaaatgcaatatagaacttcaactgattcttatgctaattaa

SEQ ID NO: 35191 - DNA, 135 bp, Escherichia coli
atggcccaacagcggttgctggataccatcccaggtcagttctgtattgaggaatgcttctgcgcgctcggtcagtttcggcagtaccggtttcaggtaagtcatcagcacgcggaacaggttgatgcccattga

SEQ ID NO: 35192 - DNA, 318 bp, Escherichia coli
atgctgggcgaaacccggcactacggtatacccgccacactgcggggcatggtgaacaatgacctgaagaccaccgctgaagccgtgctgtccctggtgaaagacggcgcgactgatggtgttcagatcgacccgacgctgttttcacagtacggcattcgcagtgtaccggcactggtggtgttctgcagtcagggatacgacatcatccggggaaacctgcgggtcggccaggcgctggagaaagtggccgccacgggtgactgccggcaggtggctcatgatttactggcagggaaaggagattccgggaaatga

SEQ ID NO: 35193 - DNA, 231 bp, Escherichia coli
atggtcacagaatataaagggaatataggtgatactcagaacagcatacgtggcgaggaaaatattgtaagaggacagtattctgaactgcagaatcaccataaaacagaggcattatctcagaataataaatataatgaagaaaagtcggttcaggaaagaatgcccggggctgacagtccacaggaactgatgaaaagggcaaaggagtatcaggataagtataagtaa

SEQ ID NO: 35194 - DNA, 423 bp, Escherichia coli
atgataaaacggacgttattagcggcggcaatttttagcgcattacccgtttatgccgggttaacttccattaccgcgggctacgattttaccgattattctggcgatcatggcaaccgtaatttagcgtatgctgaactggtggcgaaagttgaaaacgcaacgctgctttttaatctttcccaggggcgtcgtgattatgaaactgaacatttcaatgccactcgcggccagggtgcagtctggtacaaatggaataactggctgacaacccgaacgggtattgcctttgcggataatacgccggtctttgcccgccaggattttcgtcaggatattaacctggccctgttgccaaaaacgcttttcacgaccggttatcgctacactaaatattacgatgatgtcgaagtcgatgcctag

SEQ ID NO: 35195 - DNA, 558 bp, Escherichia coli
gtgcaccatagccgatgtgaaatgccgcacagatgcgtaaggagaaaaggcaacttccgacgctcttccgcttcctcgctcactgactcgctacgctcggtcgttcggctgcggcgagcggtatctactcactcaaaaacgaaatgctgttatccacagaatcaggggataacgccggaaagaacatgtgagcaaaagaccaggaacaggaagaaggccgcccgctggcgtttttccataggctccgcccccctgacgagcatcacaaaaaccgacgctcaagtcagaggtggcgaaacccgacaggactataaagataccaggcgtttccccctggaagctccctcgtgcgctctcctgttccgaccctgccgcttaccggatacctgtccgcctttctcccttcgggaagcgtggcgctttctcatagctcacgctgttggtatctcggctcggtgtaggtcgttcgctccaagctgggctgtgtgcacgaaccccccgttcagcccgaccgctgcgccttatccggtaactatcgtcttgagtccaacccggtaa

SEQ ID NO: 35196 - DNA, 315 bp, Escherichia coli
atgcagtcgctggtcctgccgccaccgacacgccaggcgctggcacaggcggcactgacttaccgttatggtgacgaacatcagcccgtcaccaccgccgacattctgacgccacgacgccgggaggattacggtaaggacctgtggagtacttatcagaccatccaggagaatatgctaaaaggcggaatttccggtcgcagtgccagaggaaaacgtatccacacccgtgccattcacagcatcgacaccggcattaagctcaatcgcgcattgtgggtgatggcagaaacgctactggagagcctgcgctga

SEQ ID NO: 35197 - DNA, 246 bp, Escherichia coli
atggcttttaaattcgactattatcttattgatgaaatcactgctgttggagacgcaaagtttaaaaagaaatgttcagatatattcgataaaataagagaaaaatctcatttaataatggtgtcacatagtgaacgagctttaaaggagtattgtgatgttgctatttatcttaacaaagaggggcaaggtaaattttataaaaatgttacggaagccattgctgattacaaaaaagacctatag

SEQ ID NO: 35198 - DNA, 252 bp, Escherichia coli
  misc_feature (186)..(195): n is a, c, g, or t
atggatgttaccgcaaaatacgaattgattgggttgatggcctatcccatccgccacagtttatcgcccgaaatgcagaataaagccttagaaaaagcgggattgccatttacctatatggcctttgaagtggataacgatagttttcccgcagcaattgaaggattaaaagccctcaaaatgcgnnnnnnnnnngaactggtgtatcaatgccgaacaaacaactggcgtgtgaatatgttgatgaattaa

SEQ ID NO: 35199 - DNA, 222 bp, Escherichia coli
atggggttaccgatggatctgtccgttcctgtgacaactggcagtcttcgtttaacttcacttaatttggctcttggggggcttaccggacagatgacgtacttacacctgtttaatttttcatcacttattgggatgaacacccataaccattttgtgcggcatgttaatccattaaaacaccttactgattggcaaatcatctttaattatgacttatga

SEQ ID NO: 35200 - DNA, 324 bp, Escherichia coli; identical to SEQ ID NO: 30477

SEQ ID NO: 35201 - DNA, 477 bp, Escherichia coli
atggtggaaatcaataatcaacgtaaggcgttcctcgatatgctggcgtggtcagaaggaacagataacggacggcagaaaaccagaaatcacggttatgacgtcattgtaggcggagagctattcactgattactccgatcaccctcgcaaacttgtcacgctaaaccccaaactcaaatcaacagcagccggacgttaccagcttctttcccgttggtgggatgcctatcgtaagcagcttggcctgaaagacttctctcccaaaagccaggacgctgttgcgctgcagcagattaaggaacgtggcgctttgccgatgattgatcgcggtgatatccgtcaggctatcgaccgttgcagcaacatctgggcttcactgccgggggctggttatggtcagttcgagcataaggctgacagcctgattgcaaaattcaaagaggctggcggaacggtcagagagattgaggtatga

SEQ ID NO: 35202 - DNA, 468 bp, Escherichia coli; identical to SEQ ID NO: 10143

SEQ ID NO: 35203 - DNA, 153 bp, Escherichia coli
atgccttcgatgatagcgataattttactcatcatccttcacatctggctctgtagacagggtgatgatcacttctggagtgaatccagattaaacatctcattgctgatgcttgatattgagcatcttgcgcgcagtaaggggctgcgttga

SEQ ID NO: 35204 - DNA, 525 bp, Escherichia coli; identical to SEQ ID NO: 10142

SEQ ID NO: 35205 - DNA, 243 bp, Escherichia coli
atggcagagattattcccatgactgaagaacagaaattccagttagagatttacaagctggtcatgaaccagaacgcagccgcagaagaagcatttcaattcatcggcactgacgagttgaagcttgagctattcaaaattcacttccagtcaggcggcgctaattcagatatcactacccgcactatcgaagcggtgcgtaaatcgaaggaagcgttatacctgttcaccaccggagcataa

SEQ ID NO: 35206 - DNA, 441 bp, Escherichia coli
atggcgcgcccaacaaagtatcaagaggcgtatgccgaacaggcacgcaaactgtgcttgctgggctacaccgatgcagagcttgctgatttcttcgaagtcagtgagtcaactattaacaagtggaagcttgattatcctgagttttcggagtccataaaaaagggtaaggccgtcgctgatgcagaagttagtgaccgtctttatcaacgcgctatgggcttcgtggctccagacatcgatattcgtgttattgaaaacagaattgtcgaaactccgcttgagaagtattacccgcctgatacaactgccgccatcttctggcttaagaaccgacagaaggataaatggcgcgacaaggttgatcacgagctaacaggcaaagacggcggcgcaattcagattgaaacatcaccgatgagcactctgttcggaaaatga

SEQ ID NO: 35207 - DNA, 1416 bp, Escherichia coli
atgacctcgattaatcctatctttgaaccgttcattgaggcgcatcgctacaaagtcgccaaaggcggtcgaggtagcggtaaatcatgggcaattgcgaggctgcttgttgaagcggcgcgtcgtcagccagtgcgtattctttgcgctcgtgaactgcaaaacagtatcagcgattcggtaatccggctgcttgaagacaccatcgagcgtgaaggatattcggctgagtttgaaattcagcgttcaatgattcgtcatctcggaacgaatgctgaattcatgttctacggcatcaaaaacaacccgacgaagattaaatcgctcgaaggtattgatatctgctgggtggaagaagcggaagcggtaacgaaggaatcatgggatatcctgataccaaccatccgtaagccgttctctgaaatatgggtgagctttaacccgaagaacatactcgacgatacctatcagcgattcgtcgtaaatcctcctgatgatatttgcctgttgacggtgaactacaccgacaacccgcactttcctgaagttctccgtctggagatggaagagtgtaaacgcagaaatccgacactgtatcgtcacatctggcttggtgagccagtgagcgcaagtgatatggcaattatcaaacgtgaatggcttgaagccgcaaccgatgcgcacaagaaactcggatggaaagcgaaaggcgctgttgtctctgcgcatgacccatcagatacagggccagatgctaaaggttatgcatcgcgtcacggttcggtagttaagcgcattgccgaaggtctgctgatggacatcaacgagggtgctgactgggctacttcgctggcgattgaagacggcgctgaccattacctgtgggatggtgatggtgttggtgccgggctacgcagacagacaacggaagcgttttccggcaagaaaatcaccgccacgatgttcaagggcagcgaatcgccattcgatgaagatgcaccgtatcaagccggagcatgggctgatgaagtcgtacagggtgacaacgttcgcactattggcgatgtgttccgcaataagcgagcacaattctattacgcgctggctgacaggctgtatctgacatatcgggcggttgtctacggtgagtatgcagaccccgacgacatgctgagcttcgacaaagaagcgataggcgagaagatgctggagaagctgtttgcagaattgacgcagattcagcgcaaattcaataacaacgggaagctggagctaatgactaaggtcgaaatgaagcagaagctcggtattccatctcctaacctggctgatgcgctgatgatgtgtatgcattgcccggagtcggctgcgcaacccgactattccagttactcaattccttgtggtgtaggttga

SEQ ID NO: 35208 - DNA, 2199 bp, Escherichia coli; identical to SEQ ID NO: 13455

SEQ ID NO: 35209 - DNA, 894 bp, Escherichia coli
atggaccagatggcagaaaacacaccagaagttgaaatcgaaaccgacgcgtcagagcagattcctgatgatgtcgaactggctgaaaaagtcgaaacagaagatggcagtgagtcctcaggcaatgatgcagaggaggctactgaaactgatgacgacgaatcagaacaggaattctactttggtgacgaaaagctggattcgccaaccagcgaagatggcgctgagcatggactggtaaaacacctgcgcaagacgattaaagagaaagaccgcgagctgaaagagctgatgcgtcagtctcagaaacccgtcgagcagcagccggtaatcactcaaccaccgcgaatgccaaaactggatgatgaggacatcggtttcgatgaagaaatctaccagcaacgcatggctaagtgggcagaggataatggcaagtaccagcaacaggagatggctcgcaagcagaaggagcaggagcttcaggctgcctatcaagagcgattatccaaatatcagcaacgtgttaaggctctcaaagttcctggctatcaggaagctgagcaggccgtactcgaggaaatccccatcgagacacaaaacgcgatcctgtttgagtcagagaagccggaaatcgttgttctggcgcttggtcgcaacgctgaactgcgcaagcaactggcagaagctaccaaccccgtagcaattggtcgtctgctggaacgtatcgaatcgaaggccagaatcatgccaaaagcaaaaaccacggcagccacaaccccgacggttaaggggagcaacggcgcagtaatcaacaacctcgacaaattgaaagccaaggcgctggaaactggtgactggacgccgtatttcgccgctaaaaaggcaaaaaaataa

SEQ ID NO: 35210 - DNA, 1254 bp, Escherichia coli
atggctaaccaattagcaaaagaccttgaaatcatgttcgaaaactacgttgaaggctttgaggccgcctgcgtagtttcccgtaacgctaaaaaattccgtcccggtgatacagcaatgcagcgagcaggtgatgttctgtatcgtccgcagcattaccacatgaatattgaggaaggcctcgacctcagcagcaaaacgccaacagcactggttcagcgccttgttccttcagtgttcaaggagccgaaaaacattctgtacactctggatgcgcgtgaaatgcgtgatccggaacataaaactgaagctggtcgcgccgcaggtatgcgccttgctgcacagattgactctgacctgatttccatggtcacgcagcgtgctactaacgtgatcacgatggctgactcaaccgcaggtacacagggccgtgatttgtggaactgtgcggcaggtattgatgccaccatgacggcgattggtgtacctcagggtatcaaccgtcgctctttctggaaccccttcaactacaaagaccttgctggcgagcttggtcaccgtgcctatgctcagggcgcaaccctgacagcatacgaaaaagcgcaaatccctccggttgcgtccttcgatagctacaagaccgatatttctggtcgattaccgaaaggaagcactgaatccttgacagtatcaggccaacctgaacacaaggttgaagcgaaagattcaaatggtatgccagttgataaccgacaggggactattacggtatctgcatctggcttgcaggttggtgatgcgttcaccattgccggtgtgaattccgtacaccagatcacaaaagataccaccggtcaaccgcaggtattccgtgttctggctgttagcggaactaccgtaacaatttctccaaagattctccctgttgaaaatactgatgttgcgagtcgtccatatgcaaacgtcgatgccaaaccggcagaatcagcagcaatcaccattctcaacaagaacgcagcacctgctaacctcttctgggctgatggttctgttgagctgatgtacggcaaactggcattcccgacaggtcagggtccacaggtaatgacagcaaccaccgagcagggcgctacgctgatcatgtcttatgccttcgaccacatcaaaggcgtaaccactgctcgtttcaccactctgtacggttgctctgtacttgttcctgaatatacgggcatcgttattgccgggcagtaa

SEQ ID NO: 35211 - DNA, 189 bp, Escherichia coli
atggcacgaacaatgctctataagcctggcaacatgatcacctgtggtcagtttgctgtcgattacgtcattgttgatgacgaagaagttaaatctcacctgaaaaaaggttgggtaaaaactcctgaagaaaccgcaacgaagcaaaaagtggctaaggcggaagaagatggcgaaaacgaagggtga

SEQ ID NO: 35212 - DNA, 462 bp, Escherichia coli
atggcgaaaacgaagggtgatctcgttctaaaggctttacgaaaagccgggctgtattccaatgccacgttgacagatgctgaccctcaggcaattgaagatgccattaatgacctcgaagacatgatggcagcatggcaggctaaaggtatcgagcttggatatcagtttgctgatacagaaaacggcatcatgccgttacctgacgatgattcaggtatccctgcatgggcaaatgatggcgtcgctttgaaactcgctgtgcaagtgtgcatggataacgtcattcagccgtcagacgctctccttaccgctgctgacagtgcatatcagacaatctgtatcgctttaaccaaaataccaccacttgagcggcgaaatgacatgcctcgcggtagtggtaacaaaagcgcgtttacgtggaatcggttttacatcgagaaagatgatccgagtacgtga

SEQ ID NO: 35213 - DNA, 1419 bp, Escherichia coli
atgccgattcagcaacttccgcttatgaaaggtgtcggcaaagactttagaaacgccgactatatcgactatctgccagtgaatatgttggctacacccaaagaaatccttaacagcagcggatatcttcgctcattcccgggcattgccaaacgctctgatgtaaacggtgtatcgcgcggagttgagtacaacatggcgcagaatgctgtttatcgcgtgtgtggcggcaagctgtacaaaggagaaagtgaagtcggtgatgttgccggaagtggtcgtgtatcaatggcgcatggtcgaacatctcaggctgtaggcgttaatggtcaactggttgagtatcgctatgatggcacggttaaaaccgtctcaaactggcctgcagacagcggatttacgcagtatgagttaggttcagtccgcgacattacacgcttacgtgggcgttatgcgtggtcaaaagacggcacggattcatggtttattactgaccctgaagacgaatcgcaccctgaccgatacagcgcacaatatcgcgcagaatcgcagcctgacggcattatcggcatcggaacatggcgagacttcattgtctgctttggttcatcaacgattgaatatttctccatgactggtgcaaccactgttggtgccgctttgtatgtcgcacagccatcgctgatggtgcagaaaggtattgccgggacttactgcaaaacgccgtttgctgattcgtatgcgttcatcagcaatccggcaacaggcgcgccttctgtatacatcatcggctccggtcaggtatcaccaatagccagcgcgagcattgagaaaatcctccgctcctacactgctgatgaactggctgatggcgtgatggaatcgttgcggtttgatgctcatgagttgctgattattcacctgccgcgccacgtcctcgtgtacgacgcatcttcaagcgccaatggtccgcaatggtgtgtactgaaaacaggcctgtatgacgatgtgtaccgcgctatcgacttcatttacgaaggcaaccaaattacgtgcggcgataagcttgaatcgatgacagggaaattgcagttcgatatcagcagccagtacgacaggcaacaggaacacctgctgtttactccgttgttcaaagcggataacgccagagttttcgaccttgaggttgagtcgtcaactggcgttgcgcagtatgctgaccgcctttttctctctgcaaccactgacggcatcaattacgggcgtgagcagatgattgagcagaatgaaccgttcgtttacgacaaacgtgttttgtggaagcgagtagggcgcatcaggaaaaatgtcggcttcaaattgcgcgttatcacgaagtcacctgtcactctgtctggttgccagataaggattgagtaa

SEQ ID NO: 35214 - DNA, 702 bp, Escherichia coli
atggctgattcgaatctcaatgagccggtaacaattcaggctacacgactcgatacatcaatccttccacgcaatatattcagccagtcttacctgctgtatgtcattaatcagggggctgatgtcggcgcaattgccgggaaggcaaatcaggctggtcagggcgcttacgatgcccaggtaaaaaacgatgaacaggatgtcgaactggctgatcacgacgcaagaatcaccgcaaacacaaaagcgataaatctacttgaggtcaggttaacaactgccgaagggaagatagtcgtactgcgtagcgatgttgattacttgctggatgaggttatcgatattcaggcgcatctggtcactgttgaccaaagactggatgacgtagaaaacgatgtctctggcattaagagtgattacgtatcgaaaaccgtaaccgaatcgcagtctcttgcgtcaccgctggatgtaaaaacatcatattcagttgatggaattcaggttgttggagcaagaaataccggatggactgcagccacaggtacacctcttcttggctcattcaacgctaaccagtcatacacggtcggcactacgtacacacaatccgaagtcgcggctctcgctacaggtttgcagcaggcgcggcagcgtattctggcgattgaaacggcacttagattacatgggctgattgactga

SEQ ID NO: 35215 - DNA, 456 bp, Escherichia coli
atgattacattcaaaccaacgcgaaacatcgacctgatagaagccgtaggaaatcaccatgacattatcgccgggagcaacaacggtgatggatacgactacaaacctgaatgccgttactttgaggtgaacgtgcacgggcagttcggcggaattgtttactatcaggagattcagccgctaacctttgattgccacgccatgtacctgccagagattcgcggcttcagcaaggaaatcgggctggcgttctggcgatacattctgactaacaccaccgttcagtgcgtcacatcgttcgctgcacgcaaattccgccacgggcagatgtactgcgcaatggttggccttaagcgtgtaggaaccatcaagaaatacttcaaaggcgtggatgacgtgacgttttacagcgccacacgcgaagaactaatcgacttcctgaatcacgggagatag

SEQ ID NO: 35216 - DNA, 690 bp, Escherichia coli
atgttatatgcatttaagctgggcagaaaactgcgcggcgaggaaccttattgccctgaaaaaggcgggaaaggtggctccgataaaagtgcaaagtatgccgcagaagctcagaagtatgccgcagacctgcaaaatcagcagttcaacaccatcatgaataacctgaagccgtttactcctctggctgagaagtatgtcggcagcctcgagaacttatcgtctctggaggggcaaggtcaggcacttaaccagtattacaactctcagcagtataaagaccttgcaggtcaggctcgctatcagagtctggcggcagcggaagcaacaggtggattgggttccacctcaaccagtaatcagttagcaacaatcgcaccaacgcttggtcagcaatggctatctggacaaatgaacaactaccagaatctggcaaatattggtcttggcgcgcttcaggggcaggcaaatgctgggcaaacatatgccaacaacatgagccagatttcacagcaaagcgcggctcttgcagcggcaaacgccaacagaccatcagcaatgcaatctgctattggcggaggtgcgtctggtgccattgctggggctggacttgcgaaattaattggttcatcaactccgtggggggctgcgatcggcggcggtcttggtctgcttggctcgttgttttaa

SEQ ID NO: 35217 - DNA, 654 bp, Escherichia coli
  misc_feature (513)..(522): n is a, c, g, or t
atgaatcagaagagaggttgcttaactccacaaagaaaacatttctgtcaatgtggtctcacagcaatattttctataagaaaggaaaggaaaggaaaggaaaggaaaggaaaggaattttgcgatgtaatggtcgtctttggcaatgatgtaatcatcatgtcagataaacttattaattataatattgaaattgacgaaaaaatcgcatggaatagatggtataaaagtgctatcgaaagcagcataaaacagctaaatggtgcatataaccatataaactcatatcccgacaatctatatactgatgctcaagcaacagagccattctcaatggaattaccacattcggatgaaatatgcattcatttaattgctatcgcaaatggttgctctaacgcatgctatagaaaatacggtcgctatggattaaatattgatacagcatgtaccggaaaagacaccttatttactataggtatacccacaagaaaattcgtccatatattcaannnnnnnnnnctagataaaatatttacatgtttagatacaaccagagatttcattgattacattcaagctagggaaaacttacttacaacttcagataagtacattaaaatatactcaataaacctcaagatgcgggtgtga

SEQ ID NO: 35218 - DNA, 561 bp, Escherichia coli
  misc_feature (398)..(407): n is a, c, g, or t
atgagagacgcagaatttagagcgatgcttcaggcatcaagagaacgcaacaagcacaactcctacgcttacacaaacaaccccaccagctacgaagtcccaacctttagcaaatccgaacgtaagaacattgaagcggtcattcgtagcattacgccacgagacagatatatgtcagtacgcaaagaaaaagagaatactttaaaaactttcttgatgggctttgattcttacgagcaactgccagcaaaaattgaagatttaattatcggcacttgtcgcagttttggaagagataattatcaccgaaaagttttctatttactacgaaatattgacaagattagctcaagcacaataacaagttatcttcagcgtcaagcaaccaggcttagctnnnnnnnnnnattaccaagcgataaatattgcgctaacttagccactatttgcatgaaagttattgagacaattaatcatcatgcggaagtgggcaatatcagccttacgattagtgaaccagatttcgagtttgacccgtatttagttacagaggaattttaa

SEQ ID NO: 35219 - DNA, 483 bp, Escherichia coli
  misc_feature (461)..(470): n is a, c, g, or t
atgtcaaacgatttgaaaggcggcatgaccaacctatcaggggtttatggcactctgctaccggataataacctgaattatagtgttcaggtcggtaacacccaagggggtaatacatcgtctggcaccagtggttacagttctcttaattatcgtggtgcttacggtaatacgaatgtcggttacagtcggagtggtgacagcagccagatttattacggaatgagtggtgggattattgctcatgctgatggcatcacctttggacagccgctgggcgacacaatggttctggttaaggctcctggcgctgataatgtcaaaatagagaaccagaccggaattcataccgactggcgtggctatgccatattaccatttgcgacagaatatagagaaaatcgtgtcgctcttaacgcgaattcccttgcagataatgttgaactggatgaaaccgtagnnnnnnnnnngagcaacatttaa

SEQ ID NO: 35220 - DNA, 240 bp, Escherichia coli
atgacgttgaagtacggtaataaaagcgttccattcggtgcaattgtcactcacggagagaataaaaatggcagcattgtcgcggaaaatggtcaggtttatctgactggacttccacagtcagggaaattacaggtttcatggggcaaagataaaaactcaaactgtattgtcgattacaagcttcctgtagtctctcctggaaccttgctgaaccagcagacagcaatctgtcgctaa

SEQ ID NO: 35221 - DNA, 759 bp, Escherichia coli; identical to SEQ ID NO: 6176

SEQ ID NO: 35222 - DNA, 504 bp, Escherichia coli
atgaggcatagacgctttgccttgaaaaggcctgaaaaagaaaaagagcaagagatggtgattgaagcagccgcttatgctgcagctatggcaactgctgatgcgattagaaattatgaagaagaggataataaaaattcctatcgcatttacttatatgagagccgtcacagtgttacagaccatgaagcatgcctaaaaaaacaaggggaagtattccactgcaaccttgctgagtacattaggaatgaaatggaaaggaatttagctttatctcattttggatacaagagtcaggaaagtggtttcgctggcttcaaggataaaattaacgaaaggtggcaacttttatataagccatttcgagctgatgagaaaactcatcgacttgttatgcacgaggtcccaaagatgtccgtagagaaatctcatgcaatctcgcgcaggatgtttgcacgcactgctgaagatatggctcaggagctctacgacgatgccgaataa

SEQ ID NO: 35223 - DNA, 459 bp, Escherichia coli; identical to SEQ ID NO: 4534

SEQ ID NO: 35224 - DNA, 459 bp, Escherichia coli
atgggggacgaaaagagcttagcgcacacccgctggaactgtaaatatcacatagtttttgcgccgaaataccgaagactggcgttttacggagagaagcgtagggcgataggcagtattttgagaaagctgtgtgagtggaaaagcgtacggattctggaagcagagtgctgcgcagatcatatccatatgcttgtggaaatcccacccaaaatgagcgtatccggctttatgggatatctgaaagggaaaagcagtctgatgctttacgagcagtttggggatttgaaattcaaatacagaaacagggagttctggtgccgagggtactatgtcgatacggtgggtaagaacacggcgaagatacaggactacataaagcaccagcttgaagaggataaaatgggggagcagttatcgattccatatccgggcagcccgtttacgggccgtaagtaa

SEQ ID NO: 35225 - DNA, 645 bp, Escherichia coli
atgagcctgacagcactgtatctttttgctctgccgatgatttatcccgcgggcagaaaattactgcacatatccgaatcgtacatagagcgtatggatagtgaaagtgaaccggaaaatcaattgcaccatgagctgcttaaggtctggctcattctatgtatcgtgctgatagcggttggtttggccggttttatggagccggaacaaatcatcagaggacttcttgttggagcatggtgcctcgtgcttgccgccctggatctagcacgcttctggcttccatttcgctttaccgcatcgttggccataactggcgttatgttttcgatttgggtactgccagagcgtcaccccgcccaattgctggcagaaatcagtttcatttttattcccctggagttggttcgcttgtcggcgaattacttccaaaaagatgaggtatttggcaagggggatgtttggttaatcacagcgctcgtttgctggtacccggcattcgatgtacttgccgtcacgctaatcgcgttattagcagcaatttgtactggcgccatgaccaagcaacgttacctgccatttggcccgtttctctgcctgttcgccgttatcccggcgttcaccacactggacataatcatatga

SEQ ID NO: 35226 - DNA, 480 bp, Escherichia coli
atgaaagttattactggactgctggccctgatggttgctggctccttttcgatttctgctgcagctttttgctttaaggaggctggagccagataccaaattgacccgcggttattgatggccatagcgcagcaggaaagtggtatgaaccctacagctgttaatgccaacaaaaataagtcaggaaaagcggtgagctacgattatggcgttatgcaggtcaattcaaaccacatccccaaattaatgggcatggggattataaaatcaaaggatgacctcctgaataatccctgcctgaatgttcagatcggagcctggatactggcgacacatctgcagaaatgcggtgtgaactggtcctgtctcggctcttacaacgcgggtttttctgagaataacgagcaggaaacgaaacggctaaattacgccagaaagatttaccggcgctataacatccagctggcggggcatccctga

SEQ ID NO: 35227 - DNA, 582 bp, Escherichia coli
atgagtaaacaatgcactttacctgccacacgggttcatcgtggcgtactgagtatcgagatggtcattattctggccgtactcgcaatcgcggccgtgacaatctttcttaatgccagcagtcttttcagtaaaaatgaaacgtctaccgaaatggccaacgcgcagcaaattaccgttaatacacgaacgttgcttaaaaccgggggcatttatagcttcaacggtgccgcggatatgaccggcttgttaatcaagtatgacggcgtaccaaaatcaatgtcggtagtaggtgatgcctctagcggtacagcaactctaatcaacgtctggggcggcgcagtcaccgtcgagccaactgcctccagcggtggtaaaactgggttcactctgacgtacgataaagtgcctttggcagcctgcaccgtcatggcttcacaaatgtcttcttcatatggtgaaactaccgttaacggaagtaagacggtaggaaccgtcagctctgccactgcaggaagccagtgcacgaaagataacggttctgcaggcactaacaccctgaaatttaccagcatgacctaa

SEQ ID NO: 35228 - DNA, 1152 bp, Escherichia coli
atgaagtctaaaatcgactccttaatgagcggactttcagctctgtcttcaagcacgttgataagtaatgccaatgaattgcgtaaaacctgtaaccggtggatttaccgaaaaacgttctcaacaggtgatcgactcaagctttatgaggagcttgcctttctgcttggcaataatcagcggctgaatgtggctctggaaaatatgctatctactgcattaagcggcggtcctgcggcagcgcgcgcttcggtctggctcgaagatattctttcaagccttaacaatggcctcgctcttgatcaggctctggcggaatgggttccccggggcgaatgcgcaataatcagttcgggtctgcaggacggtaaccttccccaggcgctggagcgagcctcgacggtggttcgcgggatcgctgaaatgaagtcgagtgtcttcaatgtcctggcgtacccatttgttcagctagcggtggtgactggcctgctgaagatgatccacgattactttttgcccccgctgtcccgtatgtttccccgggaagactggagcggtgcaatgtggtggctcgggattagtgctgatgttgtggccaaacagggtatctggctgggactgtttttcctgttattttgtggctggacggtctggtctttgccaaacgtagggggacgcccgcggcgcattttggatcacctgatcccctggtcattgtaccgggactttcagggcgtcgtttttttactgaatgtggccgcgctactcggcgccaacatcaaaactctcgatgccttaaataaacttgcaacccatgcatctccgtacatgctggagaggcttaatgccatacgacggcgggtaaacgccggcgaccacctggggctggccatgcgcaacgccgggtacaattttccatcacttgaaacaattaacaaactggtgcttctgacagcagggcagaacagcgataacagtcaaatactgattgagcgatatgccatgtatatgttgaagaacaccataatctccatgaagcggagagttgtccgcttatctctcgcctgtttttgtctgatcggtgcatatatgggcatgttgctattcgttatccagcaactgaatgacctggcagatcagataggcagataa

SEQ ID NO: 35229 - DNA, 1521 bp, Escherichia coli
atgacagaggtagctcttccgttcgttcagagcgaggatattcatattccaaatcagattgcgactcgtatccatttaaaggaaggtgaatcaccttctttatttatttcggagaacgatcgtaacgatgttcaaatccaagctttcgtaaggaaaatcacagataaaaacaaagagaccgttttaaggtttctgccgctcaacgaaattcatgcgctgaacaaaggtgacaaacttcaaagcgacctacaactgaccgattcgcaaaagaaggtcgtagaattgtttaggctcgctgtaaatcgaaaggcatcggatattcatattgctattggtgaagagggacttgcgtttattaatttgcgtatacatggcagtcttattcgagtaaataccgtccctaaacaagagggattaactctcgcctcgaccataattctgtctatgtgtgatgtgacggaatctcagttcaatagcaaccgtcctcaggacgggcgcattgaagcgaaatatctcgaaggcctgaatttatttggcgcccgctattcacatactccgacggttcacgggattcatgccgtaatgcgcctgattcctgacgacagcgaaaatccaccaacgttaagcaagctgggttttctgcccgaacagcagaaactactcaagaaaatgttagccactccagaagggatggtcataatgagcgggcctacagggtccgggaaaagtgcaacacttcgcacactggccaacatgtatctgagtttccatgactacgctcagaatctggtaacgtatgaagatcccccggagggacggataaaaggtgccgtgcagtgccctattattgccaacaaaaataacccggaagacgttctgcgcgcatggcgtctttatcttgcaaacaccctccgtattgatcccgatgcaattctggtcggtgaaatgagggacgctttctcagcacagtcctgtgtaacaaacgccatgaccggccatctggttatgacaacattacatgccaacaatcccttcaacatccttgaacgactgctgacgcttgaaatcaggcctgaattactaactgatcctcagctgtttattgggctggtcagtcagaggctggttcaggtgctctgtgagcattgctgtttgagctgggaagatgtggttaaggatttgagcgaaagccagcaacatctgatatctgaaacctgtgatatcggcactacgcgcttcaggaatcaagccgggtgcaaatgttgtgaagaaggtattgtagctcgccgtgtggtggccgaagtgatacatcctgatgcgcagtttatgctttgtttccgtgaacgcggaaaacttgccgcgcgcgaatactggataaaaaaaatgggcggcataacccggaatgcgcacgtcctgcaactcgttaaccaggggctggtagaccccagggcggcgcagcgtatttgccctcttgacgaagatcggcggcttctgacagagggagcacaagatgaagtctaa

SEQ ID NO: 35230 - DNA, 510 bp, Escherichia coli
atgcgactcgctaaatatatgcttaccgctctgatgattcagagtattggcttttacgcaagcgcagcggaaggcgaaaccgggaaagtagtctcaacgccttcagctacgccagttcagaatctgactattagtgaacttgaaagaatacaggctgagacagtgctttatgaggctcgagcaaatcgcgcgaaagcaatactcaactggcaaactaacgggaatgggcttgatgcaccagttcccgtattgagcgcgacagcttcagcagagaaggttacagaacaggcacggattgagcgctctgaaagcgttccccgaatattagaaattgccggcagtggtggccagctgacctgcagaatgctcatgtcagacggtactgtagtggaggcaaggaacggtcaacggcttcccgggtctgtttatacagtagcaaaaataagttcccagggtgttcaactgaaaactgatgcaggaaaaataatttctccatcttttacggagtaa

SEQ ID NO: 35231 - DNA, 1278 bp, Escherichia coli
atgcagcacaacactattatccattctggccgtaacatttgggtcgctggtttgctctggaaagtggctgaggcaaaccgaaaactggatcaccggcgcctcgcgcgaaaagaagatgcagatcatttcatttcgtttgttcagccctctggtgtccttattggaacggccaacctcagcctcacgggactaacgccacgtcagtctggcaacacatatgccctggcaccaaccttactcccgttattaggcgaaaatgcgtgggcggtctttgagctcgaagacggcggctattattttgtagccacgactggcggttctctatccctcctttctgatattaccggcggcctcgaagaaatcagaaaggcggttgaacgttatcttagctataccggcgctgaagcaaccacagttgcattttgcccggtagggtttatgcctggcctgagcgccccgaaaggggatatcagtcagttactggcttccctcactcgtgagcgtgcctttcgcctcaaacctatatccacacggcgtcctgtagctatctggtcactcactcttttactggccatcgcaggttggtacgggtatacaacctggcagcataaccaggagatgaaagacctggagataaagcgacttgctatagagaacgcccagcggcttgttaagaaagatcctccaaagccctgggaaaacgcacctgacgcaaaggcttttatacagacctgcagtgaaggctggaacgttcagttgagcatggcgggatggccatttaaggccgcgatgtgcggcaaggatgaaaatggcttattcgtcagattagcctggcgtaaacccgaaggcggcacgttggcaccatttcgtcagcgtctggcgtacttttatcccgatctaaaaccattttttaatattcccggtgaggccgataccggtggggtaaaaaaaccgctattcgctactattcgaggttctgctcaggaacatattggagacggtgatgaaatcacgcagcgcttaacaaactacgcccaacaaatacaggcgaaactggttttgagggaagacaataaaggtaacgtaattgttgacggtaacctcgttgatttaccctggcgtacttattcatttcagctcgataccgacatccctcctgaaaatctatttggagctgacttagataaatcaggaattcgtctaaatgcaataacaatgactttaagcaacgccaggctgcattacatcctggaaggaacactctatgcgactcgctaa

SEQ ID NO: 35232 - DNA, 1614 bp, Escherichia coli
atgaaacaacactccatgacccgggtggcaattgctattgccgccctcgggctgctggctggttgctctaaccttcagcgaatcgacgaaacgcaaaatacagctgcagccgattttgatacggccagccgcaagatgtccgtcccgcccggtacacagccagtaagcgagatctcaactcaatggataaatccggtcccattaaattctaaaggtggtcaggagttactccctggatgctctgtcactctcatgcgtccgggagagatcagcctcgccgatgtaagcgcgtttatcacccgtacttgccgggttccggtagtcattacgccagatgctcgctcggctgcaatgtccggaggagcgacggaaaagatatcaggcccaataccggcgccagtgcctgcacctgatgcaacgggaatgattccgcttaatcagatgggtgcaactacattgcctaaggcagtaaccggcacggatgttctgaaaggcgttcactggcagggcgcactttccggactgctggatcacgttacgactcgtttggggctttcctggcgctatgagcagggcagaatcgctattttctacctggacacccgctcgtttcccataacgttccaggattcacagaactcgttctcatccaaatcagtgtacggcacaacgtcatcgtccggggagggctcttctggggagggaaatacttctcagacaaccacgactgatatgaacacaaaccgctataaggagcttgaagcaacagttaagtcgatgctgacgccagaaacgggaagaatgtccatagctggcgggatgctaaccgtaactgacactccgcgggttctcactgcagtacagcgttatattgaaggacgtaatactgaactcacccgccaggttgtgctgagcgtgaaagtgtggtcggtaaccaagaaaaggcaggatcagctgggtatcgactgggatgccgttttccgctctggaagcgttggcctgtcactgggtaatgcgatgtccggagtggccaacacggcgatgaccggcgggttatccattcttgatggaaaatttgctaactcaaacgcctttattcatgccctttctcagcaggccaacgtttcagttgtcacacaaaataccagcgcgacaacgaacctcaaccctgtccgtgtacaggtcattacacaacaggattacatcagtcgcgtcagtaccgaaaataccgcgaacgttggctcaagcacgtctgtagagaaagcaaccatttccaccggctttaacatgaccatgctaccgtacatcatgccggcatcagaccgtatggaactccagtattccatatccatgagtgacgacccggaaatgcagccagaaaaagtcggggacgtaacattgaagctgccaaagacgaaaatgcacaacttcgctcagaacgtcatcctgaaatccggtcaggcattactgctcagtggttatctgcaggctaacaacactgcaaataagcagggggtaggttctccaggcttctttggacttggcggtggttataacgctgagaaaggagacacgatactcgtgatcgtcattacgccgactctgctggggtaa

SEQ ID NO: 35233 - DNA, 429 bp, Escherichia coli
atgggctacctaatattggcgatattcacatccttattactgcttgcatctggctccctacagcgtgataacgcgacttcagaggcagcctatactcagggcactattaaccagcaggcaacagataccatgcggtatctgaactcacttgttgactacctttaccaacacccaattagcgatggttcggttccggatgcgcagctgggattcacgccccctggcgtaaaaaatatcattcagagcggccgtttatgggtctatcagccaaaccagcacggactacttcgcgcgctggccacagcctcgtctcagtcggctttcatcggaacagtgaaatcccgccggctggttgacctaagcggtctcgatatgcaggtctccgtaccatcacaaattccagacggctatatcgtttacctcaactaa

SEQ ID NO: 35234 - DNA, 1041 bp, Escherichia coli
atgaataagcacattacctgtttaattccactttgcctgactgcgtgccagaccactcacgtcagtagccagcctgatgccttgagtcttgtcgatcagctgctgggtgctcagctggtaaaaatccaaatcgaacaaaaaagcctcgcgcttgcaagtggcctaaatttccagccattaaaaacgagtcagccagttgcggtacagaaagcacagcttacgccttcagttaaaagcctaccggcgccaaatagcctgcttcctaaaccagttattgctaattctcaaccggccaaaatccccaacgtcagtttcaccggggaggccggcagccttccggacctggtgtcaaaggcagggaacaaacaatcactggataatgccctcggagtaatcatccccgcaggctggacaacggtgaagtctgctcgtttaaaatcgagcttcaaaactctggttagctggactgcgggcgatcaatggccacatacgttaagcaaactcgcgcgcgaaaataaactccaggtaaccattcaatgggcctctcgccaggttctggtagatttggccgatactcagcaagaaacaaaacctgtggtgtctaatccgtgggcacaacctaaattactgtccacgccggctacaccggccaaacctgccgatccggataaatccaaagcttctctgttaaccacacaaaaggccagtacccaaaaggcatcattaccaccccctcagccggccaggaaaatctggcgcgcagagacaggtacaacccttaaagacgccatttttacctgggctgcagaaacaacctgtgaggctaatcctgggaaaaaatggaccgtagcatgggtaacaaccacgaactatcgtatcgatgcgccactgcagttcagcggtacatggcgggacgcgcttaaccaggtattcacgctttatctgaaagcctcagtacctctttatgccggtactaatactgcccagtgcgtgcttaaggttgatgataagcctgtggtggatgataaaacagtgcgttaa

SEQ ID NO: 35235 - DNA, 243 bp, Escherichia coli
atgaaaaataaatacctaatgcaccgcgttacaccagaacgcaaagatgaattaaatggcgtagctgtcgatcttggatataaacaacggcagccaattaccgtcagtgatgttcttaatgcgcttattgatatgtgcgtaacgggtgctgtcaaccgggaagatcttaccaaacagatcctggccaactttgagaaacccaaatcagctccaggccggcgcgtcacaggacaaaaattatga

SEQ ID NO: 35236 - DNA, 213 bp, Escherichia coli
atggatataattgatcatcttcaggatgaagaagaatttttattaaatctaaaaattgaatctcgtcgcgctaaaccgattataccatctgccactcattgccagcgctgtgatgctgaaataccagagacccgacgggaactggttccgggaactcaactctgcgtatattgccaggcagcaaatgaaaaattacaaaaacactttcactaa

SEQ ID NO: 35237 - DNA, 555 bp, Escherichia coli
atggaagcgtggtatctgctttgctaccaaccgggcaagggaaatttgtacaaggcgcaattaagcctcgacagaaaaaacatcaatttcttttgtcctatgttacgtacctatcgggaacgcaaagactgtaacagttttagaatgagtgttgagccattgtttaatggctacatatttgttgcgttcgaccctgagataattcatccggctaaaatcgaaacggaatgtcccggtgttagtaaatttgtacgctacggaaatgaaataaaaagcttaccgcctcatgttattgaaagcctgatggaccttcctttttgtactgatgaactcgacagataccgcctgacgtcttcaccgacaaaaacccgtccaaaaagaccacccaaaaaaaccagacgacgcatgaacaatcctcaaaaggtccaaagcagcctctacagcaaaatcagagagattgttgagatcgacgaggagccgttacgtacggcgatgttcgtggcatttgctgaaagcctggctgagcaaaggaggaccgttaatggatataattga

SEQ ID NO: 35238 - DNA, 861 bp, Escherichia coli
gtggctaactctccaactctggtctcgcaatatctgcaggtccggaacccgaatcctgaatttacgccacgtgaaggcaagaaaactttgccgttctgccgtaagctgatggaaaaatctgctgactttacgtcccgttttgatttttctatgcacgtcgcatttatgcgctccttagggcttcgtcgcaggatgccgccagtgcttcgccggcgcgccatagatgcgttactccagggattatgttttcactacgatccgctggccaaccgtgttcagcgttcaattacaaaccttgccattgaatgcggtctggccaccgaatctaaaaagggtaacctatccattacccgggctacccgggcgctgcgctttatggcggaactggggctcatcacgtatcagactgaatatgatccgcagatcggttgcaatattcctacggacataacgttcacgccggcgctgttctctgctcttgatgtttcagatgttgctgttgcagctgcgaggcgcagtcgcgttgaatgggaaaataagcagcgtgaaaaacagaataagccacggctggaaatggatgagttaatcgccagagcatggcgttatgttcgcgaacgtttccgtagttaccagtcggaacgtaagctgcacggcctgaaacgtgcgcgtgctcgcaaggacgttacccgcacccgccgtgatattgaatcgatcgtgaagcaacagctgacgcgtgaaatcgctgagggacggttcaccggtaatcatgatgcagttcgcagagaagtatcgcggcgtgtcaaagagcgaatgctaatgtcccgcggtaataatcacacccgcctgaccaccaccacttga

SEQ ID NO: 35239 - DNA, 501 bp, Escherichia coli
gtggagccggaaacggcggcaaaaatcctgtgtatcagccaacataagaaccggaaaatgacgctcctgaatcacgaaactcggtactatctggaagtggccacgttgctaaaagaagacattgatgactacaacttctactgtcgcagcaataatgtgccctgcattaccatctggcgttctgtcagttacaaaaggtttgatgtggtatgttcctgggagcacctcgaacataaaaatcatgaagtcgtttgccatccactgttcgggccttgcgtaaccgcttatgccgagaaacagctgaaaaaaatgattgcctcacatgactggcgcggaccgactccgccaactctggaactgtccagatcccggcagctggttacattcaggcttatccagaatattgagtgcgcacgtaagctggcgatcgacagctacctgtttatcacctgtctcatggaagatgttcgtaaacttgaagccggagaccgggttctctga

SEQ ID NO: 35240 - DNA, 492 bp, Escherichia coli
atggccgataccaccatcatcatcaaaaaacgtcggcgcattattgttgagccgaaagagcttaaggttaaagctccggccgaacctgttgaggtagggaaagtggacgttcaaaaacttcattgccccccaggaatgcgggaggatattccggcaaaattgcgtggtagcgcaagacggaattacaagaaaaattccaggacccaggaaaggctcagccagttctggccgctgttgttttctgagtacaagccgctggccctcaagataggtgaagcgatggtgaatgacgccagagagcggaatttgcctgtcactgacgttcagatcaagcagtatctggtcagatacacccagagtgcgcgctatgtcatgtcagttgtggaaggaactcaccgtttcaaccttaacggtgagccggtgggccttatcagcgatgaacacagggaacgcgccagggaaaagattaagaagctgagaaaatcgcagtaa

SEQ ID NO: 35241 - DNA, 642 bp, Escherichia coli
atgagtacaggcaacgtccatctcattgtgacctgcacgcgccgtaaaaccgtgcctgcaggtgatgcggtctttccggatgaacgtgacgcggagagcgcttacgggctctggctggaaaggctggcgcaggcccgtcgcgagtcgcccttcctgaccgctggcgagctgtatacgggccagcactggagcagggcagctgccgctgcggcgcgtaacggtgttgagatgtggattatatccgcaggcttggggctactgcacgtatcagacccggtggtcccgtatgaagcgacgttctcctcgatgccgttctgccatcgcactcactgggaacggctgacaacgcgaccgcctgcggaacggcggtgtgcttccctgaagacgctgatgcaggcagggcctgacgatcggtttgtggtggccgcctccccggtgtacctgcgcgccgttgaatcagacctgctcgcggggaggggagcgctacgtacatctgaacagctgcaggttgtcacctcaaaaggttaccaggggaagctgaaagacaacgtcagatacaccagtgcgggtatgatgaaggcactgaacaccaatatgacagggctgaatgtcagttatgccctgcagctcatttcccggtag

SEQ ID NO: 35242 - DNA, 1206 bp, Escherichia coli
atgactaagacacgccgaccatcgccgctgcagcggcgtgtgctgattgtgctggccgccttcggtgcgaaacgcccgggaccgctggcgacacgggatattgagcgggtgctggagcagggcggggacgccccggtgtacgggccgaatctccgcgcctcctgccggcgcatggaagccgcgggctggctgcgcaccctgcgtgccccgaacatgcagctggccgttgagctgacggacgccggccgtgcgctggccgccccgcttctggctgacgaacaggcgcgcctcctggcggagcagcgcgcggcggcggtccgggttctgcccctggtcccgcgcagcccggcagaggaagctgacgaccggccggtggcactggacgaccgctggcacctggcatgccgcggcgactacgttatccgtcttgacggcaccacctgcctgcagctgtggagtgcggccggccagcagacgcgcctggaaggcgatcccctgcaggtcgccgcctggctgcaggcctgccatgaggcggggattgcggtccgggtgcagatcaatgagagcgccgcaccggaggaaggttcaccggacggtaccgcgccggcggacctgaccggcacctggtaccgccagctggacaccgcgctgcaggccctggggatcaccgggctgactgaggatattcgcctggccgtggtcagtcctgaagcgtccctgcggatgctgccggcaccggcgcgcctgctgcacgttctgcgcgacgcggacccgctcacggctgccacatacgaggaagacacggaggccgcgctggccgacctgctcacccgcgcggggtttacgggcgaccaggcgcaggagctgcagtggcaccgcattcgctggccgcagatgagtcaggaagacgctgaccggcgcgagctgaacagcctgctggatgaactggaacagcgacagctgtactgcaaccgcgggcagctgacggagattgtgttttcgccggtccgcaaacccggcgagcgctggactgaccgtctgcagtggctcctgatgacggacggattcgggttccggagtccgctctcccgtgacgcaggctccagggcgctggcgatcctggccggttacacggggcaggaggtggcggaccatctggccacggtgatcgtctggaacgacgacagcgcggggacgccgtcatga

SEQ ID NO: 35243 - DNA, 258 bp, Escherichia coli
atggatcaggaactgaatttttcactcagctatgagcagttgacccggatagcggaagagcgtatccgtgagtgcgagctggacagccagggcgctaagtacatcagcgaatcgggtaaggccagcgccattctgggattctggtatgaactggccattactggtgcgccaatgaaaaattacgaacaaaccaaagcactcatagacgccgatcatcagcgtctcagaaagctcatctggccggagacggataagtaa

SEQ ID NO: 35244 - DNA, 261 bp, Escherichia coli
atggcccgtacgatgacggtggacgtgggtgatgagctgcgcgaatttatcgattccctggttaaggctggtgattaccgtacccagagcgaagtcatgcgagacgcgctgcgtcttctgcgagagaagcaggctgaatcccgccttcaggaattgcgcgatctgctggccgaaggtatcagcagcggcgaggcgaaaccatggaacaaggatgcattcctgaataatgtcagggccagggtggcaaatgaaagagattga

SEQ ID NO: 35245 - DNA, 297 bp, Escherichia coli
atgaaagagattgagctgacaccgaaagctgaagaagatctggaagcaatctggggctacagcttccgacagttcgggattgttcaggcggatgcgtatatcgggcgtatagcggcggtgtttgatgttctggccatgcatgacatcggcacgcatcgcgcagagctgggagaagatatctgctcgctgccggtggaacagcacatgatctattttgtgtcatcacattcggttgttacgatcatacgtattctcagccagtctcaggatacggcgcggcatgaaccctggatataa

SEQ ID NO: 35246 - DNA, 435 bp, Escherichia coli
atgaaaaaaacacttgtatcatttttagccattatggctgtcacgtcatccgcctgggctgcagaaaccatgaatatgcatgaccaggtaaataatgcccaggcaccggcccatcagatgcaatcctctgcgtccagaagcgccgttcagggtgaaggaatgaaaatgatggatatgagtaaccacgagcaggccgcgatgtcacatgacatgatgcagaacggcacgtctgccgcgcatcaggatatggctgatatgcataaaaaaatgatgaacaccaaaactgaaagcaccggcgaaagcgcaaagtcattctccaaaatgaatgaacatgagaaagccgctgtggtgcatgagaaggcaaataacggccagtcatccgttatccatcagcaggaggctgaaaaacaccgcagtcagagcgcccagaattaa

SEQ ID NO: 35247 - DNA, 930 bp, Escherichia coli
atgaacgacctgattatgattgttatccgtttccttctgtatcttgatttaatgattttatttggattgcctttcttccagatatatggaataagtggcgtccggaatgagatgcataatttaattaatttcaggtcgtttatcgctttagctgtactgatcggcatcctgctgacaggcatgaatatgctgctggtatccaatgccatgagcggggtgacagatttcagagaattatccattcatattatcgaaatggtgatcgaagaaaccgacgttgggatcagctgggttgtcagactctttgccctgtttatcacactcggtgggctgttcctgtacactaaaaacagggtgctttcctgtctgctgatgaccatcagcggcgccgtggcgctggccacactggcatggggcggacatgccgttatgcatgatggcgtacattactatctccacttgttcagcgacctgacacaccttggcgcagcaggagcatggaccggcgcactggccgcattcgccatcttactgatgcgcaaagataaccataacgcccggagcgtcagcattatttctgattcattagcaagatttgcaacggcaggaaccgtgatcgtggtagccctgagcctgagtgcgctggtcaactatctgtatattgctgagggtgagttagcccctctgttcagcagcgcctggggaagtattttgcttgcaaaaacagcgcttttcgttctgatgctcctgctggcagcagcaaaccggtttcaccttggtccccggcttgaggtcatggtcagggaaggcaattatgttcgcagcgtcgcgctgatgcgaaacagtatcctgaccgagttcgtcattgctgtcaccattctgggggctgtctcctggcttggaatgcttgccccgtctcaggccagctag

SEQ ID NO: 35248 - DNA, 894 bp, Escherichia coli
atgcacatgaaaatgaatacctgcgccatatctgtgcttgcagccggtttgattgtatcacctgttgcgtttgctgcgggaacgcccgccgacccgcactccgggcatgatatgtccgctatgcagctgtcagccgatgccggtttaactgaaatgactgccatggagcctgttgtcaccgagagcagaacgcctgttccgcccgttaccgaagccgatcggaaggctgcgtttggcaacttaaagggccatgctgttcatgacagcgcaattaattacctggttcttctcgatcagcttgaatggcagcgttcagacaaccggaataatttcagctggagcgtgaacagctgggtgggtggtgatgtcgaccggctgtggatcaagagcgaaggtgagcgaagtggtggagagacggagacggcagaagcccagtttctctgggggcacgcagtcggcccctggtgggatttggttgccggtataagacaggatttcagaccggggtctgcccggacgtgggctgctgtcggtttccaggggttggccctttacaactttgaatccgaaatcacggggtttgtcagtgatggcggaaaggccgcccttcgtctggggggagaatacgacattttactgactaaccggctgatactgcagccatcctacgaggtgaatatctacagccaggaggatgaatcgcgggggcgggggagagggatatccgataccgaacttggtctccggctacgttatgaagtccggcgtgaatttgcgccttatattggcgtttcctggaatcagctgtacggaacaacgtccgacatggcgaaaagggaaggcgaaaaagacagtcagatagtattcctggcgggcgcaagaatctggttttaa

SEQ ID NO: 35249 - DNA, 447 bp, Escherichia coli
atgaaaacttttatcgcagttactattttatccacgttatttatgggttcagcgtttgctcagtccagtaacctgtctcatgatgcacatcgcttcgtaaataatgccacagcgtttcctcacgttgaggccgccaggcatgaacaaccccgcgtaaaaataaacaaagccagcgccatttctttctcagaaatgaatgaacatgaaagagcaattattgcccattcctttatgaataacagtacgtcgtatgcccatcaaaaaatgattgaggagcatcaaaaaaagctgaaccaaagtgagacaaacacagcatcctcatccttcagcgaactgaatgccggagagaaagccgccctggtccatgagcgtgtcaataacgcaggggctgaagctcaccagatacaggcgagaacccttcgtggattggatgaaaataaggagtag

SEQ ID NO: 35250 - DNA, 741 bp, Escherichia coli
atgtattctaccgatgttgtaaaagatgatgcgtatgtagcagcctcccgtgcaggtctggaaaaaaatgaaattgctgtcctccagcgctccctgcctccccggtacgatcttcgacatttaaaaaataatgaatcactaaaactcctgcttcaaaaaaaagcaggagaatcccgggtcgtggcctataaattcacgtcaggtaaatttaattacaccgcttatcgtatttcagacaagagattctacaacctgtcggataccggcagcagggccggactggattatccgctgccggtcaccgcaagactcagttcacctttcaacccggcccgccttaaccctgtgtcggggaaggtcagtccgcataatggtattgattattcaatgcccatgaatacgaaaattgtcagtgttatcaacgggaaagttacccgggccgaatacaacagcaccatgggctattttgttgaagtgtccggcaaagacaatgttaaaacgcgttatcttcatctcagtaaaatcctcgttaaaaaaggaacgccggtttcccggggagcagctatcgcattgtccggtaacagcgggcgctcatccggtcctcatcttcattatgagctggtcattaacaataacccggtcaattcactggctttcagggcggcagggcctgcggataacaataaactcgaacagcacgcgtacgcccatgcccgtgactatgggcgatatctggactga

SEQ ID NO: 35251 - DNA, 198 bp, Escherichia coli
atgaaaagtaccacttatgctctgattgctgtcgccgcgatcgcggtatttgcacttttacgggagcactggtcacatctggccggctactggccttatctggtgctgctgatatgtcccctcatgcacctgtttcacggccacggagggcacgggcaacatcagcatcacgacgggtcggatgataaaaaaaactga

SEQ ID NO: 35252 - DNA, 2454 bp, Escherichia coli
gtgaaaaatgataatgcagtgaaacacgatcaccagcctgcttctgaacagacgcgatctgcagacgacagtcagtcagtgcgtaaggtaagggaccccgtgtgcggaatgtccatcctgccggaaaaggcgcacaacagcatcagattccatgaccatcagttttacttctgctctgccagctgcgagagcaaattttcagcccatcccgatcattatctgagcggaaacgccagtgaaacctcccatcatcatgaccatcatgaagccagccctgaaagggtagaaccgtcacaccggcagagtaataaagcgatgtctgacggcgtgtggacatgtccgatgcatccggacatacgtcgcagtggtcccggaagttgccccgtttgtggaatggcgctggaaccggttgttgccacggcatccacgggccagagtgatgaacttcgcgacatgaccagacgcttctggctgggattgctgttgacgttaccggttctggtgctcgaaatgggatcccatttgtttccgcgaatgatgcaattactgccgccacagtacaacgtctggctgcagttgcttctggctactccggtggtgttgtggtgcggctggccattcttctcgcgtgccggagcctcgctgcgtaaccgctcgctgaacatgtttactctcgttgcaatgggcacgggagtggcctgggtgtacagcgtcatcgccacgatctttccctctctgtttcctgcatccttcaggatcatgaatggccaggttgccgtgtattttgaagcggcctccgttatcacggtgctggtcctgctggggcaggttcttgagttacgggcaagggaacaaacgtcaggcgccattacggcgttgctgaacctcgcccccaaaacagccagacgtctggatcctgatggccatgagacggatatcaaagcagaagacgtcctgcctggcgataaactccgcatcaggcccggagagagtgttccggttgatggcatcgtgctcgaaggccgtaccaccgtggatgaatcgatggtaaccggggaatcaatgccggttaccaaaacggaaaatgaccgcgttatcggagggaccataaatcagaccggtagcctcatcatgcaggcggagaaagtcggtgatgaaacaatgctgtcccgtattgtacagatggtcgctgatgcgcaacgctcacgcgcgcccatccagagaatggctgacagtgtctcgggatggtttgttcccctggtaatactcattgcagccgtcgcgtttgtggtctgggctgtctgggggcctgaacccagggtggcacacggtctgatagccgcggtttcggtcctgattatcgcctgtccctgtgcgctgggtctggccacacccatgtcgataatggtgggggtgggcaaaggggcccagtcaggggttttaatcaaaaatgctgaatccctggaacgccttgaaaaagtgaacacactggttgtcgataaaaccggcacgctcacggaaggtgcgccctcggtgactggcataatcagcctgaatccgggcggcgaagaggctctgttgcgtgtgacggccgccgtagaaaaaggatcacagcatccgctgggtatggcagtggtcaacgccgcacgtgaaaaagggatcacggtgccggctgtcagtgattttaatgccccgtcgggtaaaggggtttcaggggatgttgaagggcagcgggttatcatcggtaatgagctggccatgcaggaaaacagtatcgttattgagaaccagaagacgactgcggatgccctgcgcagggaaggcgctaccgttatctatgtggcgacagacgggcagcttgccggcctgattgctatttctgatcccctgaaagcaaccacgccccacgcacttaaggccttacgtgaggcgggtatccgtattgtcatgctgaccggggataaccagctgaccgctgaagctgtggcgcataagctcggaatagaagaggttgaagccggggttctgcctgatggtaaaaaagcagtgattagccgtctgaaagcatcaggccatgtggtggcgatggcgggagacggcgtgaatgatgcacctgcactcgcggcagctgacgtggggattgcgatgggtacggggacagatgtggcgatagagagtgccggcatcacgcttcttaaaggtgacctgatgatgctgaacaaggcccgacaactgtctgagatcaccatgaaaaatatccggcagaatctgttttttgcgttcatctacaatgccctcggagtgcccgtggctgcaggcctgctttatccggtgtatggcatactgctctcgccggtgatcgcagcagcggctatggccctttcctccgtcagcgttatcgtcaatgcgttacgtctcagaagtatcaggctcggcaaagaagcgcatgaataa

SEQ ID NO: 35253 - DNA, 354 bp, Escherichia coli
atgcgtaattcatttaaagcagttgtatttagtgctctttccgtcatgttttcagcggggctgcatgcagaaactcatcagcacggcgaaatgaatgctgccggtgatgcctcagcacagcagataattaagggaacgggtgttgtcaaagacgttgatctcagcagtaagaaaatcacgatttctcacgaagccatcccggcggttggctggcctgctatgaccatgcgctttacctttgtgaatgcagacgacagtattaccgccctgaaagcgggcactcacgttgactttacgtttgttcagcagggcaatatctctttactcaaaagcatcaacgatacgcaatcctga

SEQ ID NO: 35254 - DNA, 1479 bp, Escherichia coli
atgcgtaaaatgctctccagacgccctttctctctcgccctgcggctgaccttttttatcagcctgtccacgatactggcgtttatcgcctttacctggtttatgctgcattccgttgagaatcattttgccgagcaggatgtcagcgatctgcaacaaatcagcacaacaatgcacggcatactccagtcgccggccgatcctgatgaaaaaaagataagcaaaataaaggagtcgattgccagttaccgtaacgttgccgttctgctgatggatccgcagggaaatatcctgttcagttcggcacagggggcggcattgcgtccggcgatgaagacggcggacttcagctcacactgtcgcgcgcaggatgtttttctctggacggtggaagatccggtcatgcccgtgcacggcgggccgggcatgaagagggaaacctaccggattatcgcctcttcaggaaccgcgacactgcagggaaaaagccagaactatgttctgctgacgggtctctccatcaattttcatcttcactatctcgacgcactgaaaaagaatctgattgcgattgctgtggtgataagtctgctgattgtgctcatcatccgcgttgcagttcgtcagggacacctgcccctgcgtaacgtcagtaatgccattaaaaatatcacctcggaaaatcttgatgcgcggctggaaccctcacgtgtgcccattgagctggagcagctggtcgtctctttcaatcacatgattgagaaaattgaggatgtttttacccgacaggccaatttttctgccgatattgcacacgagatcagaacgccgattactaatctcgtgacgcaaactgaaattgcactgagtcaggaccggacgcagaaggagcttgaggatgtcctctactccagtcttgaggagtataaccggatgaccaagatggtcagcgatatgcttttcctggcgcaggcggataataatcagctgatcccggaccgggtcatgtttgacctgagtgcggagatcatcaaagtcttcgatttcttcgaagcctgggcggaggaacgtaacatcacattgaaattcaacggggtgcattgccttatcgaaggtgatccccagatgttcagacgcgccatcaacaatctgctctctaatgccctgcgctatacgccggaaggtcaggcggtaaccgtatcgataaaggaacaggaaaattatttcgaactcatgattgaaaatccggggaaaccaatccctgaagagcatttatcaaggctttttgaccgcttttatcgtgtggatccttccaggcaacggaaaggtgaaggcagtggaatagggcttgctattgtaaagtcaatcgtggaagcacatcacggcagggtccatgtagaatcggatgtacgctcgacacgtttcatattatcagtgccaaggcttgaaaaaataataaatagcaacccacaatcgtga

SEQ ID NO: 35255 - DNA, 432 bp, Escherichia coli
atgaaaaaaattgtactggcaactgttttaggttttggcctggtatctgcgtcatgggccgctgaaaccgtgaatattcacgagcgcgtcaacaatgcccaggctccggctcaccagatacagtcagcttctgtcccgtctgctgtccaggggcagacctcccggatggccggtatgaatcagcatgaacaggccatcattgctcatgaaaccatgaataatggctctgcggaagcgcaccagaaaatggctgaaaaccatcaaaagatgatgggaaacattgccgtcaacgatacccgcccgtcagtctcgttcgcagcgatgaatgaacatgaaagagcggccgttgcccatgaaaccatgaataacggccagtccggggcgcaccaggcgatggctgaagcgcatcgccgcatgatcaacgctggctga

SEQ ID NO: 35256 - DNA, 351 bp, Escherichia coli
atgaaaatcaaaacctccctcctggttattttaatgttatccatgcctgctatttctgctgaacactctgatatgaagatgggtgacatggggtcatccgcatcgtcgcaggcatatatgtccggcatgaatgacatgcatgagaagatgatggctgcggttaaggaacccgaccctgacaaagcctttgccaaaggcatgatcgcacaccatgaaggggcaatcgccatggctgaaacggagctcgaatacggcaaggatccggaaatgagaaaactggctgaggacatcattaaagcgcagaaaggcgaaatcgaccagatgaataaatggcttgataaccagaaataa

SEQ ID NO: 35257 - DNA, 1827 bp, Escherichia coli
atgcgactcagaaaaataaaactgacaaatttcaggggctacagaaacacaacggaaataaacatcgatgagggaatgacgggtattgtcgggcgtaatgatttcggcaagtccaccattcttgaggctctggctattttttttgaaacggaagggatgaaggctgacaaaaatgacatgaactgcttcagtctgagggaaggcgcgagccgttttgaaatcgcgtgcgagtttgatgatctgccggagtttatagttatcgacgaacgcgtgcagaccacactggcctctgaacatcttctcaataaagacggttatttcgagatcgtaaaatcctttaaagccacaaccacaggtaaaccggaacaaacctgcatccgctgcatgcatcctgcgcatgagcccctgagaaatttaatgggaatgaaaatggcggagctcagggccgtgggaaaagccgttgaagaaaatgtggcagataaacgcacggcatccttatggcgccaggctatcagggaagccgccgttccttatgactgtgcggaaattttactggatgtcgacaaggagcttggtactgacacaaaatcgttgtggggaaagatcctcgatttactgcccacgtttgcgctctttaaagccgacagggagagcagcgacggggattccgaagccaaaaatcctcttcagcaggcggtgaaggatgcccaggctgcactgcaggataaaatcacagcgctcgaaaatgaaattcaggacagtgtgctggatgtcgcccggcgtacgctggataaattacgggaaatggcacccgaactcgccagtgaactgacgccacgatttagggagaaaccaaagtggaccttcagtttcaccctggacggggaaaatggtatccccatcaataagcggggtagcgggataagacggcttattctgctgaattttttcagggctgaagccgagaaaatggtggcgaatacgcagcgaaatgtcatttacgccattgaagagcctgaaacatcccagcatccgaactaccaggtcctgctgatgaaagcgctgctgacgttagcctgccagccacaccgtcagattattgtcaccactcatgtgccggcacttgccggactgatccctgtcgacggggttcgttatgttacccgggatcggtcgggggagcctgtcgtaaaaatgccggatcacgctgtactgaaggaggccacggaaagcctgggagtgctgccggaaaccggcatggaaagagcaaaaggcattgtgctggttgaaggaaaatcggatgtcaccttcctgaggcatgccgcacgttcactgaagcattccggtgtactgcccgcctgcctggaagatgtcagcgttgtgcctgtgctgataggggggtgcgggagtgtcaagcactgggtcaccttaaacctggccaacgatctggggctaccctggtgcgtatttctggactccgatacgggcggggatccctctcaggtccagtcaattcagaagcgaaggaaagaagtcgaggaggctggcagggtgtttttcgccacgcgtaagcgcgagatcgagaattatctttgcccggatctcatccatgaactcactggcgtacaggtcgcctttacggacacctgtgatgcaaaaaaaataattggcagggcggtcggcatgaaacctgataatgtgcttgatacattctggccccggatgacgggggataaaatcatcgccagatccacctatcatgatggtgtgcaggaaagagtggagctgaaagagatcctgaccgaaattatctccatgacgcactga

SEQ ID NO: 35258 - DNA, 354 bp, Escherichia coli
atgatgtttgaatcactgaacaacaaaaacgactttagctataccttcgagaaaatccgtaatgccatctcttcacccagcgaaagtaacttgcatgctgccaccaatcttggactcaacatattgacccgaaaatatgatcagttccgtcaggaactggatgcggtaggtgaactgggtaactgggaatacgatctcgatacttacaaccactgtattgaggtgctgcagcattacttcaccggcaatccatccggactgacagaacgtgatgcccggatttacagccaatacctgcagactgagcacaaagggtttgtggagctggcgaaagaactgactgccgaccgctga

SEQ ID NO: 35259 - DNA, 726 bp, Escherichia coli
atggctgactggtttattgcgactgaaggtgtgaaggtggtcaaggacagcgccagcctgtggccacagatcatcacggcggtttcgtccatcggagctgcgctcggcggcgtcagcctgactcaccattttacccgcagacgtgaggaaagggccgctgcagcgaagcagtccagtgaacgactttttattgccacagagctggtctttttactcgaacaatttgccgaagcctgtgccggagtcgcaaccgatcatggctacttaaatcaggacaggattaccgttccggcaacagatgttccgaatctaagttactccgcagtcacaggcgactggcgggttttgccggcgaagctgatgtatcgtatccgggaattgccggttattcagggagaggccgatcgcgccatcgccgctgctgaagcttaccctcctgactacgacgaattttttgaggcacggcagtatcagtacactcgcctcggcctcaaagccatcatccagtcgcgccgtttgcgacagtttgcaggcttacctgacactcgcctcgatgcttctccttggtcggcgcagaacgtgctctggaaggagtggcgtcttgaaagaaaacggcgacaagcccatgcgctattgatggctcagtctctggcgacattcagaattgtgaatcagctgcgtgatgacaagaggaaaggccctcatgcctttgaaggcgataattag

SEQ ID NO: 35260 - DNA, 348 bp, Escherichia coli
atgaaaccagattatctaaacactccatgtgcaaacgagggcgctgatgacgtcatcgccttactgaaactgtgccagcaattgcagtctgaaaaggacggcagggaacgtcctgcgcccgggacatattcccgcgatgaggatgaatttgccgatcgcatccgttccgcatgtgtgcacgccctgcagctgcgccagctgctgccggtagcgacgaccctgagcgccatcggcgccgagatggaacgccggggagaaatcagtgtgctcccgggcgaggattacgcgcagaaagcactggcacgacttacagtgcaatacctttccagcggagacaatacacaatga

SEQ ID NO: 35261 - DNA, 642 bp, Escherichia coli
atgccaatcattgctaatgctcaccctaaaggcggtgccggtaaaaccacttcatcagttaatctgattggtgaaatggaaacagatgctttggaccttgatacgcataccgggctttcaatcattcttggactccgtccagcagggaaagagatctccgttaaaatacccaataccgttgaagagctgattgagataatgacaccttacaaaaacagcgataagacgttgtttatagattgcggaggtttcgactcggatctaacccgaactgcagtggcattcgctgattgtgtcatcgttccttctaaagactctctcacagagcgaattgggcttatgcactttgatgccgttctcgatgaaatcagtgcaattatggaaactgatatcactgtcaatctttatctgtgcaaggttaacccaaacaaaaagagcttcccaaaactggaggctctactcccttccttaaaacacgtgaagctgatgaacagtcgtatttctacacgtaccgaattcgaagaagttatcgaaagcggaatggggattaccgaaactgtacatggacgagccactccaggcggcaaagaagtcatagccttagtccaggaaattaagcagctattagccagcaaaaattaa

SEQ ID NO: 35262 - DNA, 342 bp, Escherichia coli
atgagcaaaaataaatttaacgaacaggcagagaaactcaaaagcttagttggatcagctcggctacaaacgtctacgccggttgctgttactaatgatgcaaccaaagtaggtgagaacattggcaaagaggcgaatgtagaacctgaaaaaacgactctggtctccgaacgtcctgagcaagccaagactaaagctaaaaatctcaaggctattcctctttcatactttgaggcccatgctgaacttaaggcaaccagtaaaacgtctttggacttcagctcatatatcatcgaagccatcagagagaaactcgagagagacggagctattggtaagtag

SEQ ID NO: 35263 - DNA, 516 bp, Escherichia coli
atgcgatccgctaaacataaaccgctagaactatgggaaacaggtcaactttgcgggcggtccgggctatgggaaacaagtcaactttgtaggcggttcgggctatgggaaacaggtcaactttgcgggcggtccgggctatgggaaacaggtcaactttgcgggcggtccgggctatgggaaacaggtcaactttgcgggcggtctgggctatgggaaacaggtcaactttgcaggctgtttgggttatgggaaacaagtcaacttcgcggactagccttgccgtgggatacagctcaaacatcatgggctgcccggaatgtgggaaacaggtcaactttgcagtctgttcggccatgggaaacacgtcaacttcgcagatggtcgggactgtgggaagcaggtcaactgtatagacggctgggattgtgggaatacggtcaactttgtgggctgccccgaatgtgggaaacaggtcaagttcggtacgtgatgtgggaaatacatcaagtttag

SEQ ID NO: 35264 - DNA, 957 bp, Escherichia coli
atgaaaattttcattgatgacggctctaccaatatcaaactgcagtggaacgaagccggacaggtcaggcagtcaatcagccctaacagcttcaaacgtgaatgggctgtggcgttcggttctcagcaggcgttcaactatcaactgaacggggagcagtattctttcgacccgatcagtccggaggcggttgtgacgactaacgttgcgtggcaatacagcgatgtgaacgttgttgccgttcatcatgcgcttctcaacagcggtattgagccgtgcgaagtggatatcgttgtcacactgccgctggcggagtattacgacaagaacaaccagcccaacgaagcaaacattcaacgtaagaaaacaaacctgctgcggccggtcgaacttaatggggggaaaaccttctctgttcgtcatgttgacgtgatgccggaatccatcccggctggtttcgaagtcgttaaaaacctcaacgagcttgattcactgctgatcgttgacctgggcggaacgacgctcgatatttctcaggtgatggggaaaatgcgaggaatatctcgtatttacggtgattccacgctgggtgtctctctgatgaccggtgccgtaagagacgcactttcgctggctcgcacaaagggaagcagctatctggccgacgatatcatcattcaccgtaatgatgcggcctacctggcgtcacgcattaacgatacctcacgcatcgatcttgtttgtgaagcaatgacatcggctcacagccggcttgttaacagggttattgaagctgtcagtcgctttgagggatactcgcatgtaatggtcattggcggtggcgccgaactcattgcagaggcagtaaaaaaacactgtgcagtcagggaagaacgtttctacaaaaccagtacgtctcagttcgacctcgttaacggtatgtaccttattggataa

SEQ ID NO: 35265 - DNA, 387 bp, Escherichia coli
atggatacgcgacgcaaaattacgttttacctgaatcctgaaactaacgaagcggaccgctttgtctgccagaaaacggacgaaacgcctcagggggatagggggcgtttatggcgcgccgcgctgcttaccggctttgcatttggcaagcaggatgaacggctgccgttcctcttcagcgagctgcttaaccgcgatacgtcatttgatgacctgctgcagctgcttaaagccgtttacccacgcgaaaccgaggctctgctgcagggcagggcgcgagaggctgtacctcagtctccagagcagatgagcaattcggtaacgtctgatgaagaaacccgaaataatgcccggagcatgttcggcgggacgggaaacaatgtctga

SEQ ID NO: 35266 - DNA, 324 bp, Escherichia coli
atgtctgatctgcaggagcacggaaagcttatccgccagttcctcaaagcggctcgtgagctcgaatccctgaatgtggtcgatggcctggaaaacatgaccataggtcagctgcgtgatgagctcacgcgtcgttctacgcctggcgcagggtataagcagcagtacccgcgccacggcgctaaatgggaggaggaggaaaagcagcaactcatcgctctggcagaagccgaaatgctggatgttgagcagttcgctgaagattatcagcgccggcctgagtccattatgaaatacatgaaaaagctcgggttactggattaa

SEQ ID NO: 35267 - DNA, 780 bp, Escherichia coli
atgaacatcgcttaccgtcttatccatcgtcatacacgcaatactcttatcgcgcgcggctggcctgcagatctgaatattgaaaccagcctgaattacgttcgtggagagggagttgccttttacggcagccttgctgctgaggatcttgtgcgtcttcttcctgagattgctcttcgtggcctcatgagtgagaaattactgaacgacgtcatgccacttattcagggtagtacgttcgttgttcgtctttaccgaaattccctgggccatcgtaaggcacacgctggcacgatttctcttgaatatgacaactgcccagtggccatgagtacaaaacaggttattggtctgctgaaagctctgcgtgacgagatcaatcatctgtgcagctgtgtggcggccgctggatatcatctgacaaaagctatcagacccgctgcggagccattggtatttacacgaaaaacccgcaacttcactctgatcgttaccgaagttgaaccggaacatgacgaagctgagtgggataatgcgactgtggatcaccgactgaaggctgttcttgacgaaaaaaacgccttcagaagactggaaatccgtctggagtgtggcggtcgcctcgttggacagacgcatgccccgtttgctctgcgtcatcctgaaagccccgttcggacatggttcgagcgacgctggctacgtgaggtgataagcgaagcgagggcagagatcgagttaatgatgaaatccttttccggtatacgtcttgttgcatag

SEQ ID NO: 35268 - DNA, 501 bp, Escherichia coli
atgagcactacaaccccatctgtttatgttggcacctatcacaaatataactgcggcagtattttcggaaagtggtttgatctgacagattttgatgacgctgaagaattctatgcggcctgtcatgagttgcatgcggatgaagaagatcctgaattgatgttccaggattgggaggggataccgtccgggtttggttctgaaagttcagttgactgggaatttattgcgtcgttcaggcaggccaaagacgaagggagagatgcggctttcgtggcatgggcaaactataccggtgaatgtgactatgccgattttgaaagcgcctattgcggggaagctgaaagcgaagaggattacgcttatcagctggttgaagatacgggcatgctgagcgaagtccctgaatcactgcgaaattacttcgactatgagtcatatgcgcgcgacctctttagcagtggatacgtctttcaagatggttttgttttcagcaactaa

SEQ ID NO: 35269 - DNA, 180 bp, Escherichia coli
atgaaactagataattcctctcgcgaaattcttaaacagtacaagtcgatcataaatagccgccgccgtgcaaacggacaacgggcactgacaacagatcaggttatcgctgaaatcctggaatatatgacctttcagagcgcggttttcctgggcggtcacttcatccaacagaaatag

SEQ ID NO: 35270 - DNA, 330 bp, Escherichia coli
gtgggcaagtcactaaaagaatttttgaatcaacccgtctttttacgcgaacccaccgctgaagagattgaactggcggcattactgaatggcagtgtcgtcaattctcctgtggcgctgcctcaagggccattttctcgtgaagaggcaaccgccctggtggcgcagtacaccaatgtcagtatcgagaacgagcagggtacctttttccagcttgttgtacgggatgaagaagggatgttgaagaaatgcgcgtggagctttgagactgacgttggggcattactgaacagcgcccttgccagctacagagccaaaaaacagcagtaa

SEQ ID NO: 35271 - DNA, 1968 bp, Escherichia coli
atgacaattgcagatgttaaatcaaaagcatcaaaaaaggccagcaagaataaaaccgtggtaaacgaggcgcttaaagctgccctcgatgccgctgtcattgagtacgttccgctgtccgatcttattaaatcaccgctgaacgtgcgcactatcccctataccaccgagagcgttaagcggctggctaactctattgaaagcctcgggctgcttcacaatctggtcgttcactccctgccagagggtaaatcaggtgtggccgcaggtgggcgacgtcttaccgcgctgacgctcatgtccgaaatgggtcgtatcaaacctgattatttggttccggttaaacgtgtcagtgacgagcttgctgttgaggcttcttatgccgagaacaacgaactggaaactatgcaccctgccgagcagatcacagcgtttggaacgctggcggcgcagggaaaaactcccgcacagattggcgatgtgcttggctacggctcccgccacgtccagcgcatgcttaagctgtcaaatctcgcgccctcactgattgaaaagctcgcacaggatgaactgactgttgagcagtgtcaggcgctttgcctcgaagatgatcagtctcgtcaggtagaagtctatgagagcgttaaggccagctgggatagagcgccagcgcacctcctgaaaaatgccatcacggacactgaaatgcgtgtcgactcccctaaatttttgtttatcgggcgtgaagattacgaggccgcagggggatatgtgcgcgaagacctgttcagccagcaggaaggggagggaaccgccgacagcgtactggttgaacgtctggtgcaggaaaagttggatcgcattgctcaggagattcagcagcaagaaggctgggaatggagccgtggtcgtgcagcccgtatctggcatcacggggaggacgcgaacgaatttgtactgccagatgttcccgatccggtttatacacccgaacagcaactgcgtcttaacgagctaaaggagcagtgggatagctatgactcccgttgtgaggagacagatgcacttgaggaagaaatcaacgcgatagaacaggccggagtgattagcgcgtggactgacgaaatgaagtcaggcgcgggggtggtggttagcttgtataacggacaggtgaatgttcagcgcggcgtccgtctgaaagctgatatgccggaagaaaccgaaagcagcagcgtcacaatcccgtttagctcgcgtcagcccgatgccgccgaagggatcagcatcccactgctcaccaaaatgtcatccgagcgcactctggcggtacaggccgcgctgatgcagaaacctgaaaaggccgtggcgcttatggtctggcgtatgtgtacctgtgtctttgctggatgtgtgaccacgccgcatccgttccgaatcagcctgactgtttcacacggcagcctgacagagaacgctccgtccggtaaaggaggcgcagcatttgacgtcctgatgaccgaaaaagagcgcctgaaagccctgctgccagcaggatgggagaaggacttcacgaccttctttgcccttgatggtgaggtacttatgtcgcttatggctttctgcgcggcctgttccgtggatggtgttcagacccgcgataacggacacacatcacgtagtcctctcgatactgttgaaacagcgattgatttccacctgcgtgactggtggcaaccgaccaaagaaaactatttcggcagtctgaagcatacacagattgtggaagccctgaaggacgcaggtcttactggcgcagcgggtgatgcagagaagatgaagaagggtgatgcggcaggacatgcggagttcttcatgaaagataaccgctgggttcctgcatggttacaggcaccgcagcatgacgcaactgaaagcatcgatactgacaacaaagcgattgccgcctga

SEQ ID NO: 35272 - DNA, 423 bp, Escherichia coli
atgaacatgcctaactttaaactgaccaccatgatcggtgaagatttcgaaacctgccgcgccgctggctattcctaccgcagagagatgacacatgctgtcatgggcgctctgaccacacctgaaaactgggatgtaaacggggagtatcgtagcgagtttgggggcttgtttcccgtacagatacgttttgctcctactcatggccgtttcgaaattgttctgtgtagccctggtgagtttagtcagaactggatcatgctgttggtctggagaaagggacaggaagtttcctgtatccgttccagtgcactattcgattcgattgttatcaaccatgtgcttagcctcatcaacaggctggacagtgacggatattcaatattcgatattctcgcaacgttgcgcatggaggtggcctga

SEQ ID NO: 35273 - DNA, 726 bp, Escherichia coli
atgatccctcgtcatctttcgctcgtcacgcagctgccggagcgtgaggctgcaattaatgccattcttcatgttgaagaaaatctcagggctgtaaatcgctgtcagccttacccgtatgccagagcatttttccgctttctgaccggcagcagcaaaatcagcagccagtcactgaaccgcgttcggggagtgtactggctcaaagaagataaaattccgctggcaagctatgaggaggcaatcgacaggctaatccgctcgcgcggtaaatattgctggttcccgctcgatggcacgctggctcacaccttattccctgaacaagcttttagcgtaagtgaacggcaaaataaacgaaataagcgtgaggcggtacagtacggcaggcaggaggagcgacgcgctcaggaaaaggaagataaataccgtaacctcgttggtaaagctgaaatcgacctggcatttcagaccccggaaacgctgcgtgcatggtatgagttctggtctcagcaagatatacgggactacgacatccagcgaatgttgtgggcgtggacggaacgtagtccgtcattgtctcatctggtgaaggcttactacgactgtgcgcatgaaatcgtacttgatgtacatgatgtggcggtgtcctcgactccggcggagaaagaactggagcgttggatggttccgaataaaatcacgctgaggtccgtatggccgtaa

SEQ ID NO: 35274 - DNA, 231 bp, Escherichia coli
atggccgtaagaaacaatccgtggaaaacagaattgaaggttgcccgcagccagcgtaataagctacgaaccatgtccgaaaagctgaaagacatgtgctgtgagtgggacggattaagcggctggctggagacagaaagtgagcgactcgcggaaagtattgatcagcatctcgaagcgctggacgaacagatacacacctggtctaccggaagaagcgagtctgattaa

SEQ ID NO: 35275 - DNA, 162 bp, Escherichia coli
atgaaactgccgcgaagtaccgttatctggtgcgtactgatagtgtgtctcacactgctgatattcacttacctgacgcggaaatcgctttgcgaaattcgcctgagggacggacaacgggaggtcgctgcaattctggcttacgaatccaacggtaagtag

SEQ ID NO: 35276 - DNA, 345 bp, Escherichia coli
atgcaattgaatacaaatgaatcttctgccctgctgggcgttgatgcgagcgctgaggctgagcgagcgtactggttgagccgtgaaaaagcggctgtttctgcccctgttgagattgacgtaaccgcatttcatgaagcggcggggctgatgctcccaatgaactggcgctgtgataccgcgcaggacacggaaagcttcatgcttgcagagatgtactgcgggaacgtcactgaaatttatatgcgctgcggtaaacgctatttccagctacgtgattactccaacctcaatcactcggaaatcgttaagagggtgcgggaggcattcaggccgaaacaataa

SEQ ID NO: 35277 - DNA, 828 bp, Escherichia coli
atgtctcaactgaattttgcagcattttttgatcaggcaaaagaatccagcaacgaccgcacgtctccggacgttccgcccgtagccgtgcggtctgaaacccacagaatgatgagctttgatgtggcaagaaagcagttcatcagtatttttgctcatactgctcgccaccttcgccgctgggacgtttttagcgattttataacacttgcagcaagtgagatggatcttgcccgagtcagaacggctgaaaatattgaacgaagccgcaagattttaacccgctatgaaaagaacgatatagataacctgcaccggcttttccagctgatgatctgcgcgctggaagctaaatttcacgattttctgggttcgatctttatggagcttgagctggggtcgggcgatatggggcaatattttacgccttacagcgtccagtctttaatggccagaatgcttattcctggtattaaggagactatcgaccgtgaaggctttgcaacaatcagtgatccggcgtgtggctcggccggaatgatagtcgcttatgcagaatgcctccttgaagctgatatcaacccttctgcacacctctttgcaagctgtattgatatcgacccaatcgccgcagatatggcattcatacagctttctttattgggtatagctgccgaggtagtaacaggaaatacgttaacgatgcagctaagcagagttcgttatacccccgtttactacctgaatggttttgaagagaaactgaatgcgcagcggcgtatcaaggccatgctcgacttcatgcggggagcacagaaggctgcataa

SEQ ID NO: 35278 - DNA, 219 bp, Escherichia coli
atgaaaagtggcgtatatgcctatgacgatgagttacttcatctggtagtagagggtgatgctgggtggaaaactctgtgcgggattgagccagattatccgtacactcgtcggaaaggaaaggctgtcgtagcagctgttacgtgtggagaatgtcagcgtataatttcgcaggttcgccagtataccgggatgattagggtaaaaagattacattaa

SEQ ID NO: 35279 - DNA, 321 bp, Escherichia coli
atgacgggatatgaattgagactatggcgaaaagggctgggctggagccaggataaagcggcggaagaattgggagtgtctctgcgcacttacaaggttttcgaaaagtcggagcaagtaagccgcctggtcacgctggcaatagcagcattatcggtaaacgatatgctgcccacttttttgagcagaaaaaccaacaaagataaagtgctggctatccttcaggcaaccgtttccgataaagctctgggcagaacaaggccaaatttcttagcgctaaaagagtctgatcagaatagcgctccggttgttagtctttaa

SEQ ID NO: 35280 - DNA, 423 bp, Escherichia coli
atggacgatatggttttttacccgaaagggcagttgttttttgaggaagccattcacgacggtaaccagttcgtgactcgctacggtaaacagccgctggatgttctgaacatgcaggccgaacagtacgtactggtttcccggaatgaggctgttgaaatgatccgtgaagcagcgcgtaagccagttgaagaaatcactgcggagatttttaacgaccagcttgaggtgatgccgcctatcgactggtacggaaaaggagacgatcagtcattcaaattagctgagatgcacgcggaggacgtgaccgatatttacgcctattaccgtggccgctacttccgttttcgtgaccgcgtgagcatgaaacatagcgaaattattcaacggatagagcaggaggtgtacgcaaagcagaaataa

SEQ ID NO: 35281 - DNA, 243 bp, Escherichia coli
atgaaagaccactttatcattgcatgccgtgattacattgtaaataacaaaaacaagcgtcctcacaagcgtaagcccgccgagatcattcctgctgacgtgatcgctcgtcgtattcaggcactagggaaaattgtggtacgcgcagaacgccgccataaacccgttcgtattccggctatgagctgcgcagagctggggcacttcctcacctcgacggaacaaacccgtgtaagcgcatga

SEQ ID NO: 35282 - DNA, 570 bp, Escherichia coli
atgccaaaatattatctccagaatgcaccgcgcggtgtaaccgctatccagctcgataacggtgatgaagctgtctatcttgatggtgagtttattgcctgttgtgatctgggggaacgtgacgatccggtaattgaattaggcgaaacccttgccagaagtatgggggtgccgttccgcctgctgacgctgcccgttcctgatgatgaggaatggtcatggaacgacgttaccgatgcgctgaactggggcgcgcgagtgcagctacccagaatgatgttacggcctgtcctggagtgcagcacatcccatatcacggaaggtgacaacgcattgttagagaatctgggttcgagccatgaggatagcgggtggatcttaaattccggagtggggtacttgttacgccttgatgccgtctacgacccgcttattaggttgaggcgtctcggcatttccagaacgacacgggcattaatagcccgagccagacgtcaggccgatataagcatgattcatttctcagctgtaggtgatgaaatagaaggtgcaccgacatttgactggtaa

SEQ ID NO: 35283 - DNA, 834 bp, Escherichia coli
atggcccgtttatcttcatctttccgtaccgcgaacgttatccgtaaagagcgtgcattgactaatgatgaacttatgcgcttcgttccaagcgtattttcagaggaaaaacatgaatcacgcagtgagcgttatacgtacatcccaaccatcactttgctggacaatctgaggaaagaaggttttcagcctttctttgcctgccagacgagaacgcgtgatatcggaaagcgcgaacataccaaacatatgttgcgcctgcgtcgtgagggagaaattgcaggtgaagaggtgccagaaatcattcttctcaacagccacgatggtagcagcagctatcaaatgatccctggcatgttccgcttcgtttgcatgaacggaatggtttgcggaaaaacctttggagagattcgcgttccgcacaaaggtgacgttgtcgggctggtgatcgagggcgcgtatgaggttcttgaaatttttgacggtgtaaaagaatcacgcagtgagatgaaggaaatcagcctgagtaaggatgaacagcgtatctttgctgaaatcgcacttaactggaaatatgatgataaaggtgtcgggaaacatatcccgcttgtgcctgatgatgttcttcaggcgcgccgaaatgaagataaaagcgatgacctctggacaacttatcagcgcgttcaggagaacatgacgaaaggcggtgtatgggggaaaacggcaaagggaaaattccagcgtacccgccccgttaatggaattgatggtgacgtaaagctgaaccgcgcgctgtgggaaatggccgaaaaaatgaaggagcttaaagcctaa

SEQ ID NO: 35284 - DNA, 324 bp, Escherichia coli
atgtctgataaaaaatggtatagcgaagaagatattgtactggctaaagatgcgcttagtgagctcccggatctttcaaagaaacgtcttactaaaactgacgttcttgagcagctgcgtgaccagattatcgagctgtcagagaaaaaaggttatagcatcgaggatatacgggatgcgctttctacggctggtatcccaaccagcgtgaaagcaattcgggaaatactgaatagcaaaaagaaaaccacaagccgggccagcaaaaccagaaaaaattctcaatctgaaagtacgcaagattcaatgaacaaaactgcctga

SEQ ID NO: 35285 - DNA, 345 bp, Escherichia coli
atgagtaagagtgaaagacgccagcgatcagcgttgctgggcagcgttcgttgttatcctgaagagaaagcgcagatacaggaaagtgccaaagctgccggcatctcaacaggtgaatttttgcggcgagctgctctcggaagacgtattgtcgcgaaaggcgacacccggcagatgaatgaaatccttaaactggggggcctgcaaaagcatctttatacagagatgcaaaagcagggaatgatgactccagagctgagtaagcagtttgccgagacacttgctcagttgcagaagacgttaatgaaattcagggctgacagcctgaacaatacagaggactaa

SEQ ID NO: 35286 - DNA, 1932 bp, Escherichia coli
atgcttgcggtagtggctgaacgccgtcgtgatggtaaatcaagctttgttcaactcgtctcatataccatcctgcgtgatgatgttgagatgagcgaaacgctatcgcctgaaaaaccctttgtccgtaagtcccgttctgaggacaagattttcaatgacctggtagggtatgcaacgcgtaatgcactacccgattcacaggatgttatcgcaacgttcccggacggacgccagcaggtgcgttgcgataaagtcatctgtgaaaccaactgcttctctctggccacggcatccactgaaatggatatggttgccatgcaaaacacccgctgtaacgaccctgtatatcacgtcattctgtcctggccggaatccgagcgacctactccagatcagatttttgattcggctcgccattgtctgaagcgtatgggtatggaaaggcatcagtatgtcttcgctattcatgatgatactgataatttgcattgccatctgacggtgaaccgcattaacccggtgagctataaagctgcctcattgtataacgatcacttcaccctggaccgctgttgccgtgagctagagctgaagaacggctggaaacatgataatggtccatacaaagttaacgaagacggcgcgatcgttcgtaaccgcagcttctataaatctgcgccttcagctgcgcgccagctggagcactttggtgataaagaaagcctgttttcttatgctgtagataattgccgcgaaaaaattgatgaagtgtttcttcagccagactatacctgggatgatgttcataacgtattagtttcagctggactcgagctacgtccgaaaggtcagggcctggctatttatgatttggggagcgatacccaggcacctatcaaggccagcgatctccatcctgaacttaccctggacagtcagcaggaattaatcggtaaattcattcctgccacgattcatcgtgaaactgatcacgtgggcagagaacgtttgctgagcacggtagatattcaaacccagtacaatgatcgtcttcatcgtcgtgataagggcgcccgctctgaacgccgtgttcagcgtgccgtagctcgtcaggatttaattgcgcgctataaagcgtataaaactgcttttgttcgccctggaatttcggccgacaccgtaagaacacgtttccgtgaattgtcagcaagctatcgtatccggaaaaataatgtccgaatttcacagcgtgatcctctgcttcgtaagctgatgttccgcgcgctggaagtcgaaaaactgaaagatatggccgctttgcgtttgcaaatacgagaagagcgtaaagcgcttaaagagatgccaggttcccgaccgttaccgtatcgagcatgggtagagatgcaggccaccaaacatgatgctgctgctatctcgcaacttcgtggctgggcatatcgggagaagcgaaacaatcgcacggcagccatctctggcaacatcatcctcaactctgttgcagatgatatccgtcctgctcaaattcgtggttatgaaacacaggttaaccgcgacggtgccgttgtatatagctccggtggcaaccctgtattgcttgatcgtggtttgcttattgaggttgccgatgcaccggcagagaagggtaaaaacatcgctatggcgctgcacatctgtggtgagaagagtggtgaaaaagttgagatcagaggggataaatccttcgttaacgggaccattcaatacatccctcatttcaacgcatcgtcaggaaaaacagttccgttgacgcaccctgttcagcgccagcaggcaggttatcatgccccgactgagacccggcatgatgccccagctgcaggcggaaatatgcggcctcatgtaccgcccaagcccaatattaagaactaa

SEQ ID NO: 35287 - DNA, 1014 bp, Escherichia coli
atggatgagaagctaaaacatgcggatttatcgtctttgccagaaccggtgagggaagccgccagggagcttgttgacctgaagtttcgtatcgatatggcagcaagaggcggtacgtcagggataccacttgacctgcatgggaccatgactggaggagagtgggggccgcatttcgggcaggaatttttctgcagcatcattccttttttcccacgagattttgaaacctgctcggcaactgaaatgctggttcctaccttacataccttcggctgcagctggcgttggtggcccgaccgttattgtagcgacaaagatgaacacgatatacggcgccacattttttctgattacgggctgaaaagtacgagctataccttcattcctcagctgggattgttctgcccgggtgaaggtaaaaatcgtgttaacttctgccgccatcacggtatcgaatatatcccggcacgggtttatccccatgattaccctgaagcaaatcgaatctctgtgtacgttcaggatactgcaggagggctggatgtatgggccgttcttgataatcgctatgttcagaaggttactcactatgcctttgcgctcccacttttgcgcgcttatggggtagcgttccccggtaagtggccagcaggatggccatcaatatcggacctcctggctaaccagctgtgttgcacggatgagactacctttcacaaacccgtgatcgatatgcatgctgtcagggatgtgctggatcgtgataagaccagcagagaggatggggagatgtatgtcaaaaccagtgtgcatgaactgcccctggccgggctggttcgctttaccctgatcgcaatgttattgagtttaggtgcgctgttcatctacgagatactggatgagggtatcctgtccaagattgcactgggaataaccactttcatggctggcgtggttgcttcgttttttatcccggcgttccgtatcaagaaaaaatatctgcgcaaatag

SEQ ID NO: 35288 - DNA, 480 bp, Escherichia coli
gtgacgattttactagtacctctgacgacatcaggtactgaattacgcatcacctcgggattctctcccgggaagggcgcaattaataacattctgacggccattgacagcgctcatgagaccatcgacgtcgctgcctacagttttacgagtaaagagatcgcattagcgcttgagcgcgcccaggagcgcggtgtcagggtgcgagtaatggctgatgctaaagataatggagggcgatactctgccgtgacctggttacagcacaaagggattccggtaaaactaaacggccagtacgccatacagcataataaattcatggtggtcgatagcatcacaacccagacaggctcattcaactacacctcaagcgcagttaagcgaaacgcagagaacacgatcgtaatctggaatgaaccttctacagctcgcgcttatcagcgggagtttgaacgcctctgggaagaatccaattag

SEQ ID NO: 35289 - DNA, 2331 bp, Escherichia coli
atggatctaaaaagtcgccatgggccgttagaaaacaggctcgttagccggcaagtgcaggggcgcctggcagaacgaataatgcttgccccgttctctgtacagcttttcctggcgtgctcgcttatttttggtgtggtatggcccgccacccttctgctgtctttgccatttaacatcatcctgctggtcgcattcagcgatcagcgttttagattacccctccggataccgatggatgtaggtggcttcgacatctccactgaaagagaagaaagctggaatatcccttttctgaaactgaatctgcctaagataatcgtgggaaaagcgaaaggggtcctctgtcttggtataggacgtggccgtgaccgcggcaaagagttatggcttgaaagctctgatgctctgaggcacatgcagatcatggccacaaccggtggcggtaaaactgaaaccctctactcgctgtacttaaatgcgctgtgctgggcgcggggatgctgcatttctgatggtaaggctcagatagatctcgccgtggcaacgtggtcaatggccagacgttttgggcaggaggacgactggcacgttcttaacttcatcaccggcaatgacgaccgcttcaaaaaactgatgatcggggataaatcccgccctcagtccaatagtaccaacccgttcgcctatggcagtccgaccttcattatccagctgatggagtcactgttgcctgcaggaaacggcagcgatgaaggatggaaggataaagcccgagccatgatgaatgccctgatctacgctctgtgttataagcgcgcgcgcgataacattatgctgactcaggccgtcattcagtcctatctgccgcttataaaattcgtcgggctgtatcgtgaagctcttgaagagggatggcacgaagagggctataagcccatggaaaactatctggccaacctggccggctttgatatgaaactcatcaaccgccccggggaatggtcccagggcgcgcttgaccagcatggctatctcatccagcagtttacccgcatgctcagcatgtttaacgatacctatggccacgtctttcccaagaacggtggtgatatcgatatgcaggatatcctgcataacgatcgcaccctggtagtgcttattccggcgctggagctttctgataacgaagcagctaccctgggtaagctgtacatctccgacatcaggatgaacatcgcaaaggacctgggtaacaaaattgaaggttccccggaacacacacttacggtgaagaaattcgccagtaaattcccgttcatgcttatctgtgatgaggttggttactatttcgcaccagggctggaaaagcttgcggcccagatgcgaagcctcaaatacatgctggtaattctggcgcaggacctgcaggcgatgatgcgccacgggaaagaggttcattcagttaatgccaacctcggtaccaaacagtttatgaaaactgaggataccgaagatacgctgaagatgatcagggctgttggcgggaccgggcagtacgctgagcagcgcaccatgagccgaaccggcatgggaggctacgaggacgtggatcgcgttgagttcagagacagggataacatccagctggatgagctcaaggctctcaaggaaggacagggcatcattgtctttgaagatcgccaggtacgtagcagttctatctacattcctgacaacgaaaagatttcaaagctgaacgtcaaaattaaccgttatgtacccttacggcgtcctgacttcagtgatttatgcaatgaagtacctgcagctgcgcgccggcgcccagtctcacaagatcgagtttctaatattatcgatatctgtcgctcgactttactaggggcatggaatagccgccttaatgctcgcttagccgataagacgctgatggccataaccagtgtggccaccgaccttgataaccgtgacgacctgaatttcacgccagaacaacgtggcattctcttattcgaaacggctattgaagccctggagcaaaccggtggacgctattactggctgaaagagcaggaatccattcgtatttccaaaaagcgaatcgaagaggcgcacaggaacagtgccggcattacgcttccttccacttcacaaagagagccggtaccggaccaaccacctccgatcggccaacatgtatcccaaccaatttcagagagcaaccgcggttatgacgactggtatcagaacattactcagcacgattatagtgacgattttactagtacctctgacgacatcaggtactga

SEQ ID NO: 35290 - DNA, 1065 bp, Escherichia coli
atgtcagaacaaatcgtaaaccaaactactaccgaaattcatggacaacacctccagattcgcctcaatggccatagcctgtttaatctctaccggccccttaatgatcgctaccagctgacgcttgagctggataatggactgcacactatctggctgcgccacgcttacaacggcgttgccaaactgttttcttcggaagaccaaaagctcgctgaaagtatcatggacgctacggccaatgctctgcagagcatggccattaatgctcctgatgctaaagaacaacgcaaatctggctttcgctggttgattccggttgctatggcggcgtttctcgttggctcatggaccacctgggtatggcattcatcttcttcagtacaaccaccagtgccagtaatggcatcccagccgccggcattaccccatgaatcaccccctgtaggatcaccggcccctgtgctcgtaaaaccggcacctgcagtatctgttggttccactgtgccggctgtatcaactccaccggcagagcctggttcgctttcagctgaggaagctgctgaagcccgtaatctactggctacacgtctgaagaacggtgctgcaaagcaggagtttactattcagctctcttctggccacccgcgaacgctatacatcttttccgatccagagtgcccaaattgcaagatttttgagccgaccgtgcaggctttctcctcgcagtacaacattgagattttccctgtaacgctgattggtaaagcccggacagcagaacaggttgttccaatgctgtgcgcacctgcagataaacgggcggatatgtggcgcggccttttcgacattggcgccggcatgctgaacccgagtgcgaaagctgatacgccagcctccagttgtgaagcagggcaaaacgccctggcccgtaacgatatggcttttgaactctacaaattgcctggcacgccgaccgtcataaccgatgacggtcgtcttgttccattacaggccatgacaagcgatgcagctctgcaggctttcatgaataacgcgcaatga

SEQ ID NO: 35291 - DNA, 1263 bp, Escherichia coli
atgtcacaacctgtccgtaaggacgttcagtctaataatgactggacgatggccgctgtcggcctgtttatcacaataatggtaatggctttattttttcggcagttaaccattgaatgtacaaccacccttctctactggctctggaacctggctgactttccgcaatttcatagtgcagctgcgtggcgaatcaacttgctggccaagacgcataacattgccgaaaacgtgtcatggagtgagtttttcactgtcatggatgccacggcaggtattttgctaatagctctggtaccactggtgatcgtcggcattgttgctgttcgtcggcaccaggcgagccgaaccagccgtgatatatccattaatacgctgccacgaatcatggcacagttctctcctgccatactgccggcactgagctatggggacaggaaaacgcagctattgaatgtagatccggctgaacatcgcagcgcgatgacgccagatgaatttgtcatcgagcacaagcttgttgttaacaaccggttgaggaaggaccaggcagaaaaactcttcatcgagcagctgggtacaccgctgcagcacgatataaaagactttgaccgcttcaacgatcatgaacgcgcaatgttcgcgatttttgggttgcagcatttccttgataaacgtggcgaagcggagcagctgttagatgcactgaaccgctccactcttaagtcagaccgcaaataccgcaacaagattggatatcccaacctctcgctggccacttcagcatatcgcaaagtcactgcaacgccggcagcgcaaaaatggattaagcaatacaactatgtgcgaaccgccatcgccgcactgcatgacaacgatctgcatctccctattagaaggtaccgctggcttaaggggcttgatcgtacgctctggtatgcccttgcttccacaggccggccctggccatttgtcgaaggtgcaggcgtggtcagccaggcacactgggagaagctggcttcacggtatcgggtccgattaaccaaaccgatcatgtcactggccatcgagggacttgaaacagatttgagaaatataggcgctgtcgtcgtagaacccgccccgacaaaaccctctcctgccgatgttgatgacgaagaggacgatgaagacgaagcaggacataaccagttagtgaattccgcagccgacgaacagcatgtccaccggcacgtacatacattccgccccaaaatgagataa

SEQ ID NO: 35292 - DNA, 681 bp, Escherichia coli
atgtctgtgaaacattatgatacttacagcaaaaattggcctgtagcagtcgcaggggttctatcatttggatacttgttcattggtttaccgatacatgtttttctggctggttttacctatatttatcgcgatgagatattcaatggactgcgtcaacaagatattcctttggcgttattcctttggataactcttgctttagctatgacacttatagttttctcaattaaaaagcagaagaaaaacattaaagccttcacccagttcttccgcgaatcaggattaaataacccttcgccacaaaatattgccatgaatcgcactggctggggttacctggggctcgatacgcaaaaagggactattctctacatcagccacccggagacgtccattctgaacttctttttcccacgcgacgttcgtgtaatggggtttggaatgtatgactggaaatcagtcgaacttgagggcaacaagctgacaatttataccggtaatccagagcttccaacggtctccattacttccggtaaagcagcaatgctctacgagaaaatcaatgcaatgcgtcatcaacagtggaaatacgagtatgcagtgcccggatgcgttgagcatcaggctgagaaaatcgcagaagcaaatggcctgaacctggtgctaccgccacagtaa

SEQ ID NO: 35293 - DNA, 288 bp, Escherichia coli
atgacctataagattaagttcaggactgacgcactcaaagagtggaatcatcttgataaatctatccagcaacaatttgctaaaaagctaaaggcatgtgcagaaaatccgcatataccttcggcaaaactgaggggaatgactgactgctacaaaataaaattgcgtgcctcaggcttccggcttgtttatcaggttattaatgatgaattaatcattgctgtcgttgcagttggaaaacgagagcatagtcaagtttacaatctggccagcaaacggctcagatag

SEQ ID NO: 35294 - DNA, 252 bp, Escherichia coli
atgccaaacactattcatagcgacacaacggcaagtgtcagcgaactgaagaaaaatcccatggccacggtcaaagccggcgcgggttatcctgtggcgataatgaaccacaaccagcctgctttctactgtgtacctgctgaactctatgaaaagatgctggaatatatcgacgatcaggaactcgctgcgctggttgaaaagcggagcaatcaagccctgcatgacgttgagctggatcagtatctatga

SEQ ID NO: 35295 - DNA, 2145 bp, Escherichia coli
atgaaaagactgcttctgttactggccgctctcggagcggtcagtttgtcgttgccagcttttgcagacagtatcaattacgacactattaccggcgccgcgacacgcaactctgacctgtctcgtcagttgcttatcatggtgtttggcgatgttgtaaataatcctctgcaaccgcaaaacgtcagctttataggcctgttatatggtgtctttaacgccattatcgctggtctcgcatttatctggtttatggcgatcacactgcgtgccaccgtactgaccggcaatcgcgggagagtatttgggcaggggaatacaatgatggcgccggtgtcctcactggctggcttcatggccctggtaccaacgccttccggatggtccatatccaatctggcattcttgtggatggcctcgattatgggtgttggcagcgccaacctccttaccgacaaggctgctaatgcaatcatggatggtcagtccctgataatgcaacccgtcgccggtgagaccatcactgctgcacgcggtgtatttgatatgtatctgtgcaaggctgcgttaaacactgaacaggctgaaatgcaccaggttgggagcagcaatacgcccgcaatgtcagagcagcgctcatccaatggccgcgagattcgtattacgaacggcagcgctatatgtggaagtgcaaagcttcctgaaaccaaagacagtgactcatggttctcttttagcgtaccgataaattccgggccacttgaaaatgctcagataagcgcgttttccgagatcaataatacactctccagcagtgccgaaaattttgtgagcgcgtggaaaagttaccaggagggcggtcagtccagactccctgatgtggaagcggaaatccaacaagcagcacggcgctatgaagacaccataacagcggcagcagcaagcgtgaataatgaaggaacgattcgcaatgaacttgcaaactacctcaagcaaagcggttggatcgctctcggtgcctggtatcagtcttttgccacagcaaatcagaaagtaaactcaattgcccacaaaagccctgtcgttaccggtcagtcaaatattggggaggtcggcgtaggaaagcttcttcaagagatacgtactgcgcttgcttcacaaagaaagaactcaagctatacgcctccgcttggttcagttaatgcatctggcaatgacaatattgatgacgtacaaactgcaaacgacgcgctaaccaaagtcatgtccaatggacagtggttaaccagtgaaataatccagaacgtaatgcaagatggtcctgactcttctacacaggtcaatcccttactcaaaatgaaggcgattggagattatacgttaactggagcacaactcaccttcaccgcctttactgcagcgaaagccgccgttgattgggcctccgctgacggaaacggaattgcgaagataattaacactgtttctggtgttggttatatagctaaaagcataatgagctcagtttccccggtggtgtacttcattctcttcatactactgagcgtggggttttctctttcgatattcctgccattcataccgttgatatattggatcacagcctgtacgtcctggcttggtagcgtgttaatcggtacaactgcagggtctttgtgggccgcgacccatattgggacggaagaggataaaggtagtcgcgctaattatggctatatcttcctcatagatgctgctattcgcccatcccttatggtgtttgggttcttctttgcaagcctcgtagttgttgccataggtacgcttctgaacatgctaattaccccagccctcgcaaacgtgcaggctgattcagtaaccggtctggcaagtatcatcgggattttgatgatctatgctcgtctgtgtaccacgttggtttcgtcagcatttagccttcaggtttatttaccggattacgtgatagcctggcttggaggacgggaagcagctcaaatgatgaaaggtgccgttgaatcaacccgcagtatgtttgcaggatttggcggtaaagctggccaagcaccaggcctgaaaaaaatcgactcggttaaaccaggggatgatgccaacgggtttaaataa

SEQ ID NO: 35296 - DNA, 513 bp, Escherichia coli
atgaagaaaattggaaaaaaagcatggttcaccgccaacctcgtcctcccgctatgggaggcaggtcgcatggttcacgctgcccgatacgcagcagagaaaaatgcagagcgatttcgccgcctaaaaccggaatcaaccaaaaaagaaactgagacgctcagttttgatgaggccgtagccgccagcggccagagccgtgagtcgttgatacggcgatatctgctggctaaacggatctggttaatgatgttcttcatgacggtcggggttttgatgctactcccgatcgtgaccctggcatccgagctccctgtgtatggggtattcctgtttcggttactgagcatgatgttcatgctggccgcgtttgccagcatgttattcgtaaacgcgatgaaaaatcagtttcgaatatggcaactgcttaacaaggagttaggcccgtttacccagtggcgaacctcgcaagcatggattaaagacgtattcacctggcgttcccctgcctga

SEQ ID NO: 35297 - DNA, 1197 bp, Escherichia coli
atgaagataaaactattagcggccataacaagcagcctgatgctttctaccttcccggcacttgctgttacggtcaacgtgaacagcagcataccaatcacgacacaggttgtgcctcaactctcaacggctaacgcgacgctggggactattctcaccaccaaccaacaaataggaggggcgattagctcaggtaatgacaagattgccgcaatgattcagcaatctaccgagaacatgcaacagtatgcgacgtatgcccaacagattaagaatctggaggacgccaggcgcagttacaccgttcctgactcgatctgcagcgaatcatcatcgggccaggcaacacaaatttcccgtcaggctggggctaaacaggcaagtctgtcccgcggagggggcgttaacagttcctcagtaaaaaaagccctttcatcaaaacctgaagcgccagagaaggacctgtttgccaccgctgacatccatcgtaactactgcaccaaagaggacgctgatgcctggggtgacctctgtaacggcgtatccgatctacccggaggcgataaacaaatccgctcattactggctggcgccggcccggaggataaagccccggagctcacatttagtcaggagcaaaccgacgctgccatgatgtacctgaaaaactcatcgcgccgtagtgtgggaagagcgctgaaaaaaggtgaagtcaaaaccgacagcggtcgccagtacataggaatgatgacagaacacgattcgatccaaagcgctgctgaacagcctcagctggccatggttgcggccagccagccaaacgaagcaacgaaagatgtactggcagaaaccctgcaaacgccatccagcaaagcatggtatgacgcgaacgcctctgaagaggcaaagcgtaccggcatgatgtctctgcgtgaatttgagtccttcgaagtcaaccgtcgctatgccaataccgattaccagaccgacctgcaggggatggacggtgataacctggtacgcgaatccatccgtgtccagagtcttcagaacgctcttcttctgggtattaaacagcagctgcatgagaacgctatcctgatcgggcaacagctcagcttacagggcgctcaatactatgaaccacgtctggcgcagaaactgcaacaggctactgcaggggcaactcgtcaatga

SEQ ID NO: 35298 - DNA, 3078 bp, Escherichia coli
atgaaaaatcctttagtctctgcgcttaaatgcgttgaagaggcgttggcctacgcctctcgatatgcactgggacatgacttcacccgctactgcgacttacgcacgaccataggactgaccgacgatgacaaaaaacgccggccggagatgaacgccccctatatcttcctgactgagcaagggcattacgccagtgtctttgaggtggaggggacctactgccagtttaatgagcaggaggctttaacagaggaagaaaagcgagatccctccctgttcagtaattacatcgaccgccttcagaacctcctgaacagtgaattcaagaatgttggccataagctgagctttgtctttgaaaaggaccctgataaagccgaagaagagttgcgtaaactactggctcaccagtatcgatcactcaaacgtatggggcttgatttaaccgatatacttgacgagcgaattgaaaaaatggtgccgtttgtggcccgtgagcgcgcatttttggtggtatacaccgcgcgtgaggcgttagccccgacggaaataaaagatgaggaaaaaagaagagagacgatacttaaaaacactccgggtgcccgttatggccaaaatccggcattccaggaactggaaggtttaaaaatccgccacgatacgttcgtcagcactctggaaaaccagtttggtaagggtgatttcggcacgcgtattcggttaatgaatgcccgtgagcttggctttcatctacgtgaggaagcagagagaaatagcacctcatcgacatggcgaccttttctgcccggagatattaaatggcctcacggattgccgaaaggtgatgatcattcttcccttcttgcccctcatcttaattaccagctgtttaacagtaagcctgaagttgaaggtgatttcatccgtctcgacggtttatggcactctactttagccgtatcgctcggaccgcagcagcctgaaaccttcagccagcttttcagcaaaatgagtcgcacccttccctggcgtatacgaatggatttgatgcctaacggtctcaacgtcctgggtgggaaaaaactggtgctgagtatggctgcgctcctgccgcctattcggcctatctacaactcagttcagtggctcgaaaatgccggcaaatcagagcctgtatgcgtaatgactatctgcgcatcaacctgggggcgcacaaaagagattgttaaacgaaacagaactcttctgaagaagggtcttcagtcatggggtatttgtgaggttacagatacatttggcgatcctgttcgcgcctgggtatcaacgatggtcggtgccaatgcgctgagtattccatcattaatgtttcctccactttcagaagctctggcgcttctgccattgcagcgaccggcaacaccctgggctgatgatgccagcattatttttggcacacctgatggcaaacctttcccggtcaaacttgcgagtaacctacagaccaaatttactgagatcgtggccggggaaccgggaaccggtaaatctgtcgcgctgggttcgttaagtgaggcgattctgttttccggtcaaaatagcctgccgtttttatcttacatagataaagggttctcggcgcaagggctggtcaggctgattcgtgacgcccttccatctcaccggaagcatgaagtggttggtctgattctggaaaacagccgtgaatattgcaaaaacccttttgacgtccagctgggaatgaaatacccactgactcctgagaaagaatatctggtcaatatttgcgagaccctctgtgtcaatccggagactggtaaccctcctaacgctcaggattgtcgccagattctcagtaaggtcattgataaagcctatgaatttaatgctgataaacaacctgttttttatgcacagacactcgaaccggaagtagacgaagccctggataaaacggggatacgccacgaatacgatgagacgtggtggagtaaagctacatggtacgaagttcgcgatttactttttaataaaggagagatcaaagctgcgacgagagcacattaccaggcaatgcctgagctgagcgacctgcagctttatctcaatgacgaagacgtcaaatcccagtatggagagatcacgcgccagggtagtggtgaaacactgctttcatacattggtcgctgcctgggtgacgcattaagttcctacaaaatgcttgccggcagaacggtatttgaacttaatccggatacccgtgttatcgcaatcgacctaaacaatgtcgttggtggtaaaacccgagccgggcaagttaaaaccggtctcatgtatctctatgctggccagctggccgccgggcactttgagctgccccagtaccgcaacgagctcatgagtcatttgcctgaagcataccgtcctttccatcacgaacgtcttgttcagctggcgcaggaggtaaaaaccaaaatctacgacgagctgcataatgcgaaggatatccccttcattatgaacaagctggttactcaggatcttgaaaaccgtaaattctttatccgcaccgttttaagctctcagtacctgaaccacttcccgcacgaaatactgaagtctgcgaacagcctgtacctgatgcaggtcagtcatgaagatttaccgctcctgactgagcattttggtgtgccggcgcatacggctcaggctttccggtatatcggctcgggtgcatctcctgacggcagcggaacccacttcctcgccgtattccggctcaaaacagggcgtgtggtacagatactcaaaaatacccttggccctaaagaactctgggcgctgaactccacgccgaaagatgccgcgctacgtgatcagctgtacgaagtgcttgatggccgcaccgctcgctcaattcttgccgacgccttccctacgggtagcgcggttaaattgatcgaattacgccagaaagaagcgaaagagacagaccacggcaacgtgattaacagactggccagcgagctgatcgccgcccgcagcctgcaaatctga

SEQ ID NO: 35299 - DNA, 954 bp, Escherichia coli
atgctaaaacttcatgaaaggttatacacgatatgccccattgaaattgaggcatgtttagacgatgaaaaagataataagccggattccctgcttattaagtcgcctgaaaatgtggcgttttgttcaatcgtcgaacccattagtgagggatttcacttctgcgggatcacgcgcgatgcatacggtaacgataacgaaatttatcttctgccaataaatcgcctatccgaacagctgatggagctacgttcttcagcagctgataacgagcttatagagcttttagttaagcgctgccggcgatggctgcgtatggatctggaatatctgcgtttaacgttcccggttaaacaggaaacgttcgatgtgggtcaacaaatctggggccatgatattgcggccccctcacctgttttgacgcagcgcgcacaccgactcacaggcggaaaatgtgtcatctgcgagcattacagccggcacaacacactctttttcagagacggcaatccggataatcaagatgatgcaaatcttggcgttgtttgccctatatgtgcgtgcagtcgccgtcttaacagtttgggggcgaatgacggtgtgatggtttatctgcctgaactaaaacctgaagatctcagcctcttgttaagaacggtaatcactgcgcggaggcatggagatgatcgccagaaaaagggagccacagcagttctgcactggctaattgagcatcgaaaagaagcagagtctttctggggtacgagtcatccaggagagtttgggcaggcgcttatacaggttcccgaggataaaagagaagagctacaacagcgattaagacacatcgctcttattccaaaccccgacatctttaacgatcacattgaaaatccggcagttaagccaacagcctggcaatatctgctaaaagaatatcgcagtcatccctga

SEQ ID NO: 35300 - DNA, 207 bp, Escherichia coli
atgaacatcgaaatttattattcagaagcccatgaccgtatttacgctgccgaaaaaggatcaaaacaagaaacagacgtaacagagcaagtagtcagagccgtcatggggcaaattggtggtgttggttataaaatcccggttcagagtcagggaaaaattgtagctgaaatagggatgttcctgccggagctgcctgaatgctaa

SEQ ID NO: 35301 - DNA, 384 bp, Escherichia coli
atgcgtaatttcacactgttcgtttccgttcgcatcctgatggcgctgtcttcactgcgcgcacgattaggagcagtccttactttattgcttgggccgctgactttacccgcgtatgcagacgatgaccttttcggcatgtttgacggggttgcggatagcgctgataactcagggaaaagcatcctcaaaatggccaaattcggcggtattgggtgcgtggcgattggggtcggactctgggttgctaaaaagaaaaaccctcagattggctggggatgggtgctgaccttcatgggtgcaggcttcgtcatgattgccctcgaccagttcatcaaaaaaggtcaaacgactatcaagctgaatccagtagacgtcggctaa

SEQ ID NO: 35302 - DNA, 528 bp, Escherichia coli
atggacgctatccaaatcctggtccacgtagctgacaacctaaaaaccagcggcatacgtctcattctggcactggggttattttttggcgccctgggctgtctgggcaccctggtatcggtcgtcaagcgctcccgcagcggtaagccggcaaacggcatgaaagccctgatgtcattttgtctgggcggtgctctcatcgccatgcagcaaatgatgaacaaagcggctcacacgctgagtttcggagatgtgtcattcgatgctatcgcctatgcccccgaatctatggggcaggcgaaactggccattgatgccgtcttaacgcttctgcgtgtggtcggggttttatttttttatatggggattagacgagccagaaggtccctggttgatggccataccggcttgtcagcccgtgaagatgtttccaccggaatagttatgggagttgttggcatcctgctggcgtgtaatcccgaactccttaatgcactgcaaaaaacactgggtttaacctggaattaa

SEQ ID NO: 35303 - DNA, 816 bp, Escherichia coli
atgaaagatagtttttttgatccggacctggagccggaggattccgcattacctgaagttaatgccgttcccgaaaatgagagggagccccaatcagacaaggcgccggcaaaagaagcacctgcagcacctagatgggggctgtggggttatgaccttaaaacgctactgcttgccggcgctgccgtgattgcacttctggcgtatgcgttttggccagatgaaccgccagcccgggcgcttattcctgatcccccctcaccttctcagctggaggggaacacagggcaaaacctcaactcccccggaaaacaggacggtgaactaaattcagccgctcctgatgaattgacagagccaatgccatcccagccactgcctgaagacagtgatcgggagcttaccggaacgacaggggccttcgataacaagaaggtcagtgagcttaaggagtacggcgaagcaaaccggcaggcaataacactcctgaatgacagggtaagggatagcgaaaaacgcctggctgatatcgaggcaaagttaaatagcctcagtacaaagcaggcggcttcacctcagaagggtaccgccactacgaccgctcaccgtgttaaaaacgtatcagcagccggcagtagcggcctgaaaggctggcgcattaacaccgtatatccggggatggcctggataacccataacggtagtacatggtccgtccagccaggggatcaggtaaatggcctgacaatccgcagcattgatgcagagcgccgaatcgtcgtaaccagtaaaggcgtaattcgccagggggattga

SEQ ID NO: 35304 - DNA, 1266 bp, Escherichia coli
atgggagcagataaagacgtcggccgggacgtcaaaaaaaccggcattatcttcgtcactgttatttttgtgatacttgcggttgggttcctgttggtttcgtggatgagcgcgccgcagtcggtatcaaaaatcaacgtggataaagctgcaggcggttcaggaaaagcagctccggaaaccccacagtaccataaaatacttcgtgagaacaacgaagctggggcaaaacaggcccaggccgcaaactccagcttcattgcgtcaattggttccggcactgtacgtcaggttcccccaatagatgcgaccccagctccgccgcctgtgcctaagccagctccagaagctcagtatgctcagcagcaacacgtgccccagcaaagtcttgaccctgatcgtaaaaaagcacttgaggccttgttgaaagaactcgtggcacagcgggttgcccccacgggcgaactggcaggtgtcgccggcagtatgaccgtaaccgcaggggcacagtcgggaaatgccggagagagcagagccattaacgcctattccggatggacggaaagtctggcaccagtaactgtgcagccggcatcgtacagctctggccagaatgctaatcgtgtcttaattcctgcgggaagccgtccaggagcggtgatcgataccgagattgactctgacaatacaaattcggatgtgctggctcatattcccgctggtccttataaaggggctcagttgatggccagagggattcagcttgcaggagacggggttaagatccatttcaatcagatgacctggaatggagacacatggcgcgtcgatatatcggcggctatgcctgatacgctccgctcctccgttgcctcgaccgtgaataatcgatacggcagccgcgttatattgccggcaatcgctcacggtcttgggcttggtggccagctctatgccagcgccaacactcaaatactgagtaatggttacaaccagattgagggccgtgttggcatgccaaatggtgaagctgtagccggtacgattttaggcggtgctgcccaacaggcaggacaggtgattgcaaacgatgctcaaaagttacctgtgaagcaggtgattgtcgatcgtggccaacctgtagcgcttctcttcatgtctgctgtgactgaaaacgaccgagtcaccaactcttccccaaccagcacaaacacaggtacccgccagccctcagctgggtccttactgcctgcagctcaaccctaa

SEQ ID NO: 35305 - DNA, 1014 bp, Escherichia coli
atgaaatatttgattattccggctgtagcgatcgcgctatcagctgcacctgcgcttgccgctgactgggctccagcccaaacaggaaacaccccgacaaccgagttaccagctgcacctgctccaacaacaccaacagcccagactaacaaccagccaccgcaagaaaacgttcagacagatataacagcacctcttcgacagtccgcgccgccagccccccctacctcagctcaagcctgggcaatgagccaggctaatccattaggagatcagcaggggattgaaatgattggtgaagtcatggacggtgctagtcgtggccgcgcctggcaggctgcggatattgtccccaggatctcaacactaaccattaacctggcacccggcgcttctttacctgtgttaaggaccacaacatttcaggccagtacagtcatgttcactgacaacactggcgcgccctggccattggctgccccgccttacaacgggaactcaactggttttgcggtcaatttcattccagatagtagtgtgatgaccgtacaggccagacgtttatatgatcgtggaaatgtaacggtctatttgaaaggtctggcggtaccgataattatcgacctgaacagcggtgaggccagcaaccaggcgaaatcacgcgtaatagacagtcgtctggatcttcgtatccctcagcgcgggccacaggctaaaaagcttcctaccggacagacgaaaattggcctgaataatccaacacttcaggcgtttctcgacggcgtgccaccaaaagaagcgcgccggctaaaaacacagggtgagttacctgacacacaggtatggcagatgggtgacgatctctatatccgcacacgcagcgaaattcgcgatgaatttgagctgacacaggcttccggcgatggaacctggctctataaattacctctcacgcctgaggttgccttttcccgcgccggcaaaactgtctatttatcaatttctctggagtaa

SEQ ID NO: 35306 - DNA, 678 bp, Escherichia coli
gtggtagatgaagcccagcgcaaatctgacgacccgatgattccatttatggatgcactggagttacagcaaaaaaacatgcttaacgctggcttcgcccggaaagcgctccaggttgcgcttatcgcctgtacggtaagcgctctccagtttcctgttaacgcctggctggtctacaaggtggctaacccgcccaccaaatactttgcgaccaataagggtagcgttctgaagcaggttccaactgatgagcctgcttacaaagatgacgatgtaatcgactttggcgataagctcatacgttcagcgttccagctcgactttaagaactaccggacgcaaataagcgatcagcaacagaaattctctgaggaaggtttcgccagctactacaacgcgctgacgaattcgaatctgttctccaaggtgaaaactgaaaaaatgctgatgtctgcaaacgtcacccgcaaagggatgatttaccggcgtggccaggaaagccaaaacggaccgtatatgtgggatattcagtacccggtcactctgagccttgacggtcaaaccagaagcttaccttcgcaaaacttcatcttcatcgttcgcatccagcgcacggatgtctcgctcaagccagaaggtattgaagcagtgtcaattatcacccgagacgctggctaa

SEQ ID NO: 35307 - DNA, 480 bp, Escherichia coli
atgcacaacatacgtcgcacacttttatccacattaatctgcctggcgtgcatcccttttgctgatgcagcgtcctgcagagcgggtactgctgcgcaggcaggaagtcaggccggttacaaccgggctaaagaagcagccgaggcatggtcgcagcggcaaaataatgtttccgcatcactcggggattgtctgggaaatatttcaacgacgattaccgcgccaacattccccaatctggcagatgccttaaaccagatcggtcagaaaatttgctctgcagcgcgcgataaaattaatgactatgttccctcaacaatcgacccatggggtgatttgccttcaactgcaagtttatcgtcttacagctcatacattccggccactcagtcccgttctgccgttcagctgcaggcaacaccgcaaccagctgcaggtgattcagggactggctcatcatccttcatatccctgaactga

SEQ ID NO: 35308 - DNA, 3300 bp, Escherichia coli
atgcaaaaacgcacttatctggccattaccaaggaagcaaaaaaggaagccctgcgcgctgcaggccggcttcctgacggagattacgctctcgaatatgacagatcgcaaaaagtatggtttgcgaaagccgaggcagatcttgaaaaagttaaggcctggctacctgaaaatatcgttacaggccaatctaatactgtcaccgaaaatttatcgcctgcagaagagttcgcccagaaactggaggatgccggttttattcttccggataacggtttgccggaaatggacggaaaacggcacagggtcgcaacggagggagataaacccgggaccaaatctggtatctaccagggttaccttgatggccgccctgctggctggtaccagaatcatcgatccagtaaggggaaggtaaactggacctcgacgggtacataccagtatgacccggtagaagccatcaaacagcgggcactcgctgcacagaagcgctgggacagagagattaaagcgcacgatgattatgctcgcatcgcgaaaacgctctcaagccagtggtcgaaaatgccggatgcgccagatacccatgcgtatcttgcccgtaaaggggttaccgccagtgcaggggtaaaactggataagtacgataaccttgtcattccacttcgtaacactgataacgagctgcggtcgctgcagtacatcaagccggatggcaccaaaaacctgaagaagggtgctgagaagacaggaaattactttgtcgttgggggggagctgaatccgcaagtgcctcttctttacgctgaaggatatgccaccgcggcaagcctccatcaggccaccggtatgccggtaataatgacggttgacgccggcaacatggtgacagtgtcacgaaagcttagtgaattgtatcccgattctgcgcacatcattttaggtgaagatgacttcacaaaagatgataacaaaggcctcaataaagcccgcgaggccgcagaagctatcggtggcacttacatcatcccacagttcaccgaaagcgaacgtgcccttgcttttgccggcgcaggttcattcagcgattttaatgacattcacgcatcccgaggtatcgacgccgttcgcgatcaacttgcgcctgtgctcgacccgctgcttcctgactggcgtcaggcctttaatgagagtaactctatgccagacaatcaaatcttaccggagccaccaacagagcttgacgctggccctgcacaagaagaggtagacctttcagaatatgcagacttcatgagccaggcgcctgccagccctgttccagaagacagcattcctggtaacacccacgcagaacctgttactgaaccaggcctagccgcggatacagttacggtatcgccagcagcagagacctcgccagaatcaacagcgcaactctctgagcataacggccatgtacctgttcctgatgctgaacagcccaaaccagaagtcgaaccgattgataagccggtgcaacctgaagaggttgttgaacctcttcagccagtcgctcctgagcctgcaccagatgagcctgtacaggtgcccgcaccaggtgtggttgaagcttcagaaacagagtcagtcgttaaaccgaaagaacctgtatcagacgagcctgtgaattctgataccactgagcctgagattatggcgcctgccggcgacagtgaaccagcggcagccgaaaatgggtttaactttacctttgggcgccatgcgggtgatatcagcccgggcgatgaccctacacctcttataaatcttgatgagctgcttcaggggctgacaagccgtcaggaaggcagaacctggatttattcgctcgatggacaggatgctttccgcgattacggcgaccgcattgtaatggccactcccgaagcaagcgagaatgaccgaatgatcctcgcggcgctgctttcagccaaagcgaatcaacgtggtgcagttgaaattacgggcagtgacgaatttattcagcgaactatggggctgatcgctgatcacaacatcgatgtccatttcaaaaatcctcagcagcgtgagcaatttgaggcgctactgaaagcccgggccgagaataccgtcccgcaaaatggtctgaatatcggtcctgaatcaggtcctgaaacctcagcgcctgtatcgccggcacctggtcctggtgtggcggaaccagcagtatcggatagtagtgccaggccgaaagaagcaacggagcaggcagtcacaccggaattaagcgtcctggataaagaaaccttgcgcacaggcctgactggaaaactgctcgatgccggaaaggcaccgtataagtttgataaatcaaactccgaaagcttttacgtgcagatgcgtaccaaaagcggcaacaaaacgtactggggcgtcgagctggagcaggcgttaaaagacagcggtaatcagcctggcgatatggtcaaactgcagtatctcgggaagaaggctgtcaccgtcaatgtgccggtgaaagatgctgagggcaacgttacaggttttgaacgacttgatacgcatcgtaaccactggacagtaacccctgccctcgacaaccagctcctggtagcagacaagcatgcagtagcaccggcggaactggccgcatacgacggcaatgcgttctggaaactgcagcagcagattattcagaataacaatctgccactttcctctccagcacccagcggacacgggttgctctacaccagtcctgatggaaagggtcagattgcgcctgaggtaccgccagtaaacgcccccgttccgaatcattctaaagctgcaggttctgtagtgatggcggcgctggatgataagggtgagctactggcgcatctggtgaaaggccacggggattatctgcagggggttattcgtcatgaaggtgaattgaaaaatgtccttgcgagaatctgcacgacagagaaaggcaatacgtatcttgccttaaacagcgtacaggacaacggcaaactccagctgattggccacgcttcagcagttaacacgctcaagaacgcggaagtgaactacgacacttttgcatttcagatgaagggcaaggacgagcacaaatttgcggttcccctgatatctccagaaaagatcccgccggcactgcacagcaaactgggtttctcgcaggcatatgcgccacctaaatccgaggagccggttcagacacctcatgtacaggctaagccggctattcaaccacaaccgatgtga

SEQ ID NO: 35309 - DNA, 261 bp, Escherichia coli
gtgaaaacgagccaatggcgagacgcagggcgacggcttgaaattgcaggtgtgccggtcgttctcttctcattgtatgccgcatggtttcagtggccagaaacaacaacgttctacatcgtcactagcatcattctttttttccgcatcctctccttcttcggtttcaccatcaccattttgtggcaacgccttctccgcctgctgcggggccttcgactgacggggcgtccgtggtggtaccgcaagttctttgagtaa

SEQ ID NO: 35310 - DNA, 1158 bp, Escherichia coli
atgacattcccttcattcgacttccatgcgcatggcggcattacgggagatggtctgagatcatttctcgtccattgcgccaaaaacaacgtgtccgatatttttctgcaaggtgggggaccgttggttgtggatttgcatggtcgcaaaattcgcgccagcgagtttcgtattgagccacctcagttaacccggttaatggatgatgtcttttcggagcagatcaagggcgacctgaaggcgggaaaaggggtagatagagcactgcagctgactggcgatatgtataaccgctacggtctggaacgcggtgaaagccagcgctttcgctgtaattttgtccaggcaacgatcggcgattacgacacggtaccggcactgacactaaggacgatcccaacggtcataccggagctcgaaacgctggggcttgaagatgatttgctaccttgtctgatgcctcacaatgggcttgctttgatcaccggcgaaaccgggtccggcaaatcaacccttatggcgtcgatttatcaatatatcgctcataacgatcctgaccgtaagatagtcacagctgaagacccaatcgagttcctgctgaacttccccaaagcgatactgatgcctgagcagtcacaaattggccgggacgtagcctcattcgcggaacatcttcgactgacgttacgccgcgcacctggcgtaattggcgtaggtgagattcgtgatctggagacacttagcggcgctatcgtgaatggtcagtcagggcacttctgtttgtccactatgcacacaaactctcctggcgaaaccattccccgcgcactgatgctggtacctgagaatcagcgtgaagcgatggcatggaatttactcagtaatctgcggtatgtcgttacccaacgcctgctccggacaacagacggcaaacgccagtcgataagggaatatctcgttttcgatgatgaagtaaaaatcgaactcggtaagttgaaacatactcagtggcgtacgtggatcgataaccaccttagtgagcgcggtgaacgaatgagtgataaagcctgggctctttttcagagtgggcgtatcagcgaaaaagagctactcactgtcatttcccaacgtgaattagacaggagggcagcgatgtga

SEQ ID NO: 35311 - DNA, 795 bp, Escherichia coli
atgaaacaattcgcactggcaggcctcatgctgttctgtgctttgtcggcttatgcagatgagatggatgctcctcccggagatatttcctcttatttgaatcctgagataaacgatttcaatggcctcagcgaaaccgtgtggcagatgctgaatgatgccggccgaacgatcggattccagggcggaaaggcgcaacgctcatatgaactcaggcaggctcttatcacaagggacgatatcctgagtaaaacttatgactttcgtcctctgataagtcgccagggatacttaccaccggtcatcgcaacatcaaccgaccttgcccatatcactgcagatcaaatccgtacggcttacagaacctacaacatcattgtcccggcgcggttcgttagcaaccctcccggctggcgttcataccttttactgggactttcaggtaaacgcattgatgccccggatgctgctgttcggccaaaaaacagcaaagagaaaaccgtgtgggaggaggcgattcgcaaggggtgggaagaaggacgccaaagtgcagatcgcgcgctggaagcaaactttaaccgtcttacccgcgattataccggcatgctccgttactccacgcttcttcagcagggcattatccaggcaccagacatcaaagaaacccagcaaagtgtaaccggcaccagggatgagttgatgatcggtgacaaagtgaaacgcattcaggacccggctggttttgttgttgataagaaccgctggaagccctcagttcgtaaggaaccacaatga

SEQ ID NO: 35312 - DNA, 462 bp, Escherichia coli
atgaaacgacacgtactcgcggcgctgctgcctctgttgcttgctggttgtcaaacagcctctgaggttgattgcaaaccagccatcccaaacagtaatttacaagccaatgccaacgccagtcaggcaggtatgacgacattattgaagtctggcgccattaatcagaaagccttccagttaggaaatggaataacagccaatagtcaacgaatcagtattgaatgggatggtgatgcagttgagttgctaaataccctcgccagacaacgtggttatcgatttgtctataccggcacccggctgccgcttcctgtcaatgttcatgtgaataatatgacgtttgagcaggttctcgatctcgttcgtgtccagactggctggcgagcaaaattagttcaggaaggcgttgagttacggctttactttactctcccggataaagggggccgtctcgcatga

SEQ ID NO: 35313 - DNA, 1125 bp, Escherichia coli
atgctgagaaaacgcctaaaaaacatgcaactatccacggcgttggataaatattatgaaacggtatctcgttataaacgaggtgcatctcaggagttttatcgagtcaatgttataaaaagacaaccattggctcaaatgatgatggataaaatatcctcagtagatattgccgactatagagataaaagattaacagatgtaaatcctaaaacaggaaaacgaataagcggtaatactgttcgtttagagatggcattgttatcaaatttatttagcatcgcccgaatcgaatggggaacctgtcgaagtaacccagttgagcttgtgcgtaaaccgaaaccgtcacctgggcgcgaacgccgattatcaaaaaaagaagaacggcagcttagtgatcattttagaaataagagtaccgaactgtactgcatatttcagttagcccttgaaacagctatgcgccagggcgaaattctttccctaaaatgggctaacattagctctgattacagccaggctttccttcctgagacaaaaaacggtcatgcccgaactgtaccttttacaaaaagggcaagagacattcttaaaacaatgacgcagtttatatcagagcgggaaacggtattttcatactcttcgaatggtttcaaatcagcctggcgcaaagctgttttaattttagaaatagatgatttgcactttcacgacttaagacatgaagctatttcgcgtttctacgaattagggacgctaacggatttagaaataagtgcaatatcaggacacagaactcttaccatgcttaaaagatatgcacatattaagacaacgtatttagtcaagaaactaaatacgagaaagaaaaaaggaaatacacctgacctctttatgccatacccagcaaaagtttcatgctttgaaaatggcacggttgagctacatttcccagattttgaggaacttaacgtaatcggaaaaacgtacgaagaaacggtatcttatgcttcatcagcgcttctgagagagttggccattcgattaaaacaaggacatttcatacctttccctagcaacataatcccggatgatcatacgtataccgttatttctccagtctaa

SEQ ID NO: 35314 - DNA, 321 bp, Escherichia coli
gtgcatgataagacgttagcgctccagtctaccggcgggataattgaaaaaacgctctccacctacctgatgaaagacggcaaactgtgtgacggcagcaaatttggtgatactgacgatcgtggtgcttattgtcgttgggtgtcgcagatgctcaccttcacctcatcgggctgtgacaatgccaaagtgacggtaacaccaaatcgtcaccccattaccgacaaagagcttcatgatatggtgcttcgcgtggataccacctcgcggcaacctattgattctacctgtcgattccagtacgtactgaatatgctgtag

SEQ ID NO: 35315 - DNA, 303 bp, Escherichia coli
atgagtcgctttccgacagaaaccattattgcaccagccagcacgctgaaagactacagcggaaatacggttgccggattcagtacggaaatcatgccggaagatgcatcagcccgtctttaccggatacagaatctgagccgaacggagacattgtggattaacgatatgggttcagaagccggggaatataagccgggcagctatgcattacttcctggtggatattatgagttttcatctccgtttgcggtgtcggtgtatgccgcaacggtcatctctttcagcgcggcgaggtactga

SEQ ID NO: 35316 - DNA, 1365 bp, Escherichia coli
atgccaatgtttgttccggttacggtggcgggcgaaacggggaaaagtgagaagcgtgagctgtcctcatggttttcacaggtgcaacgtcagcaaccggttgtcacgtccccggttcccgtgatggctgaaccgccgtcatgcacactcacaaaagcaacgggggtttccggtgtaacgattgtcagcggaggaacaggttatgcagccggagataaccttacgccggaatccggtgtctgtgcagcatcagccagaatccgggtactgtcggttgacgatgcgggtgctgtcacgtgggcagcggttcagctttctggcgtgtattcgcaaaaaccggaagaggatgaagtatctgtaaccggaggcaacggagacggcgcagtgttcaggctgacgtggaatgccggtgtggcgtcatctgtatataacggaaaaatgagagaacgaatggatacgagtgctttcgaatatacaggatatgccccgaaagattcggtatcaggttatcgggggaacggagtacagaacggcacgcagtgcattgttgagtttattagtgatgcaccggtactggactttcgttttgtgggcggtaacggacagtatgacctttatgttgatggtcagcgggtatctgacaagccagtaaaaacggattcatcaggtgctccgtatatttacacggtggactggaataactcggtgaagctgcgtcattatcggctgtgtggcattaacacaggctttggcggaataataaccggtcaggcatataccgtaatggccccacagggaaaccgccgtccgctggcgtggcagatgggggactcctacacggtgggtatcggtgcaacacaggcatcatataatgacttccgggtgatgtgtgatgcattgggtattgacggcattgctgacggcatcagtggttcaggctggacgtcgacacaggacggtcgggttcctccggagcgggtgcgtcttaaactgggcaatataacccgtcagccgcagtatgtttttttatcgctgggttataacgatgcacctgccggaagaattgaattgctgaaaaccaacttcactgattcggtcacagagatacgcaggctttgtccgctggcgaaaatcattgtcattggcccggcaacaccactgggacatacggcaaaacttgatgcggttcgtatagcgataatggaatgctgcacagaactgaaccttccgtttgttgacgtccgcaatgtagtcaataccgccaacaaacaactctacaccggaagtgataacgttcacccgagcaatgacggtcacatatttcgcgggctacagattgcaatgcgagtgtcacagtttatgtga

SEQ ID NO: 35317 - DNA, 792 bp, Escherichia coli
atgaattttacatttattgattctggacacactgaaacaaataaaaacaatccccccttcatattcgtccatggatttttcatgaataatgaaatgtttaaatatcagcttgaagaactaaaagaaaaacacagagttgtttgtattaatgtccgggggtttgataaaaacactgaaaaaacagaagctttctcgctctatgatatcgttgatgatattttaagcgttgcagactcactacaaatggataagttcgttttaggggggatgtcgatgggcggatatatatcattacgattttccctgtcacattcagaacgtttgtcagggctaatccttatggcaactcaggcagatcaggatccgccagaaatcgcgtcaagttacatggagttatgtaatggatggcaagacccaatcataaaggaaaatataatctcctcattattacccgtttttttcggaaataatatctctgaagcagagacatggagacaagtatggctaggccataagcctgaaaatatcaggaatgctatgaatgcaatgctggagcgcgacgacattttagaaagagtccagatgatcacaacccctaccctgattattcatggtgccaacgatatggggataccattagagaaagcaattcaaatgcacaaaatgattgcgcattctaagcttgaagtaattcccgatgcaaatcatgctctaaatattactcatgcaaaggaagtaaatatagcgataaaaaactggctgcaaaacactaatatccagaatcaattataa

SEQ ID NO: 35318 - DNA, 579 bp, Escherichia coli
atggataatttgtctgaggaattaaagaagccccacaatggtaggcttagagcttacattgctggattatttgatgcagacagaaacaagaggtgggttgactgttcccatgcaattacggcccacaatcaatggtcgacaataacacttcaacatctaggtgcactagattctcgcctagttaatgatgatgctgaactcatcaagactggatatctaaaaaacccaatgcacgacttaagtgatcatatcacttcttcctatctctgggttttaggaatgtatgaactagtaagaacattagatcaatttgcaaaaaatgatggatctccattgaatcatgtgcgaaatgagatacagatctataaacgtaagatcaatcgtttaagaattccattagccaaaatggaagccgcaagtagtaactctgatgactcaccaattgcatatccaggattgaatcaagctttaggccttgcatggcaattgaatgagcatgactggatctctcggcgtgaattatctgatgatgctctcacattattcgagcacataaaacattcaatgactaatacttaa

SEQ ID NO: 35319 - DNA, 207 bp, Escherichia coli
atgatggacaattattttaaatctggcgataaccgagtatctgattctgagcaccagcgtttagtggctaccaaagcagctcttgaaattatcaaggccgccgtatctgcccctaccgatgcgaaaaacgtgtcttatgatttggaggaggcaataaaataccttccgcggttgactgatgctattcaggaaacgattggtaaatag

SEQ ID NO: 35320 - DNA, 489 bp, Escherichia coli
atgaaaataaaaatgaatctgttgattattattcctgccatactgtttgggcaatcggcgctggccgaacagttacctaaaaatcaggatatgtcgtcagatatggcaagggcacttgtcaatactgcattgaaaatatgtcatgatgaaaataagactggtgttgccgctgtcgttgataaaggtggaaatcttgttgctttgcaacgagacgacaatgtagggcctcacaacacacttgcagcacagaaaaaagcctatacggccctttccactaaaagtgatactcgtgagcttgctagaaaagcagcttctaaccccgaaacgcaaaatcttaatactgtaccccagctccttctactgggaggtggagttcctgtaaaactcggtaatacggttattggtgcaattggtgtagctggaacagggggcccggcagatgatcaacattgtgcgcaagaagccattaaagaagttatgaagtcttaa

SEQ ID NO: 35321 - DNA, 435 bp, Escherichia coli
atgaaaaaaatgattaagtttgctctaacttcagcacttatgtctgtatctgcattatctatggcccacaatgcagagcaatttaagccaataaaaaaccctgtcagtgtgcatgtcctgaacctgaaaacgggtataccctctgaaggagtagttgttgttcttgataaaaaagaaggagataaatggattaaattaaattcagcaactacaaatcatgatggtcgtataaatgctctttatccagtcgggcaggaaatgacccctggagattaccgggttacttttgaaacaggaaaatactatgctaatcataacgagaatttcttcttccctgaaattcctgtaattatacatgtcacaaaaacagacgagcactatcatgtaccactattattaagccagtatgggtatacaacatatcgtggctcctga

SEQ ID NO: 35322 - DNA, 180 bp, Escherichia coli
atgcttcatactaccaatcccgttatcaaacacaaagccggtttgctcaatctggctgagcaggttggcattaaggctgttatggtacatgcaattgataatgacgccagagcattttatgaacgttttggttttgtccagtcagttttggctcctgataccttattttataaagtctga

SEQ ID NO: 35323 - DNA, 1059 bp, Escherichia coli
atgatcagttttataaaggaaagaacgatacatgattctcaaacaacaaaacgcagagccatttttttacttattggcttactggctatgaatggattagcctgggcatgggtgtttattgatttcaggggtaactcagtgcttatggggatggctctgttagcttatagtttaggtttacgtcacgccgttgatgccgatcatatcgctgctatcgataatgttacacgtaaactcatgcaacatagaaaaattcccattgccgttggtaccttcttctccctcgggcattccaccattgtgatattagcatcattgactattgccgcaactactatggtatttaaaaatgatatggcatggcttcatgaaacagggggaataattggtacgtttgtttcatctgtctttttattattattcgcaattcttaacctaacgatcctcatttcggtatataaaaaattcaagcgaatcaaatttggatgtaagtttaaagatgacaatttagaacttctggtttcgaaccatggcggattgcttgtcaaagtattcagacgtacatttaatttagttaacaaaagttggcatatgtacctggttggttttctatttggcttagggttcgatacggctaccgaaattggtgtattagggatttctgcaacgaacgcaacacatggcatgggcttatggacaatcatgattttccccattttatttacttgcgggatggctttaatcgactcattagataattttgtgatgattggagcatatggctgggcattttctaatcctgtaagaaaactttattacaatatgacagtaactgcagcatccgtcattgttgccttttttataggaggtgttgaatcattagggcttattgctgaaaaaatgaatttaaacaatggtgtttggacagtaataaatcgcctgagcgacaatcttggtgcactcggctactgggttatcggacttttcattttgtgctgggtattttcagcggcaatttattacgtacgtggttatgatcacttatatatcgaacgctaa

SEQ ID NO: 35324 - DNA, 993 bp, Escherichia coli
atgatgaatacaagtaaaagcaatccatctttttggatgaactttgtcgaatcgaatatatttattaaattcattgatgttaccttgcgtggttatgcacaggttatgtttcaaaataatcctttaactggattgttattttttacagctatttttattggtgcctatgatgaaggtcgctccgtcattgcttatggtagtatattaggtactgttgtcgcaacgttaatgggggtgatagtacatgaccgtaaatcatggcaggctggattatatagctataacggttgtttagttggcgtcgccctacccgtttttttagaaatgagtccgttagcctggggatttatcgtccttggtagcattatttccgttatatttacagcttgtatttctaatatattacaaacctggaaggttaccgtattaactgcaccttttgtttttaccacatggattatcctgcttgctagctatgcgttctcaaatttgtataatagcgggctacctcatccatctctccctcatcaatttattgtagaatatcataaactgaggagcgataactatatttttgatagcctgtttaatgggatttcgcaggtatttcttttcagtaatgttactagcggtgttttatttgttcttggactggctattgaatctttttgggctgctgcctttgctgtatgtggagcgttttcggctatatttaccgcaatggttttggcggcaaacaaccatagtgtccatttgggcctttactcattcaatgctgtattaacggcaatagcgttaggctgcgcttttaacaatccgagctggagagtcctggtatacacatttattggggttgtttttactgtaatcatgcagggagcattaaatacgttattttctccactgggcattccagcattaacgatgccattcgttttaacctcgtggctttttcttgtgtctaataaagatattgtgttaacacatcgatag

SEQ ID NO: 35325 - DNA, 951 bp, Escherichia coli
atgttgcaaaattctgaccattcacgagggaatcatcatacactaggcgctaatgccccagagttagcgcaataccagagtgaaccagcgcaaatgcgcagtggagctataggtaaaaaggggtatctcaaacttagatttgtaaaacgtgaacaacgcagtgttttggctgaaatggaacggcgcgttccttctatggtgcaaaaggcattgtactgggatgaagaaatgcctggactaccttgtgtcacgatgatttcaacatcgggatgtattttacaaggcgaccgtttagagaccgacatacatgtggaacgcggagcctgtgctcatattacgactcaatccgcgaccaaagttcacatgatgaatgctaactatgcatctcagacacaaaaatttatgcttgaagaaaacagctatatggagtttatgccagatccacttattccacatcgtaactcccgctttattactgatacatcgattagtattcacccaacagcgacagctatttattctgaagtcttaatgtcggggaggaagtaccaccatcctgaagagcgttttggctttgatgttttctcatccagagtagctgcctataacttaagtaataaggaattgtttgttgagagatatatattagaaccaaaatcagaaagtcttgatgctattggtattatgcaacattttgatatttttggtaatgtaattctattaacaccaaaagagtatcataatcgaatattaacccgaataccagctcgatttgatgttgagcaccagatagcctgtggtacaacacgattacctaatcattgtggcttaatatttaaagtattgggcgttaacagtgcagttgtaaaagccgaaataagaaaattttggcgagttgcgcgtgaagaaattttaggcattacattgccagagaaatttatatggcgttag

SEQ ID NO: 35326 - DNA, 672 bp, Escherichia coli
gtgaataatcatattacaagttatgcttcaaacaaaaaaatggctcgtattggaattggtggtccggttggctcaggaaaaacggctattattgaggttattacgccaattctcataaaaagaggaattaaacctctcattataactaatgatatcgtaactactgaagatgctaaacaggttaagcgaacattaaaaggtattttagatgaggataaaatcttgggtgttgaaacaggtgcctgccctcatacggctgtgcgtgaagatccgagtatgaatattgccgccgtagaagaaatggaagaacgctttcctgatagcgacttaatcatgattgaaagtggaggtgataacctaacattaacttttagtccagcattggctgatttttatatttatgttattgatgttgccgaaggtgaaaaaattcctcgtaaaaatggtcccggtttagttcaagccgatattttagttatcaataagattgatcttgctccctatgttggtgcaagcctagaggttatggaaagcgacactcaattggttcggggtggccgcccttatgttctgactaactgtaagacagggcaaggtatagaagaattagtcgatatgatcatgcgtgatttcttatttacccatgtaccacctgaaggagataacgcataa

SEQ ID NO: 35327 - DNA, 687 bp, Escherichia coli
gtgaatgcgtcagatctcatccgtataatgcaatttggtgattccgtattacctgtcggagcattcactttctccaatggtgtagaatctgcggtccaaaccggcattatttatgatatagcttcattaaaaggattcgtcttaactgcattaaaacagtctgcaagttgcgatggtatcggtctcgccgtggctcatcgtgcagctgttgctggtaatcttgaaaaaataatctgcgcggactgggcaattaataaccgcaagcttaatgaagagagccggctgatgtcgacgcgcatggggaaaaagttagcggaaatgtctgcccatgtcattgaacatccattaataagttggtggctggagcagatcaaaaaaggagagacggctggaacttatccagtaactcaggcgttggttatggccgtgcagggtattgcagagagaaacgttatcgtgatgcaccaatatggtatagccatgtctattttaagcgcggctatgcgcctaatgcgagtaacccactttgatacacaacgtattttgtttgagttaacccagaacatagaaatatattgtgatatcgccgaagttggtgatattaaacaaatgtcttcttatacaccaatagtggatgttcttgctgcagtacatgttagcgcgcatgtaagattatttagtaactaa

SEQ ID NO: 35328 - DNA, 663 bp, Escherichia coli
atgattttaatcgagcatgtgctggggaatattaaaaatgatcccgtttggcaaacaaagcttcaaaatgccactattgacctgttagtgctggaccaacgagaagcccaaaaaagtcgctgtcgtaaattaacctctcaaggagttgatctcggaatctctcttgagcgtaacgtggctcttgctgatggtgatgtgctgttttggaacgacgaattacgtatggctatcgttgttcaaattcagctgcgagatgttatggtcatttcactaagagaactaaaaacatattcgtttgatgagttaattaaaatctgctttgagttggggcacgcattaggtaatcaacattggaaagcagtgactaaaaacaataaagtctatgttccacttaccctagcgcctgccatgatggattcagtgatgaaaactcatggtttccaacttcttccttattattttgctaaaggagcagaaattctaccattactatctcattcagaatctcgcctactatttggtggtgctgaagatacggatactcatgttcatgttggccatgaggaaaatcaatcaacagcttccggtttacataccaaacgcattcaatcatacaatcatggacattgtcatagtgtccataaacacgaacataaaggctaa

SEQ ID NO: 35329 - DNA, 1719 bp, Escherichia coli
atgcctcagatttctcggcaagaatatacaggtctttttggtccaactacgggggataaaatccgtttaggagatacaaatctttttattcaaattgaaaaagatttacgtggttatggcgatgaatcagtttatggcggtggtaagtcattgcgagatggaatgggggcaaataacaatctagtgcgtgataatggtgtacttgatcttgtcataactaacgtcactattcttgatgcaaaattaggtgttattaaagcagatgtcggaatccgtggtgggaaaatcgcaggtattggaaaaagtggaaacccagatgttatggatggtgttacacctggcatggttgttggagtaagcactgacgctatttctggtgaacatctgattttaactgctgccggtattgatacccacatccattttatttctccccaacaagcctatcatgcattgtctaatggtgtgacgacctttttcggtggcggaattggtccaactgacggttcaaatggtacaacggtcacacctggaccatggaacatacgccaaatactgcgtgcggtagaagaattgcctgtcaatgtgggtatattaggcaaaggacactcttatagccgagagcctctattagaacaggcggttgcgggtgccgtcggctacaaagtccatgaagactggggagcaacagcaagctctttgcgtcgctcattacgtatggcggatgaaatggatattcaggtttctgtgcatacagatagcttaaatgaattcgggtatgtggaagatactattgaggcattcgaagggaggacaattcatacttttcatactgaaggtgcaggtggtggacatgcaccagatatcatcagagtcgccagtcaacctaacgtattaccaagttcaacgaatcccaccttaccttatggtatcaatagccaagctgagctattcgatatgatcatggtatgtcacaacctcaatcctaacgtgccagctgatgtcgcctttgccgaaagtcgtgttcgtccagaaactattgcggcagaaaatgttttacatgatatgggagtaatttcgatattctccagtgattcacaggcaatgggacgtgtcggcgaaaactggttgcgtattatgcaaactgcccatgcgatgaaagtatcccggggtaaattaccagaggattctgcttataacgataatttccgggttctacgctatattgctaaaataacgattaatccagctatagcacaaggtatcagccatatcttaggctctgttgaagtgggcaaaatggccgatcttgtactttgggatcctcgtttttttggtgccaaacctaaaatggtcattaagggaggaatgatcaactgggctgctatgggagatcctaatgcatcgttgccaacgccacaaccggtattctatcgccctatgttcggtgcaatgggcaaaaccatgcaagacacctgcattaccttcgtttctcaagctgcatttgatgatggtgtaaaagagaaagcagaattggaaagacaggttatcgccgttaaaaattgtcgtgctatctcaaagcgggatttagtgcgcaatgatcagactccacttattgaggtcaatccggaaacttttgaagtaaaagtggatggcgttcatgccacttgtgaacctattgatactgcgacaatgaaccagcgttacttctttggataa

SEQ ID NO: 35330 - DNA, 411 bp, Escherichia coli
atgagtgcaaaaaatcaagataatgaaaatatagagcaatgctctcggatcgggggatatattttatcgaaagaaccgattacgtttaacgagaataaaacctctgttagcattaaagtgcgtaacactggagatcgaccaattcaggttggttcacattttcatttttttgaagtgaatcgagcattagaatttgatcgtggtgaggcatttggaaaaagattaaatattacatcaacgactgcaattcgttttgaaccaggtgatgaaattgaagtcagcctgatcccttttggtggtaaaaaaaacttatatggatttaataatttggttgatggatggggtggtgaaaatataacaaacaacaacgaaatcccagataaaattaatgctatttttctagcgatataa

SEQ ID NO: 35331 - DNA, 303 bp, Escherichia coli
atgcagctcacccccagagaaatagaaaaactcatgatttatacgatgtcagatgtcgcgtttaaacgcaaagcgcgaggcctgaaactcaattatccggaggcagtatcgattattactgttactgctttggaaggtgctcgcgatggaaaaagcgtagaagaggttatgaaagaagccagtcaggtacttacacaacaagatgttatggaaggggtggccgaccttataccagatgttcaggttgaagctattttcactgatggtagccggttagtaaccgtacatgaccctattaaatag

SEQ ID NO: 35332 - DNA, 123 bp, Escherichia coli
atgcttgtgaccaagttagataaagagctcagccggatcaacgtcattcaatcatttgtcgaaaagcgtatgcgccgtcgtggtgctgcgcaccaacttgctctgaccgaacgtcagacgtaa

SEQ ID NO: 35333 - DNA, 294 bp, Escherichia coli
atgaaccgctttcgtgaatcaggtgccgctggcctggtaaaccttcgacgtgggcgccctggtaatcacagactccctgagtcactgaaactgcgtgtactttctttacttcacgatcactacagcgacttcatcaccccagataccgggcctgctgagcgtgcactgcttattatccatgaacactacgctgattttggtccgacgttagcctgtgagaatctcgccgagctccatagtctatatctgaccatagaaacgttacgcaatctgatgatacagactagtttatag

SEQ ID NO: 35334 - DNA, 234 bp, Escherichia coli
gtggaggatgtcaaagatgatggtctactggaactgcgaactccgcgtgatcgtgacagtaccttcgaaccacaactggtaaagaaaaatcagacccgtattaccgggatggataatcagatcctctttttgtatgccaaagggatgacctcccgtgagatagctgctgcgttcaaagagctgtatgacgcagatgtttcaccggcactgatatcaaaaatcaccgatgcctga

SEQ ID NO: 35335 - DNA, 1176 bp, Escherichia coli
atgacaaaaaagaaaaatatttttattttcctgctcggcctgttgttggcgaaaacaacgatagcttcttacacaccaggaaatcagtctattaacgttaataagagttttggagttgcagatttaggagttgtttcagatgattggtttaagttaagcccgctgaatatgaatacgtccggaaatatttcatcctttaactcgaatccttgttatccattaactttcttatgcacaggaggacttgtttcattaggttataatggtcaagcaaattattctcttgagataacaagacatgtagccactataactgatgatgcaggtaacaattatatgttcactcttgcgtttccagataaccctccagttgttgggatatatgagaacaacctggctgttgtggggagaatatggaatacccgtgctgctattgataacagttttaattctccgcctgtttcgcaacaggatacagccaaagcctctgcatctgcccaaggatattgtggcaatatttcggtagggtgtaagtatacaatcgcagcttatatgcatgctgatagtggaatgccttatctttatgcaaagctcccgaaaaacatttctgcaaagagtgtatcttttaatgatattaaattattagagtttaaattaactgtgcgtaataaagctggtgacacagttattcctgttacagccaaactgtatatcagcggaacaatatctgttccgcagagatgttatatcaaagcagataaaaatagttttgatttcggaacagtttattctaatgcaaataatggaacaataaaaaatgtgtcaacatctataacaacagattgttactatgctcctgtgggaacaacgcaatcgctgaagatggacgctgtctctggtgggattttaaatgacaaagcaacggtttatcaggtagcttctgaccctactcttggagtcgttttcaatataaataattattctcagtgcgagtcaaatgctatcgggaggaatatatttaaacaagaatatttgattcgaaaagtgtttactcaacaacagcatcagacctcgacagatacaataaatttttctttgtgtaagtatggtgtaccatcggtaatgggtcagaaaaccgtgatactgaagcttacatcccgatggattataggctaa

SEQ ID NO: 35336 - DNA, 150 bp, Escherichia coli
atgacgaagtatgcccttatcggattgctcgctgtgcgcgccacggtgttgtatttttcgctgatattcagggaacggttatgtgagctgaatattcacacggggaatacagtgctgcagttaactctggcctacgaagcatggaagtaa

SEQ ID NO: 35337 - DNA, 180 bp, Escherichia coli
atgactgccctgtcaccggtctggctggacagccagagccgttatctgcgggatatgtaccgcccggggatggtgatagagcagtggaacccggagacacgcagtcatgaccgctatgtgacagaacgtgtgaaggaggaagcgtatgcggcagctcgtctggcgaaaatccgtcgctag

SEQ ID NO: 35338 - DNA, 204 bp, Escherichia coli
atgaacagtaaagaaagtttgcgcagaaaatttttgcaacttatgacagaaaaagttaaatcagagctactgccactcctagtagataatagcgaagcaacaaatctaattcttgcagacccttacggcaaattctcacataaaacacttgatactatttgcactgcattaaccccccctgatgcttcaacgcctgaaaagtaa

SEQ ID NO: 35339 - DNA, 231 bp, Escherichia coli
atggataaagtttcaacgagcattgcctatggcacctccgtaggcagtgctggctactggtttttacagttgcttgatcaggtcagtccgtcacagtgggcggcgattggtgtactgggcagtctgatatttggattgcttaccttccttacaaacctttattttaagattaaagagggcagggataaggtcggtgaagaggggagtaaccctcgaacactgagaaaataa

SEQ ID NO: 35340 - DNA, 162 bp, Escherichia coli
atgatgtctatcatgctgagtttttgtaattataatgtgtggcagttttgcatggatgttttactacataaggatggcgcattgccggagaaatgttacggggatattttggtggcgggtgatgcgtcatccttatgtggttatagttgtttatatctctga

SEQ ID NO: 35341 - DNA, 1263 bp, Escherichia coli
atgattaaagaaatatatgaaatagtcgaggaacaatatttttcatcaggtgattttaatggattgcctatttataagttagatggtcttttagatatcaaaagcgaaactttcaaagttttggttagaaaaggaatcgaagatgatattttaactgcttgttttggggataaccctcatattaaagcgttttcaaaaatccccaaggataatatccttaagaatttcgatgattcagagagtttagattacatatgcttatatccccatgaaaatatgctagccaaatctagtaagctttctgcttataataagtcaccatatgaaatggagctagcaagaggtgcgggacaatttgactatagaacttttgatttgtctgttttggaatactaccgaaatgatccacgttattcatactttacagactttatacatggggaaatatctattacggatgagtattatgaatcagacaatattcctgaacacgatcaaatattgcttaaaacatttgggtttgcttatgatgacagtctaaatagatatgttgcagttttcttgagatacctgagtgatctcagtcctgaacaccaaaatgtttgggcagcgaaagaagtaaaaggagatataaagttgcatcccgattactatgctgcaagcatattaggagcttgggggactaaaatttctatttttagtgcatttacggaagaacttaaaataattaataaaatgagcgtgttaataggaaaggctgaactttttagaaaagattacagcgatgacatgcctaaagagttcgggtttcttttgcgaccaactcgttcagaatttaataatttcatgcttttgttggataaaatgatgtccgacaatcttaataagaaattcttcgaggatgatgtggagcttgaaattgaagaggagcgcgaggatgggaaaatagtcgtaaggcctaaaggcactatacaaatacttgagtcatggcttgataaatatttccagccaacagatcctgcgccagttaaagatatgattgacacctttagaaaggtaaggcaacttagacaaaaaccagcacatgccatcgataacaataacttcaatcaggagtatttcaaacaacaaagggatattgtcataaaggcctatgttgctatcaggacattaagactcattttggcgagtcaccctaatgttaagaaaaatccaccaaagattagcgagcatctttataatggcgagatctgggatatatag

SEQ ID NO: 35342 - DNA, 1296 bp, Escherichia coli
atgaagcaaaatagtaccatttcgtctgtttttaagacatcacgagatcttcccgaaaactatgtcattagaaaagatatagatgataagttcattgaggcactgactcaagaaacacatgtcgtaatttatggcagctcaaaacaaggtaaaacatccttaagaaaaaagaatcttcttccagaagattatatcgatattacatgttcaaacacttggaaactggaagatattcacgttgcaattttaaaaaaaattggctatcaagtttcaacttcacaatccaaaaccttaaaaggctcagctaaggtaaaaataggaatcaatattcctttaattcataaaacatcatttgatttaactggggatgctgcaaaaacgattaataaaaaaaatattgaattagatcctggggatgtcaatgacataattacttctttagaagaggtcaatttcaataaaattattgttatcgaagactttcactatcttccagaacaaacgcaaattgatttctctgtggcattaaaagcctttcatgaatcatctaaactttgttttattattgttggagtatggctggaagaggataaactaacaacatttaatggtgacttagcaggaagagttgtttccattaatgctgaccgctgggagaaagaagacgtatataaactatttgagaatagcgagaagttacttaacattaaatttgatgaaaaatttaaatcagatattattgaaaaatgtaatggaagtatttttttagttcaacagttatgttttaaagcatgtgaattagaacagataaataatagccaaggtgaacttaagattgtaggtaaaaattttttagttgaagatgaaataaaaaaactaatcaatgaacaatactcaagatatttcaaatttttaaccgattttagctgtggatttgatcagacctcacttgaattatacaaatggattttgtatgttctgattactgttgaacaacgttatcttgaaataggtgtgcctgaggctgctattaggcggttaattcaagaaaaacaccctaaaaaaacagaagtttcacaaagaaaattaagacaggcgctacgaaagtctgttgatctccaagtaaaaatatctattaaacctattgtttttgagtttgactccagttcatccagaattaagatagttgatagaccatttatattatggcgatcgtatcaaaatcaagatgatctatacggatacgcagatctatctgatgatttaaaaaccaatattattactactggatattaa

SEQ ID NO: 35343 - DNA, 525 bp, Escherichia coli
atgaataaaaatatcatgcttttatcgttactactaacatgcgtctcagctactgcagaaacgcttaacgtgccagttaatctggtaacaaatgaaggagtaggcaaaagtatcggtcatattactatttcagagagcaattatggcctaatctttacgccagacctacaggatctacctccgggactacatgggtttcatgttcacgaaaatgccagttgtgctccaggcatgtcagatggaaaaagcatagcagcattggcagcaggtggacatctggatcctcaaaatacaggaaaacatcttggcccctatgatcctaatgggcatttgggtgatcttcctccgatttatgtaaataacgaagggattgcacataacccagtgttagcacctaaactaaaatctatacagcaaatacgtaaccatgcaattatgattcactcaggtggggataaccattcagataaaccaaccccgcttggtggcggtggtgctcgtattgcctgcgcgattgtaagttaa

SEQ ID NO: 35344 - DNA, 216 bp, Escherichia coli
atggaacttgcaaaaaactatagtaactggcatcgtctccaggaacttcagagagcattacagcgtatagaaaagaactgtaacaatagtatcttgataattacagatactaaaaaaactgaagagagttttaaggcggttcactgtaaggagcaactggaatttgaagagaagcataatattataaaagaaacgcagcagaaaaaagaaaattga

SEQ ID NO: 35345 - DNA, 714 bp, Escherichia coli
atgaaaataaaatataagctgctttcccttgtacttatatcattacaaagttatgcgggtattatgccttcacagtcgcgtatcgtttatcaccagttagacagagatcaggctataatgctggccaatactaatgattatccggttattgtacaaacctgggttgacaggggcgaaggtagtccggattcactgaatataccatttatcagtattcctcctgttacccaattggcccctggagatatgaagggtattcgcattattcacacacaggcccaaatccccaaggacagagagtctctattctggcttaatatgtatgaagttcctccagagaaaaaaggaggcatatcagaaaacagcatgctgatcacaatgaatactcagataaaattattttatcgcccgaaaggggtcacgagcataccagaaacagaattccctcggttatcttgccataaaattaataacagtcagatatcctgttcaaaccctagtcccattcatctttcgatcatatcaataatactggaaactcaatctggacagaaattggttgcagaaaacaacgactttatggtttatcccttctcagcaaagatttttaagtttgctgaatattctggagacccaaaacaaataaaaacagaatatattaatgacaatgggcaaaggagtaattataccatccccatcgaaagatgtacttaa

SEQ ID NO: 35346 - DNA, 1329 bp, Escherichia coli
atgataaatattcgttacttgtttcagtccattgtgattctgttattgttcattatagcagtactgcccgcaagagcgacctgcacacgatcggggatctctcaaactgaggatgaccgaaccgcacagataccgttcggaaaggtcaatatgtatgacacctatttttctccgatcgggacgctgctggccagcgtcgtggttccaccgaccaattatatttatggcggagccacagccagctccgttctgtggacatgcgatgcgactgacttgtccggcatttactttttggttgctaccaatggcgatgatcgggtaggtggatactatgatatcgggactactgatggactgtcggatgtttacgcaacctattttgcctacaccggtctccgacagacaatgtcaggtgttgttttgactcgatactggaagtccgttcctgtcacgacttatgcaacaacgtcaactggaaaaatacaaattcggttgcaggatattcctctgcttcaggcagaactttaccgggtcagcacgttacccggaacttcatctgcttcatattactgcggtgccaataatactgataatagcggtatagtctatggctccacggcagggcaaaattatacctgtactcagcctaactcttatattcagcttgtcgggccgggcctgactcatgacaatatcggtgaagacagcagtaatcattatcttttctggggagctgataatggattcggatatggtatgcgtaatgctaatcgtctttataataccccgacctgtgttgcccgtaatgtgactcccgttgtactgttaccgccaataactatcaaccagctggaatcaggacaaacagtaacagctcctttcaatgtcaccgtagaatgcagtgataatgcgacctccggaaccagtaatgcacagactgcgctggggtttcaggtttcagccggtgcctacaatgcagctcaggcactcggtcttgtgaacagcagtaatggagtcagtatacttctgtccgatagctacactagcagtgaaacggctaaaggtgtcggcatcaccatagcttacagcacagcccccaatacgcccctgaatcttatagggcagtccggactgaatgtgctgaacaatatgggggccagtgctggttggtatccggtgctgaacaatgcaatagctacaggtagttccaggagtggctatacaaactataactataactttattgcaacacttaaatcactccacggtcagacaataatgactggtaaggtccgtgcaactgcaaccgtactggtaaaaattcaatga

SEQ ID NO: 35347 - DNA, 2454 bp, Escherichia coli
atggctgctgataacgactatgtcttcgatccttctttatttaaaggaggtcgttttgatcaggcaacactgacacgcctgagccagccgggagccattgctccgggtaactataagcttgatatttatgtcaatcagcgttttattggtaaccatatggtatcctaccaactccgaaataagggagtgcaaccctgttttagccctgctctgattcggaatattgattttaaagatgttaaaactaccctgaacaataatgatgaaaaatgcctttttctggacactatcgcgcctcaggcaattaataaaacagagctaccaacactaaaattatctctaaccatacctcagtccctactcaatattcgtcctcttggatatgtggatccggagagcttccagactggagccaatcttggcttcgttaattatctggccaactattatcatgtatcgtattccggggacaatatcagcagcatggactccgcctggctatcacttaatggaggagtcaatctggctggatggcagtaccgacaaatgagtacggccgcctggaacgagcactcaggtaccgcctggaatagcatccgcagctatgttcaacgtcccattcccacgatagaaagtgtgtttatggggggacaactggtaaccgccgggcgttttttttcaggtatgagctataacgggattaatattgcaacctctgaagccatgcagcctgactccatgcgaggttatgctcctgttattcgagggattgctaccagtaatgcaaaagttactgttcatcagaacggagtggatatctatcagacaaccgtaccaccgggagcatttgagataagcgatctctatccgaccagctacagtggtgaccttcagatccaggtcacagaggctgacggcaccattaaaacgtttagcgttcctttctctgccgttcctgaatctatccgcccaggcacatcacgttatagcttagccctgggtcagacacgtaataccaggaaggaaactaactttactgatatcatttatcagcgaggactgacaaatgccatcacggccaatggtggcttacgcttatctcagaactattttgcaggtgtcatgggaggcgtttatgtcaacttacttggtgctattggtcttgataccaccttttcccgcgcaactctgcccgatggctacactactgaaggctggatgagccatatttcctggagtaagacattcgaaagaaccggaaccacggtatcgctggccagttatcgctactccactagtggttaccgggaactggctgaaatcctggggaccagcaatagctatctgtccggtactgactggttgaactataccaacgcacagcgttcccgttttgatctgacactgagtcagaatatgggtagttacggaaatacctttgtgacaggctccacgcaaaattaccgtgatggtcgttctcctgatacccaactacagctcggttatagccagtcctttcggaacggtatgagtatgaatatctccgtcacccgtcaacgggtagggtattacgataccggagggacgcgagaaactgcaacatcggtctcttttgccgtacctctattctcgggtagcccacgctcagtcagtctgacgtcttcttataaccacagtgataatggcgattcacagtaccagacgacagcttcaggtatgatggataatgctcaaacaaccagctacaaccttaacgttttgcgtgaccaagagaatcgtcagacaactgttgggggaaatctgcaaaaacgtctcccggttgcaagcgtcggtctgaatgtctccaaagggaaagattattggcagacatcaggaaatgctcagggggcacttgcagtccatagcggagggctgacattgggcccctatcttggtgagacctttgcactggttgaagctaaaggcgctgaaggtgcacaattattcagttccactcaaaccaggatagacagcaacggttatgcacttgtcccgtccgtcacgccttatcgttacaataatatttccattaatccacaagggatgaagggtgattccgaagtactggacagccagaaacgtattgttccggttgcaggctccagtgtgaaagttgtgtttcgtacacgtatcggtactgccttgttaattaaagctataaccccggccggtaacagcattcctctaggtgctcaggtatatgatgcgaataacgaagaaataggtattaccggacaggatggacaaatatatgtcagagtcgccaggagttcgggtaagctgactgttcgctggggagagggggaacgatattgcaccctgccttatcagttcgtgccagcagacgccgacaataaagaagtccttatcaatctgacagcactctgtattttccctcacactggggtgaactaa

SEQ ID NO: 35348 - DNA, 723 bp, Escherichia coli
atgcaaaaacaaaatggaatactttcctttctggcccttctctgtcttattcttacaggttattctcaggcaagtgtcgtaatgaccagtacccgggtaatattcccttccgggctgaatgaaaaaatggtccagttcactaattcggatccacagccttatataatgcagctgcagctaactactgcagataaccaacctgctccacaggctccatttatactgctacctcccgtcttccgtatagaatcatatagcggtcagaccatcagactgatttccaatggtgcagcaacacttccacaaaacagggaatcagtcttctatcttaattttactcaactaccatcaatcaaggcggagcttcagggaaagaatcatctgatgatagcgattaccagccgggttaaaattttctatcgcccggacagtctgtcaggaaatcccgtcgatgcttataaagaactacgtttcgctctcctgccggaaacactcgaagttactaatccaacagggttttatatcaatatcagtgctgcgcaaatcatggtatctggcaaggtaatacgcgtatctggtccaactatgctggctccattatctacagaagaatggcatccggaaagaaaaataacttcgctgaacggagcatcagtaagattagcgatggtaaacgactacggtgccgacatcatcaaagaaaaaccacttgaaaaccactag

SEQ ID NO: 35349 - DNA, 549 bp, Escherichia coli
atgaaacttatattaagaaggcttgtcgctgcgacggctatcctggcacttccctgtttttctattgctgcacctaccgtccagtttcagggagaagtcacagatcagacctgtaatgtcaatatcaacggtgataccaactctgttgttctactgccgaccgtaaaaacatcagatctggcaacaaacggagcatcaaccgggattactccatttaccattactctgtccaactgctctggtatcaccagcacgaaaacggtcacaactaacttcctgggacacagcgtgattactcctgcaggtattctgggtaacacagcaacagacagtgcagcccaaaatgttggtatccagttgctcgaaactgcagatgccgacccaaccgcgattaatttgtcaggtgtaacagttgctgcttcaactattacactgagcagtggcgagaattcaggcagtcatatttttggtgcacgatactatgcaacagacgtggcaactgccggtaaagtgatcgctgttgctgaatacactgtaagttataactaa

SEQ ID NO: 35350 - DNA, 510 bp, Escherichia coli
atggcgcgtgacgatgggacgccgcaaggcggtccattgtctccgctgttggccaatgtgttgttggacgaagtagatcgggcgctgcaacagcgcggtcatcgcttcgcccggtacgccgacgactgcaacgtgtacgttcgcagtcagaaggcgggcgaacgagtactgcgttggatgcgcaagatgtatgagcagttgcatctgcgcgtgaacgagaagaaaaccgaagtgggtccggtattcgggcgtaagttcctcggctattgctttcggcgctggtcaggatacaccgtcaatattgctgttgctccgaaggcgctcgacacgttcaaacggcgtatccggctcatcaccagatgcgttggaggccagggcatgaccagattgccgaacagatgcggatataccttcgaggctggaagtcctacttccggctggcacaaaccccgaagatattcaaagatctggattcatggatacgtcaccgactccgggctatccagctga

SEQ ID NO: 35351 - DNA, 645 bp, Escherichia coli
atgactcctgacagaacattgcgtcagaagccggggaagcccgggcgcatcgtgggtagcgagggtggagcccgcgaggtctcgtcgcgtgacgaagcactgtcggcgagtcatgacccggaaggcttggggcgagcggacctgcttcaacaggtgctctcgcacgagaacatggtcgaggcgtggaaacgcgtcaaggccaacaagggaagtgcaggtgctgatggattgaccatcgagcagactgttgaacacctcaagactcgctggccatacattcgggaagcacttctcaacgggacatatcggcctcagcctgtgcgtcgcgtggagattccgaaaccgactggtggcactcgggaattgggcattccgacagttactgataggctcattcagcaagcgttgctacaagtcctgcaaccgttgctcgacccgacattctcggagttcagttatggcttccggccgggccggagcgcgcacgacgcagtgctacaagcacagtggtacgcgcaggatggattccgggtggtagttgatgctgactttgagaaattctttgatcgggtcaaccacgacattctgatggaccgacttgtcggcgctacctgcaagctgggatcatggcggatggagtggtaa

SEQ ID NO: 35352 - DNA, 444 bp, Escherichia coli
atgaaatataatgattaccaattaattaaaaaagatttgcgggaatatgtaagtagaattcgaattcatactaataatctccgaagcgattttgttgctgaatgggcgttacttaccactatttcttgctggggagctccggaggggattataagggttgtatcatttgtgataacccttattttctttacttcaaaaatatacgtgccaccgaaaaaacggacaactcctgactttttatttgtgatgagagagcgtattactgatgcgaatttatcggttgagcaaatgatatttgcaaataaaagacttattaagattgagaaaataacgagaaattcaaatgttgctttttatataagtagatgctggaagtttattcttggctatctctttttagtcctttcatctgtggcttcaatgttttttgatcttaatttttag

SEQ ID NO: 35353 - DNA, 315 bp, Escherichia coli
gtgcgtcaactgggcaatattatggagcgcttggcgatctcctttcgggaaggcgttatcgatctgcccgacacagagttgtttatcgaggatctgaagaccgaaaccggcattctgccggagtctgatgcagggccgcagaccgcctccggtggttgctcaagctgccagatgctggaaggttcctacaaacatatccgcagccgcatcctgaaggccgtgatgataaggcaggagaataataagagcagcgcggcgcggcagttgaatattgatcgcagttccctgaaccgttggctgggggaacagacctga

SEQ ID NO: 35354 - DNA, 186 bp, Escherichia coli
atgatcgccgaaggggaatttcgcgaggatttatattaccgcctgaacgtgctgcaaatcaccactctgcccctgcgcgaccgcccctgtggcattcgcgtaatcggcgaagcgcggctaaacgagctgcgtgatcattaccatatgccacctattcaacttagcgacgccctgtggaatttctga

SEQ ID NO: 35355 - DNA, 135 bp, Escherichia coli
atgccatacatatgttctatcattttggtgttgaactcgtttgatgtccgaattggtaaagaagatattttgtttaaaaaaggaagtgctgttctcattgattacaatttaaaagatttttttcaccaaatatag

SEQ ID NO: 35356 - DNA, 852 bp, Escherichia coli
atgacaagcgacgtatatagttcgcaccttttacaagatgtagaaaatgcaatggtgtactgtttctcgcgaagcctaaagtaccttgggcctctacgacatgaacctcaggctgtctattcatcgagcccttatgatgcaaacaccgtaggtttgaaaggtgaatttaccgcctctcttcttcatcgaaatcgcgctaattttatatgttacagctccccttctataattaatggtaaaataaacgttagagaaaagtatgatactctaaacaacgcttgtaaagagtggttgtcatttttaggtgttgttgaggaagtaagaactactgataaaggtaaattaggctatgagttatacgttaaaacttctagcggcgaaaaatggcaagatctcactcacgtaggtgttggtgtcagtcaagtactgcctattgtattgatgttcttgaattcagatccttcagatgtgttaatttttgaacaaccggaattacatttacatcctaaagttcaatctaaattatgtgacctttttcttataatggcaaatactggtcgccagtgcattattgaaactcacagtgagtatatgatcaatagattgaggcttagagtagcgcaagatttagacaataattacctcaaaaaatcagcgctatattttataaataaagttaatgggatatcagaattccaaaatataaatattaacaagtatggtgcgattcctgaatggcctgaagatttctttgatcaaacagataaggaagttgaaaagattttaatggaggcaagcataaagaaaaataaagaaaaagctaagaggtttaccaatgacagcggttattaa

SEQ ID NO: 35357 - DNA, 1026 bp, Escherichia coli
atgacagcggttattaaatttgaatatttaatatctccattgatatgcactggtgggcaggtagatgagcatgtcaatggtctgcgattattaaaagaattagttagtagttctgacatagacgtcaaatgcgaggactccatactcagcaatatgcaagaggctggttattatccatgtgctaaaatattgagtagggcattccctggtggtgaagattgcgttcatagcgctcaagatgtttcaaaaataataaataatataattagccatttcgaagagtgcaatcctgaagttacttctcatgaaatcgagtgggactcgtttacggttgtgccgcctatagaaacaatatcagatgagagaaaaaataatgtcgaaattttcttgaggaatattctttcaagaaaatttctattaagtgaagagttttctttcttttattctcaaagaaataagccaattcttcagtcccaaaagttttcattaagcggtacaattagcgatatataccctgcggatagtgtagcaatacccattgaattaagtaatgaaataattgctcacggtaatattaatgatttcatcaataatattgatgggtactctttatataaaatggctagtaatatatccgctcttaaatgtgctctcttttttggttgtgtaaattttttgaaaaataattatacaggtgaaaagttcgaatgggatgatttcaaaataggagcagatttttttgattcgttgctaagacatcaaggtgcttttgaacaagagttttcctcagtagtttatgaaactatagtgcaagttttatgtcgccatcctaaaaatgaagtaaaaccatttagagtatcttccaagtctactgaacaaagaacccatggtgatttaagggcctttcgcacccatatcacttctagacatcaagcattgagactaatgttttgggttgattccaatcaaataatcacattggcaaatattggtccgaaatttgaagaatctatttctttgccatga

SEQ ID NO: 35358 - DNA, 198 bp, Escherichia coli
atgcctgcacgttcattatgccaaaatttccttaacaacatactggcccctttgcatctttaccgtaaagaatcactgattgacgcaactaatactgtaataaatggcgcgcccctcacgcttaccagtatcgggcgtcacttaaccggtacagcatcagttaaaaacaaaatgaagtgggtgtcgactgttgggtaa

SEQ ID NO: 35359 - DNA, 219 bp, Escherichia coli
atgcacgttcacctggtctttgtcaccaaataccgacgtcagatttttgactgtgacgcgacagaaaaactacgcacttacttttcaaatgtatgtgctgattttgaagctgaactggttaaaatggatggagaagcagagcatgtacacctgctggttgcctgtccgccaaaactggcggacagcgtaatagtcaacaatttgaaaccggtatcataa

SEQ ID NO: 35360 - DNA, 183 bp, Escherichia coli
atgttgggtgaagcggacaattcaaatggtaaattaccgtcttatatcactggcgctaacactttttctgacgtcagcagatgccagcaggcaccgtcctctgcctgctcccggcaacagacatacgtgagcgggagcgcctggccgctgttgtcggaattttttatgctggcttcgctgtaa

SEQ ID NO: 35361 - DNA, 282 bp, Escherichia coli
atgagtcgtatgcataatcccgcgcacccaggcgcggttcttcgtgaatatctgggagatatgtcagtcacagacgctgctattgcattaggcattactcgcacggcgctttcccggattctgaacgaaaaggcgggtatttctgcggatatggcgctccgtttagaatccgcactcggaaccagcgccgaaatgtggactggtatgcaatcccagtatgagctttgggttgcttcgcaaacagttcgcccaaacattcgtccattatttcaccatgcctga

SEQ ID NO: 35362 - DNA, 393 bp, Escherichia coli
atgattcaaaaaacaaatcagcaaaaacttgtttttgcgtggggtgtggtgcttttggtggtgagaaccaccaacttgttgagcctttttgtggagtgggttaaattatttacggataaagtcaccagaggtgaaaatatgaaaaaatggatgttagccatctgcctgatatttataaatgagatctgccaggccactgattgctttgatcttgcagtccgggattacaaaatagttcctgatttactgagagcaatatcatggaaagaatcccgttatcgggttaatgccatcggtattaatccggtaacgggatatggcagcggactgatgcaggtagttcccagcattttaacgaactggcccgctacggaattaagccggaacatctga

SEQ ID NO: 35363 - DNA, 993 bp, Escherichia coli
atgttgcatgctattaaatacacaataactatttttatatttttattttccaggtgtgtttttgcagaatattattgcaatatattatgggcaaatgatagatatccatcaatagagtcaaaggctgttaatatttctggatatggtaatgttagtgttcctattagattcaatgccggaggaaattctactcttgtttccagatatttctacagtgccccaccatggaaccttcttgtatcagaaggtagttatcgatactggattcaatttccagacagctggagaacctataatggattacggtacagaataacctctaccctggaaaagagcgcggtacaaataccaggatttcagacggtagtaacgcctaataacaaacacacctggattggtaatgagattttttgcaatgatattggagctaactatccattttctcctgccagttttactggcgtcaatgttgaaatagataaaaacagtgcatatccaggagtatataatcttcaattgccgataaaagtcgcttatgaagaaaataaaggtaattatagtggtagtcagggtggcggatggcatgatttcccgagtgctatatcaaagctaaattatgtaacaactgataactttcaggtagtagtatcgtcctattgtagcttaacaacacccaggataaattttgacttcggtaatgtttctgatcgacaggttttatccggagtgagtaaaagcgttaacataggaattagttgttctggtacatctaccgtcaaattaactctacataatacaaataacaatatgaatactacaaattgtggttctgcaacatgtacgctaactttcgattccgggaaatcagaaacaaacgtcaactttacgggacagggctacaaagaagtgaggataaataatttattaaaatcaaacaatgtatctccaggacatttttctgccggtatggttttatccttttacgttttgtag

SEQ ID NO: 35364 - DNA, 531 bp, Escherichia coli
atgagaaaaaaccttctgttttatattgtgctatctttattttattctattaaaggatatgcattagattattcaattaacatttccggtaatgtattgacctcaccatgcataattaataatggcaatccaataaatattgattttaacgatattccaaccagtagtgtagggacagacaaagtaaaaaaagaggttaaattagctgtatcatgtggatactatggtgctctaccctatgtgaaattaacgggtaataaattagaaggaattgataatgttatcgcaaccaatattaaaggattcggtatagcattgtatcagggcgcaggaacaacaactaagctactcattggcgagggtaaggtaactggtcagggtggaattggttacagaattactgatggtatttctggggggccgggtagtctgacatttacatttaccgcaattcctttttccagtattcctgatatgcttgaagccgggagcttttctgctacggcaaatttaagtattatttactcttaa

SEQ ID NO: 35365 - DNA, 1194 bp, Escherichia coli
atgaaaccgaaatacatcacatgccttttggcactaaatattttttgttttttttcagagtcagcctggtctgttgacagaggtgttcagaatgacaaaacaaaaacgttaaatagcacaaaatcagataaaatatatgttgacaactcagatatatattcagtgggaagtagtttctcctctcaatccttatcagatagtcaaaaaaatcaatacaacattctacaacgaaaaaaaatatttgagcgtgttataagcgatgtaagaaaagtcagagaaaacctgaacgaattggagaagatacatgaaaaggaaatgaaaagcttaaccgagcgcaatgaactaatcttcaacaaactcacaaaagacataatatcccttcgtcaaaaactctctgacagagaaagcgaacagaaaaatttatcagaagaagggaaagataaaaacctcacatcagcaattgaagagattaagttaaaagatcagaaaattcatgaactttctgagttgaataaaaagcttaatgaaaaggttgcattagtacctgtcataaacagtaatgagttgaatacatcaaccaatcaacaggattatgctactggtattatgacaggaagagatattctcgtacttattgccgcaaataagatgcttggagtaaatacagataaaaggattttactggccggtatacaggatgccctgaacaataaagagttgcttaacgaagataaattacagtctgtacttgatgatgctgagaggaatttacagaaatcacgtatggaaacagcaagaaaatggaagaaaatgggagagatatggattaataaattcagaaagcagaagggagtacggcatgacaagaggggcttctggtataaaatagattatattggtgatggtgattttgtaacagaagatgataccattgttgatattactatgactgaaaagttaaccgatggcactataacagaagacatggatgccaacggcacagtactatcccaaccattaaacaaatatcctccggtaataagaaatgcgttatctttagttaaaaaccacggagccattacagttgtcttgccaccagagttagcatatggagacgatggatatctgcctaaaatccctccaggagctacagtaatatacacgataaggattgacggtgttacaaaaaactaa

SEQ ID NO: 35366 - DNA, 531 bp, Escherichia coli
atgagcaaatttagtttaagagctttatttatcacaacattaattgcgtctacatcaacatatgcagcagataatttaacctttaaaggtaacttagtcattccaaattgtgttgttaatggcaatcaggctatagaaacaaatttcaacaatgttgaaatacaaactcttgtttctccaaatacgggttatcattggaagtctctgactatacctgttaactgtccttatactttagggatgcctaaaataaaactaagcggaaataaagctgtacaagcgaatagtcttaaaacttctaaatatgatatggaaaaactggttgtatatttcaaacagggaacggctgctaatccaggaaccccaattacgttggggggatataacaatttaacaggtacatctgtaactggtacaggaaacagtagaaatgtattgattacagcaggcatagggcgtgagggaggtatggatttactaaaaccaggtccgtttactgcatcagcaaatatggaagttcgttacgagtaa

SEQ ID NO: 35367 - DNA, 552 bp, Escherichia coli
atgcaatttggtttatccgcatctttttcatttttgatttttttactttcatcattaactactattgacgtatatgcatcagatttagagtttaaagggaatctgttggacagaccttgtcagatagatcctgcctctgttgcccaagaaatttcattcagagatacagcatcaagattatttttcacgtggcctggaaaaagcagcgaacaaacttttcagattaagcttgttaactgtcattctatgacaataggaaaaattgtagaacttacttttaaagggcaggaagaaaataagctgccaggatatctacaggttagaggtattaatcttggaaaacttggtataggaatcattgatactgatggagtttctttattgaaacttaatcaaatccataataaaggaaaaggtatgaaggttgatgataatacagtaacttttaactttaaagcgtttgttcaggcaacaaatgatgctatttcaagcaaatcagttaagcctggaaattacagtgcaacagcgacattcgtgcttttatacaagtaa

SEQ ID NO: 35368 - DNA, 537 bp, Escherichia coli
atgggaaaaactacatcgtacatctgcctgttagcacttatagttacgttcagtatgaactatatgctccatgcagatgagttagatctccaggatagcatctctgtagttaatgaaagtcatcatcagtggattaatgagagaaacggacgcacgggtattctcattgttagtggtgctgtactttcttccccatgcacgctaaaagataatgagatagagttaccatcatggggagaagcagaaaataataaaccttatgaaataactcttcttttatcagggtgtttcaataatgcagattacagtaatgctggaattatactagaaaagataagactgaataatttacatgagaaaagcttatatttaaatggcaggttagttaataacaatcaaattgtattaagggaaggtgataataagtttgttttttatttcacatctgcattaaacctgcttagaacgagggggggggctgatgtatataaaaaaagcgaatctaatagcactcttttattattgagttatgagtga

SEQ ID NO: 35369 - DNA, 738 bp, Escherichia coli
ttgagtataaaaccggcgataaaaaaggcgctgatggcggtagcgtgcctgagcgccatatcaacaactacagtagacgctgccatttctcttgatcgcactcgtgcaatatttaatggtggtgaaaaatcaatgacgctaaatatttccaatgataacaaacaactaccatatcttgctcaatcttggctggaaaatgataagcaggagaaaataactacaggcccgctggtaattactcctcctgttcagagaatggaacctggagcgaaaagtttagtacgaatatcgagtacaccagagatagagaaattgcctcaggacagagaatcattattctatttcaatctacgtgaaattccacccaggagtaataaggcaaatgtgctacagattgctttgcagacaaaaataaaattgttctatcgccctaaagcaatagaagcagagccaaatgccatctggcaagatcaactcgtgttgagaaaagttaataatgggtacaaaattgaaaatccaacaccatactttgttacagtaataggtataggcaatagtgaaaagcaagctaaggaaggagaatttgaggctgtaatgattgcaccaaaatcgaccagtaaaacggtgaaagtaacggatagcgaaaatttatatctgagctatataaatgattatggtggtcgtccggtgttaaagtttgaatgcagtaataatatctgcgttgcggaaaaaaagtaa

SEQ ID NO: 35370 - DNA, 2505 bp, Escherichia coli
atgaaaaaaaacaggacatcttttaaaattaatagtatcacttgcgcattgatactttatcttgcaggtgctccagtttatggtatcgaatttaatacagatgtactggatgcagcagacaaacaaaacatcgacttttcaagattttcccaggccggctacattatgccagggaaatatcaaatggatattgtcgtaaatgggcaagggatatctccggaagggtttaatatcagatttgttgagccgcaacgttcttcaaaagatggagaaagattactgccagaagcttgtttgacaaaagatattgttaacaaaattggtttaacggatgaatcactggataaaataacatactgggataatgaacaatgcgccagtcttagccagttgcctggtgtcgagatagagcctgatttatctgaaggtttactgaaaattaatataccacaggcatggatggagtattcagatgcctcctggttacctccatcccgttgggataatggtataccaggcatattgtttgactacaatgttaatggcagtgttaataaaccccatcaaggcaaacaatctcaatcattgagttataatggaacgggggggataaattttggagcatggcgattaagggctgactatcagggaagtttaaaccatgtaacaggaagtaaacaaggaaccacaaaacaatttgggtggaatcgtttctatatgtttcgtgccattccgcgctggcgcactaacttaactcttggtgaaaactatatcaactcagatatatttaattcatggagctatacaggtgccagcctggaaagtgatgatcgtatgttgccaccaaaactacgtggttatgctccacaagtttctggaatagcggatacgaatgctcaggtcgtaatttcgcagcaaggacgcattctgtatgactctactgtacctgccggtccgtttaccattcaggatttggacagttcggtacgtggacgtctgaatgtagagattattgagcaggatgggcggaaaaaaacatttactgttaatacagcttatgttccttatctgacccgtcccggacagattcgttataaattagtaacgggcaggtcgcgcagttatgaacacaaaactgaagggccattgtttgctgctggtgaagcatcatggggtattgataataaatggtctctttatgggggggggattttttctcatggttataatgccccggcaattggcattggtcgtgatttaagtgaatttggcacactttcagctgatattattcagtctgttgcccagattccaggtaagaatactaaaaaaggtaagtcctggcgtataagttactcaaaacggttcgatgatgtgaatgcagatatcacgtttgcaggttaccgtttttctgaacgagattatatgacgatggatcaatatcttaatgctcgttatcgaaatgattcgtcggggcgagagaaggagttatatacaatcacatttaataagaactttgaacaatggaatacttcaataaatatacagtacagccaccagacttactgggattcccgtatatctgattactatacagtatccataaaccgttacatggatttactgggagttaagggagtttcgcttgggctttctgcgtcgcgttccagatatcagaacagggataatgatacagcattcctgagggtttctgtgccatggggaaccgggaccgcaagttataacggaagtatgagcaataatcgttatacgcatacagccggttatagtgacactgttaatggtggtctggatagttatagtctcaatgcaggaagaagtaatggcaatggtcaggaatcacaaagccaggtaagtggctactatagccacagtagccctttggctaatatatcggctaatttttccactattgagaaaggctatacatcatttggattaagtgcgtcaggtggagctactgttacagcagaaggcgcggcgttacacgcaggaggcatgaatggtggaacgcgattgctcgtagataccgacggtatcagtggagtaccagttgatggaggtcgtgttaaaactaaccgctggggaattggcgtggtgacagatgtaagcagctactacagaaatacaacatctatagatctcaataaacttcctgagaatatagaagctacccgttctgttgtggagtctgttcttactgaaggtgcaattggatatcgacagttcgaggtgttaaaaggaaaacatttatttgcgattcttcgactcaaggatggctcatatccaccatttggaacaagtgttacagataaaaagggaagagagctgggtatggtatctgaaagtggtttagtttggttaacgggagttaatgaaaaagaacgattgaatgtaaactgggatggagaaagtaaatgcgttataaaaatacctgaaaatataaacacagagcagcaattgttacttccgtgcttagagtaa

SEQ ID NO: 35371 - DNA, 597 bp, Escherichia coli
atgaatattgcatttatgcttgcgttcattatagcgatattccttggttcatcatcatcatatatatatgcatcaccttcctttccagcggcaaatgtgagcctacctgagtattggggggaggagaatgtgtggtggcatggtagagcaaattttaaaggacaagttattgctcctgcatgttcgctggctatggaggatacatatcaagcaattaatatgggggtaatgccgatcagagatttagaggagacctctagcggtccggagaaaaaactcagtatacgtttacgagattgtgaattttctggtataggaaaaggagtttatagtgcaagccgtataagggttacttttgatggtattcagggagagatgccggaccggttttcactgtcaggtcaggccagaggcataagtttgcaaataactgataataacgggttttctgcaagaccagggaaaataatgccaccattattacttaatgggggtgaagagggtttaaattataaattacgaatcgtcaggaatggacaaccgttacattctggtaattactatgcagctttaagatttaaagttgattacgaatga

SEQ ID NO: 35372 - DNA, 564 bp, Escherichia coli
atgaaaatgattaaaaccgtaatggccggcgctattgcaatggctatggtttcttttggtgcaaacgctgctggtgctgcagctgctcctcaacttgctaaagaccaagggcaaggtgttgttcagtttaagggtacagttattgatactccgtgcgggattgcacctgattcagtagatcagtctattgattttggacagatttcaaaatcccatttaaataatggtgggatctctgtgaagaaagatcttgatatcaaactggtgaattgtgatatctccgcagcagcgactaaagctgttagtgtgacattctcaggaacaacagcggcaggtcatgctaccgaactgggaacagcaggagagacgggcaccgcgattgttgtatctggtgctgatggttcacctgtgtcgtttgatggcatgtcaaaaggagggaaaactcagcttaaagatggagataacattctccactacagtgcttgggtaaaaaaagcagcaggtaaaacggttacagaaggtgagtttgcggcagtagctaacttcaatctcacttatgagtaa

SEQ ID NO: 35373 - DNA, 315 bp, Escherichia coli
atgtttttagaaaatgaatgcctcttgctgagcaagagcccaaaatgctctttaacgcccggggctgtacatgaactgcatttccgtctgttaatagaggtttcatctatacatagcgaaaaagctataaaggcgcttgagggtttccttgtcgaaggttatccaagaaaagatatttatgaacgatatggtatatctgccgggtatttttcaattatcttaaaaaagataaagtatatagattatattgtatccaaattgacaccatactacctaaaaaaaccactgatgaatacgactgacacagtcaattaa

SEQ ID NO: 35374 - DNA, 1047 bp, Escherichia coli
atgtcagcgattgatcaacctgcgcaatatgttatcaagtcagaagacgactttgtatcttttgtaacagaaatgctcggaaggaaggatatcgactcaagcgacttcacattccctaacgtagttttcagtggatggccaaagatcaatattaatgtaaaaggcgatccaaatagatataattcttcattgactgcgtcaatgctttttggtatggcagagcttacgcatgaaatacaaaaagcatttacggtagtcagtcacagcactcataatcggcagaagctaaaagatgcagagaaaggtttgctggatattgtctaccgaataagcgaaggctcaagccaagcggatggtgactcagatccgattgtaaacggagtggtgacagtgtttactcaagcgataggcaaaatgacaggaaggcaagcactatgcgccgtcgccgctatcgtcttagctgccagcacggtaggctataagtggatcaatgagtactacgaaacacagcgacatgaccaagattctcaggtgcaattggtggaaaaaagcaccaaagcggtaaacgaagcacaagacaatgtgctcaagttgttgattagcggtcaaacaaacattagcagagaggttctggctcacggcgaggatggtaaaagcaagttgcttaaaaagcttgctcaagactcgtcagttgagagggtaacaattggtcagagagtggtaaatagagaacagttgaataccttaaaccaaagacaatcaattgatcgaaaaaaggaaactagaagagataacttttatgtcacgggcgttcgtcgctcgggagaaacaaatcaggacataaatattgacgtcataagggtttcaaatggtgaatctttcaccataaaaacctcagccgacataacatctactgatgagcttcttgagtttttgaatgctgtagccaaagaatcaactgttgaaatttcatacctagaggttgtagaaaatgggcacatttcaacagggcaattgataaatatattccccagcgaaccagagtga

SEQ ID NO: 35375 - DNA, 240 bp, Escherichia coli
atgagtgataactggctttcgactctgagaaccaggacgccacaggaaggatttgagcttgcagtgatactgagtcgtcgaggggtaaaaacaactcagcctgatacagatatactaaagaaacttcgccctgaatatgcaaacaatgccgaatccttaattagtgtgtcgcaagttattgctataaactttcagacaattgcgacagccaatggatactggatgaacaataacatataa

SEQ ID NO: 35376 - DNA, 210 bp, Escherichia coli
atgaataaatttaaaaatattttctttctttgtggaataatgctgattcctgctgcatcttttgcacatagcatttcagtcacgtcaacaactctggagagtgctgaagctcaaattgcagctaaagctcaaaaggaaggaaaccgatataaaattattgaggccagcaataacaatcgcatacatatgactgctatattatacaaataa

SEQ ID NO: 35377 - DNA, 1986 bp, Escherichia coli
atgtccggtacatttactcaggagaacggtcgtctgaccattcaggggcacccggttacacatgcattcagtgctcaatatgttgcaaatgcagcagcctctacaggagatcattctgttctgacgcaacccacttcattcacccaggatgactgggagaacagaacgttcagctttggttcactcgtgttaaaagatacagactttgggctggggagaaacgcaactctgaatacagatattattgcagacaactcatcaataactcttggtgatagtcgggtctttattgataaaaatgatggccagggtatgactgtctcgcttgaggaaggggagtcagtcccggttaatgacgcagataagagcgtttttaatggtacaattactcttaataataattcatcgctgaatatcgcaaatgctattttcaatggggaaattataggaggagcaggttcgaatctcaaattatcctcaggaagtacatggaagataaatactaataccatattaagtaaacttcagggaaataatggacagatatcctttatttccagtgactggtctctaaagctgctgacggtaaacacgatggatgcgaacaatatgcatattgttatgggggtcagcacatcgaataacatgagtgatcgtctggatattattaataatgcagcggggggacataacactcttgacttgtcatatctttttgctcgggcactaactttgaaagaagatataactctcgcttctgcccctgcaggtacggcccatgattatttctcttttagtggtataaacagaggattttctatatatacgccagatactcaggtaatggaaaaggatggaaaggtattttggcagctcaaacataatgttaattcagaaccagataatccctcccctgtagagccccctcagttaccacccaatagtaaccagggggatgatacaccagatacaccgtcaaatatcgtgccacctgcagaagcagagcagggctcagatatttcttcagatcaaaggccaaacgtcgaagagccagggagtgacaatatttcatccagtatagatgatagtacgcatagtaacgttatttttcatggaagggatgataagaagctattaagtaaaaccaagagattttttgcgaccagagagttcatattaagtgataacgccgggcactggatgcaaataattgataataataatcatgacgggatgtggatgtctgcaatatatagtcgcggtggttatgatagttttgatatcaggtataatggatttgatactggagtgacaaaaaaaataaacaataatattttatgggggatcgatattcagcattataatggctataataattctcatgattaccgaaacaatttttatgtattaggtgctgatgtatttgtcagagatgatatttcatcaggtttttttatcgatggtagtgtaggttataaaaaaatctctgaaaaaatttctatacgaggggaacttaacgacttatcgggaaaaactaacagccatgtgataagtgcaggtatccgttcaggatggaaaacacatttaaaaaatacaggaatatctttaacgccatcggtttctctgaatacactgaaaactgacagctcaactctcaagggtgcagaaaggaaagtaaaacttgatgctggtagtgcactttggtccagcgcaggatttataactgaaaagaaaattggggcatttaccctggatgcagggatatggcgttcattcagccttaaggatattccaggtattacattgagtgatgcaaggatgtcacatcattatggtgtcaacggtaataacagatacagaataaaaatgggaatggacggaaaagtaactgataatatgcatatacagttaaattttaacagcaatattggtagatactttaaaaattacaacaatggcacacttagtgttcgttatgatttttaa

SEQ ID NO: 35378 - DNA, 159 bp, Escherichia coli
atgcttataagaggttgcaatggtttgttgagatttgacattacctggaatatctctgtacatagatgcttcaacagggagcttgctgacaccatttttctacaggcaaacgtgacatttcttgttgtgaaaatcttgcgagtaccatttatacagtag

SEQ ID NO: 35379 - DNA, 213 bp, Escherichia coli
atgggaaagattaaaattgtagtttcagatcagcagccgtttatgattgatgggataattggatttctcggacattatcccgatttatatgaggttgttgggggctataaagatctgaagaaagctatagcggagtgtaacaaatctgcagcccaaatatttattttaggagaatttgcaggtggaatgatggggtccgaactcataaaatag

SEQ ID NO: 35380 - DNA, 621 bp, Escherichia coli
atgacacgaatgcccgcacccccggacaaagtaggcgtccccgcccggaacaagccggggcactgggtgcaaaccgaacgcaaagcccatgaagcatgggcgcgcctcatagcccgcaagccccgcgccgccgagcttctgcaccatctggtggcccaaatgggccatcagaacgccgtggttatcccgcaggctgtactggcgaaactgatgaaccgcagtgtggacaccgttcaaagagccgttaaggacttggtggccgggggttggattcaggttgtgcgcctcggtcgtgggaaggaagcggcctatgtggtcaatgaccgggtggcgtggggccagccccgcgaccagctccggctatcggtgttcagcgcctccgtggtagccgacttcgacgaccaggacgaagccctgttgggccacggcgatctgcgccgcattccgacgctttaccccggcgagctacaactgccgaccggccccggcgaggagccaccatcccaacccgcgctggatgggctggaacccgatttgccccacatcgaccccgataccggtgagatccacggctatcaggacgaactagaagcacgcggccaaggccgcttggaggtgtag

SEQ ID NO: 35381 - DNA, 201 bp, Escherichia coli
atgcacatgcactaccgccaccccgaagacggcgacaagccttgccgctgcccgcgctgcggctggtctggcacgttgcaccagactgacgaattcaccccggccagcggcgaatcgttccaggtgtgcccgaagtgcgccccagaagtgccggtaattcccggcgagttgaccaccagcaaagacgagctatggccatga

SEQ ID NO: 35382 - DNA, 981 bp, Escherichia coli
gtggcggcatttgcgatcatgcgctgcaagaagctggcgaaaatgggcaacgtggcggccagtctcaagcacgcctaccgtgagcgcgagacgcccaacgctgacgccagcaggacgccggacaacgagcatagggcggccaaaagcaccgacgaggcgatgggcaggctccgggagatgctgccagagaagcgccgcaaggacgctgtgctggcggtcgagtacgtcatgacggcatcgcccgactggtggaagtcggccagccaggaacagcaggcggcgttcttcgaccaggcgcacaagtggctggccaacaagtacggcgccgaccgcatcatcacggccagcatccaccgcgacgagaccagcccgcacatgaccgcgttcgtggtgccgctgacgcaggacggcaggctgtcagccaaggagttcatcggcaacaaggcgcagatgacacgcgaccagaccacgtttgcggcctctgtagcggatctggggctgcaacggggcatcgagggcagcaaggcacgccacacgcgcattcaggcgttctacgaggctctggagcggccaccagtcggtcacgcgaccatcgaagcatcggcggttcagcccaaggtgctgcgcaaggggtttttcacgaaggacgtggagacgccggaagctgtggccgagcgtctgactaaggccgtgcgcaaagggtatgacccggcattgattgcggccgcaggagcgcgagaaatggcccagaaggccaaacaagcgcaggagacggcccgagacctacgcgaccgcctaaaacccgttctggaggctctagggccgctcaaccgcgatatgcaggccaaggccgcccagatcatcaaggccgtgggcgacaagctgctgaccgagcagcgcgaaacccagcgccagaagctggccgaacgccagcggaatcgacccagcagggggcatgatcggggcggctacagccgatag

SEQ ID NO: 35383 - DNA, 255 bp, Escherichia coli
atggaatcatacagcctcacactcgatgaggcctgtcagtttcttaagatatccagaccaaccgccaccaactggatacgaacaggccgcctacaggcaacacgtaaagatccaaccaagccaaaatctccttacctcacaacacggcaagcctgcattgcggcgcttcagtctccgctgcatactgtccaggtgagcgcgggtgatggcataacagaggaaagaaaatgtcactcttctgtagtggcacagtaa

SEQ ID NO: 35384 - DNA, 282 bp, Escherichia coli
atgaaagatttaacactcaaatttgccgacagggccgacttttcggcctttatgggaagtattggctattataatgacgagtcgatgcaggatgatattctgattgatgtgataggtaacgtgtacaaagaaaccggagagctgactgaagatggcgaaccggtatgtgttaaggaagatggatattttgtaaacgtgcgcatcattaaggatacgcaaatatcgtcattattcgatgaatacgcggttgctgttgagcatcaacttcgtggctggatgtga

SEQ ID NO: 35385 - DNA, 144 bp, Escherichia coli
atggaacacggtgcccgtttaagaaccagtcgtgtaatagccatcgcctttatatttatgtcagtgcttattgttctcagcctctctgttacccgaacggcagattggatgtcaggatcattgcgctcttttcgtaacgtttag

SEQ ID NO: 35386 - DNA, 357 bp, Escherichia coli
atgaacgcctttttaagtgttcagggggcttctgcgcctgtcaaaaagaagtcgtttttttctaaattcactcgtctgaatatgcttcgcctggctcgcgctgtgatcccggctgctgttctgatgatgttcttcccgcagctggcgatggcggcagggaaggacttaatggagtctggtaatagcactgttaaagcgacatttggtcaagacaccagtgttgttaaatgggttgttctggctgaagttctggtcggtgctgtcatgtatatgatgaccaaaaacgtcaagtttctggccggttttgccatcatctctgtatttattgctgtgggtatggccgtcgttggcctatga

SEQ ID NO: 35387 - DNA, 561 bp, Escherichia coli
atgaaattaaagattcttttaactggaacatgttggtatgaactgactggactgtggcatttgttatctacactaggttatgatgtttttcgtgtaccatatggaaattcctgtataccggattgttgggatcttgtcattgtcgctttaagtgcagagcctgtaagtggatgggggcgctatctaccctggatccgctcactaaagtctcaattatcagggaaaatgatggtatttgtgccagaaagactgaaaaatatcaatgtactgcaagatatttgccctgtgtatagtggtaacagaagaccgcaatatataattaaatttattaatgcagcgctgagatataaggattatccagcaactcagttacaatttactgatgggcaactccgtgttctaaatcgtctgtcaggaggtaaaggcaagctgagtttaaacagtcaggaacgaggactttattatcaccagtctcgtctgtcaaaaagtattggggtaagaaatttaagattattgctgataacagggatagaaagagagctcagcagaatgattaattag

SEQ ID NO: 35388 - DNA, 282 bp, Escherichia coli
gtggtcagtgaaaccgccatcagcagagccggaaccgttcagcagacgcacccacgtaccggcttcgccgttaatgtccctcaaatcgcccatgcgtttgttcaggttgttaacttcggtaatgaagttgttataaccgatgtgcaggaatgtcgctgcagccttgctctggccatcattacgtgcaacctggtaaccatcgaggacccactcttttttcccgtcctcttttctgacactaagggtgggggtgacatcactgaatcccacaacccgcgttga

SEQ ID NO: 35389 - DNA, 513 bp, Escherichia coli
atgcagatcccggcgtttcgtcagaaactgagcgacggctggtaccaggtacgcattgccgggcgtgatgccggtgaaaccgaattgtctgcccgtcttaatgagccgctggcaaatggtgccgtgatccacatcgtgccgcgtctggcgggagctaaaagtggcggtgtgtttcaggtggtgctgggggcggcgctgattgcggtggcatggtggaaccctgtgggctggctgggagccgcggctgtatcgggtatgtatgcggcaggggccagtatgatcctgggcggagtggcgcagatgctggcaccgaaagccaggacgcccacggcagcaagtacagataacggcaaacagaacacctatttctcctcactggataacatggttgcccagggcaatgttctgcccgttctgtacggtgaaatgcgcgtggggtcgcgggtggtttctcaggagatcagcacggcagacgaaggggatggtggtcaggttgtggtgattggtcgctga

SEQ ID NO: 35390 - DNA, 243 bp, Escherichia coli
atgccatcaacaaaaggagaccagttcatagaacttccgataagcattaacgccaagatattgttattaaatgaatttcttgagcaagggattactaaaaccaatctggcaaaaactataatggttagtccgcaagaattatcaagattactcaacttgagccattcgactaagattgatacaatacaacgtgcgcttaatcttatggggaaaaatctggaattaacacttgaacatcattga

SEQ ID NO: 35391 - DNA, 210 bp, Escherichia coli
atggttatagattcttctcttaaaaaagatccttttttccctggttcagttattggttggggggttataagatgttctccatggaatttgtttggggtgtttgatgactatgatgaagcattagagttctctttacttcttggagaggattatgaggttatctggggatctcataagctggggacttctggttttctggtgtgggattaa

SEQ ID NO: 35392 - DNA, 624 bp, Escherichia coli; identical to SEQ ID NO: 31165

SEQ ID NO: 35393 - DNA, 282 bp, Escherichia coli
atggataccattctggtagtacgaccacgtcaggttcagtttaaatggtccttcgatcaggtgaccggagcggtaagtaacaccggcaacacgtggtttaagctactgattaaaccaggatgtgattcgaccgaagaggaaggcgatgcctggtatctacgtccgggagacgtggttcatcagcctgagttacgtcagccggggaatcactatctggtctataacgacaaattcattaagattagcgattcctgtccggctaagcccccttcggcggactaa

SEQ ID NO: 35394 - DNA, 675 bp, Escherichia coli
atggttctggcctggtatattacactaccaacgcttgttgccttacttgcgccagctaaagggcgatttaacgttactgccaagggcgggttaataaaaaataaatttgttgactggcgaatctcatatccttatcttatttttgctattttaaatttaattggactaataataggtgttattaatatttatagattgcaaggtgtctctattgaacaaaagcaggtccgcttttctcctcggatagatgtttcttttaaaggtgtgataaaactagcagatggacggtgctatccctgttctgttattgatttctccgaaggtggcctgggggttattgttgatcacatctccgatgtaaaagaaatcgaaaaaactcagcatttgtctctttatctgagtgataataaaggggaatgtgatattcctgtaaaagttgttcatgcttacaaaaataaaattggtctgaagattttgccaatgacttatgaacagaatattaattatgtcagagtaacattttcacgtgattcattatggcaagagtggaatgataaaattaagcaagataatatactaaagagcttttttgacgtatgtatcatctctcttaaagggtattacaatatgattttttatattctgcggacactaaaaaatagtcgtgagaattag

SEQ ID NO: 35395 - DNA, 681 bp, Escherichia coli
atggcaacgacgaacgcattctgtctggcgtcaccgccactggcacgcatccgcctttacggggatttacaacgatttggccgccgcctcagcctgtatgtgaacacggcagcggaagccattcgcgccctgtcgatgcagatgccgggctttcgccgtcagatgaacgaaggctggtaccagatacgtattgccggttatgacacggcaccggaggcggtgtacgcccgtcttcacgaacagctgggtgagggaacggtcatccacattgtgccgcgactggccggggccggaaagggtggactgcagattgtgctgggggcggcagccatcgtgggctctttcttcacggccggtgcctcgatggcgttatggggtacagccctgagtgccggcggtttttctgccaccacgatgctgttttcactgggggccagcatgatactgggcggtgtggcccagatgctggccccgaaggcaaaaacaccggattaccgcgcaacggataacggcagacagaacacgtacttttcctcactggataacatgattgcccaggggaacccgatgccggtgccttacggggaaatgctggttggctcccgccgtatatcccaggacatcagcacccgtgatgaaggcgggggcggaaaggtcgtggttatcgggcggcaggggtaa

SEQ ID NO: 35396 - DNA, 555 bp, Escherichia coli
atgagttcatcccgcttgtcagcgatctcatcttcaatgtcaaaaatttccatacgttggcgtttctgctgccgttccagtagcttcagcttttcctggttttgcttttgttcttccatcgattgcgccagtctggcttctcgctttaacgacttgatttgcattttggtatcgcgtaatgcttcttccgccgcaaagatcatatcttcagcccatttttccagcttatctctttcagcttcaaaaaggacattgtgctgctccagaacttccgcaagtctggcgtcaatttgcctgttcttgagtaagatcaagtcatcaggtaatgcatctgaacttgccgaattatccagcttttcgttggttattgcagacaagttgaacagacgtttacaagcttcaccatctaccacacgtccgttgtcagtttttgcggtaaagactaaaaattgctgcctgttaaacgcatcaacagtaagcaaatttagtgttaaccaccctgattgccctttcagctgctcagccaccgagactttcgttgtgtggttactgtaa

SEQ ID NO: 35397 - DNA, 600 bp, Escherichia coli
atgcgtaaattatgtgcagccattttgtccgcagccatctgtctgtccgtatccggtgcgcctgcatgggcgtctgaacatcagtccacactgagcgcggggtatcttcatgcccgtacgaacgctcccggcagcgataatctgaacgggattaacgtgaaataccgttatgagtttacggacacgctggggctgattacgtccttcagttatgccaatgctgaggatgagcaaaaaacgcactacaacgatacccgctggcatgaagattccgtgcgtaaccgctggttcagcgtgatggcggggccgtctgtacgcgtgaatgaatggttcagcgcgtatgcgatggtgggtgtggcttacagccgtgtgtcgactttctccggggattatctccgcgtaactgacaacaaggggaaaacgcacgatgtgctgaccggaagtgatgacggtcgccacagcaacacgtctctggcgtggggggctggcgtgcagtttaacccgaccgaatccgtgaccattgaccttgcttatgaaggttccggtagtggcgactggcgaacggatgcatttattgttggtatcggataccgtttctga

SEQ ID NO: 35398 - DNA, 321 bp, Escherichia coli
atgggatttccatcgccagccatggattaccaggagcagcgcatgacgatagatgttatctgcggtgtagataacaactgccgggttattgaaacttcatgcggcttggccgttattaacgtcagtctgaagccagaaggaggggatacgttgctggttagcatggacgggagaaaccagttcgtgaagctaatgggccacgcgctgatcactcaagatggtgaagcgatagaaggggaagctctgaatgacgtaacggtacacggcgttcttacacatacacttaaccaagttaaagacgataaatcgcctgtaatttag

SEQ ID NO: 35399 - DNA, 240 bp, Escherichia coli
atgcctcgtcaaccggatattcgtgctgcttttattgcggccatacagcaaaacccgaagggctatctctgcctgcatacagacaaattcatcgctgaactgcaggagaggcactggcatttcagccaggcggatgcaaatacatggattgagcgataccagccggacttcgccgataagacgacaaacggaagcgagaaccggtactggatcctgcgtaacatggggagggttttctaa

SEQ ID NO: 35400 - DNA, 792 bp, Escherichia coli
atgctccgaatcgggcaagtcgaagccactgcaacgcaggatggcaaatatactgatggaagtgttgctggtggtattgccgcaacgaggctgcgggcagcagcgtttaacgccatgcaggaagagttagcgcatatcgtagagtcagcaggtttgacgctcgacattaacgatatgactcaggttttaaaggccattcaaaaactgacactgagccgtacaaacccatttgccgatatcaaatcagatggtgcagcggcgatctctacggctctcacaaaccttggtttaggagaaggttcggcattacccgttggtgtgcctgttccgtggccttccgccactccgccaacaggctggctgaaatgcaacggtgcggctttttctgccgaagaattcccgaaactggcgaaggcctacccgacgttaaatttacctgatttgcgtggtgaatttattcgtggctgggatgattcgagagggattgatacggggcgttcattgctaagtagtcaggctgcaacttttattcgtacagcgttacaggattattacggggttgatttaacaacctctgtcaaggtggggatagcatttgcttccgccgataaagtacaaacaagcgggatacctgctgattctaaagctggggacaatagtaactatgttctaccttcggctgataactcaattacgggaacacaaagaatagcagaagataatttttatagcgcatggatatctatgcgaccacgtaatatatcatttaattatattgtgagagctgcataa

SEQ ID NO: 35401 - DNA, 594 bp, Escherichia coli
atgagcctcttttcaaaaaatgattatgccggtgcgcttggtgcgctgctaccgacgggcagggcatggccccggtcgcaaagaacggtacaggctgcggtattacgggcactgggtagctcgtttcagcgttctgacagcgatgcgcaaagcctgattactggcgcttttccgcctacagcgacggtaatgttgccagaatgggaaagctctctggggctgccagatgattgcgcgattggtgagtccggtggcgtcagcgatcgccagcgcgccgtggtagcaaagttaatcagcaccggcggtctgaaccgcgattactacatccgggtggccgcagctcttggttataccatcactatcacacagttccgccccgctatgagtggcatgtcagtatgcggtgatgcgcttaacggtgacgagtggccatttacctggcggataaatgcgccacaaacaacaatcaagtattcgcttgctggcgcgtcctactgcggcgatccgctcgcatcgtggggcaataaacaactggagtgttcaatcaacaaaattgccccatcccatctgaacatcattttcaattattcataa

SEQ ID NO: 35402 - DNA, 1143 bp, Escherichia coli
atgccgtttaaacgaccgacgctgagcgaactccgcgacggaaaccggaaatttatgcaggcggagcttgaggatgttggtgcgctcctgcggttcgcgaacctgaaggtactggctgacatggatgcggggatggggcatttgcattacgcctaccttgactatattgccctgcagacaaacccgtttacctctaccgatgagtatctcgccgggtggatggcccttaagcaggtattcagaaaaccagcagcagcggcgaagtcgcctgcggtacaggctagtggcagtgctgacagtattatccctgttggctcgatcattaaccgcggggacggataccagtatcggacggatgcagatcttaaaattcaggcagatggatttggtatcgtcgcggtgacggccatcctgccggatattaccagtgatgtaacgggtggaggcgcgcgcggtaacgctgatgccgggaccataatgaccctggacgcgaatattgctggcgtggatccacaggtaacgttactgtccgcggcgaccggcggagccgatattgaaacggaagaggactttcgcagtcgtggcttgctggcatggcagaatccgcctcagggtggaagcgacgccgattataaaaaatgggcgcttgaggtttcgggcgtcacccgcgcgtgggtaaagcggcgtctgaacggggccgggaccgttggcgtgtatatcatgtgtgatcggaatgacaatggtgggtttccggtcggtaccgatggaatatcccaacttgaggactggggggctgttaaagccaccggagaccagctcgctgtcgccgaccacatctatccgcagcagacagacactgccattgttttcgtatgttccccgatcaagaaagtcatcaatattgaaatctctggtatcaaaaatgccgacagcaccacagttcagggtataaaagacgcgctgacggcgctgttttttgatgaggctaaccctgatggttccgggaaagtttacctctctgatattaacgggagtatcggcggtgttagtggcacgacgggctatatccttaactctccgatggccaatatcacctttgctgttggcgaaattccggtgcttggcggggtgaattttgtatga

SEQ ID NO: 35403 - DNA, 438 bp, Escherichia coli
atgagtgacatcgcttcattctggaatgtggatgagatgtttgctgactggcagaaagggctgggcgaactcaccacggggaacgatttacagactgcaatactggacagcctgtttactgacaggctggcgcgcgctgacgatgattatgaggatagcgatcgccgcggctggtggggggattccggggaggaatcccaactgggatcccggctgtggctgctacggcggaaaaaactgaccccggatgtagcaaaaaaagcggaggaatactcgagtgaagcgctcaactggttaaaggttgatggcgttgtcagcgaggttattcctgttgccaggatcgtcctgcctgaccggctcaatctcattatccgctatcaggcaccggggaaggactggcaggaattcaggttttactggatatgggagcaacgttaa

SEQ ID NO: 35404 - DNA, 543 bp, Escherichia coli
atgctggggattggccggatcacggctatgaaagatggtggggtggtgcagtcaatccagtaccagactccgctggaggtggccagcgcaccgcggatggctgaatttggtttttcatccggcctgccgtcagggactgacgtggttctggcttttattggcggtgatcgttccagcgcggtggtaattgcgtccaaccatcaggggtttcgtcatacaggcctgaaagcgggcgaaacggtcatgtataaccagtggggtcttaatattctcctgacggagaaggggatcttcctggatgcaaagggccagaatgttgaggtcaataacgccactaacgtgaccatcaatgccagccaggggattcttgcaaataccccgatcctgaggtgcacgggtgacattgttgataactgtgaaaccaatacccgaacactgaaagagctgcgggatgcacataatgaccatgatcatgtggttaaaaatgcccagagtggcaatgacaatatccgcagccaaaaaacagaggatcaggtgacatga

SEQ ID NO: 35405 - DNA, 1086 bp, Escherichia coli
atgaatgcagacagcgatctggatgttgtttctctgacggtcgacggcaaaatcattgagggctgggattctgtccgggtaacgcgggggattgagcgttttccctctgatttcgatcttgggctgatggattacttccctggcaacgaagatcgtcagctcgttgaagagggcatgtcctgtgaagttcgtatcggagatgatctgacgctgacgggatatgtggatgactgggagcccgcactatcgcgttcccgccatgaggtccgcgccacgggcaggagcaaatgtcaggacctggtggattgctcagccgagtggcctaacaacgtcattaatgccagtaatgcgcttgaaattgcttctcgcctggcatcctactacggcatcaccgtaaccacggatgttgatgaacttgtgaaggttccccagttcactctgaactggggtgagtctccgcaagaagtcatcgatcgggtggccagatggtctgctctgctttactacgatcagcccgatggaaacctgttactgacccgggtgggaacacgccgtgcagcgagcggaatagccgaaggggtaaatgtcgaacaggcgtactaccgcaaatcgatggccgacaggttttcagactatgtcggtgtatcaatgagcgtttctccaattgcagggtattcgcctgatacggcctatgacgctgtgactctggcaacggcgagagatccggaggccgcccgcatgcggtaccgaaaacatatatcgattgtggaaagtaccctgatggctactcaacaggcacaaagtgcgatcgactgggaaatgaaccggcggtacgggcgttcaaaacagctctcggtaaccatcgattcctggagggataaagacgggaaactgtgggaaccaaacacattgatccccgttgatcttcccaccttacggttgccgaagactgaattgctactggcagaagtcacctatatgcgcgatgactacggcacccatgcacgcatgacgctgatgccgcctgaagcattcgccgttcagccatatgccttctaccagaacctggcgggattcaatacatga

SEQ ID NO: 35406 - DNA, 1404 bp, Escherichia coli
atgccgtcaattatccaggacgcaataacttctcttttggggggagataccagcgatgactggcaggggcagttacggcccagctcattcagaggtgtgccatttgcaattgttgctgaggaagggagccacggccgacgccaggcggtacatgaatatccctaccgtgatacagcctggatagaggatatcgggcgggcaacacggcgatttgttattcgcggtttcttgatccagaacagccaggtttacggcggcggcgatgctatcacgcagcgccagtcactgattgaagcctgtgaacaaaaaggtagcggtacgcttgtccatccgacactgggcgaattaacggtttccatccctgagaatggtttgcgtatttccggttcgatggagaacgggcgagtatttgaatttaccctgatggcaattgaatcagggcttaaagtgtttgctgtcacgggcagtaccgttgcaggcgccacggtgaaaaccaactatctgaaactggtcagcactgctgtgctgagcacgattgccagagttaagagtgaaatccgcggtgtcacacaggctataaacaccatcagaggcacggtcacgttctggactaacatggttgacagcaccatcagtcaggtcacgaatctcagcaatgtcctgaactccacgttcgggaatacccggtacggacgttacagtaaaggctctgtgggcggtagttcctctgctgttgctggcaaatcgtcagttgctgatgtggatgatgagagagcactggctgacaaggtaacagcccagtcggtaatggaccggaaaaatgttaccgacaggtcgagccagcttagcagctccaacacacctgatgagtttgtccagggcgtcgccgacgtggtaaacgcaattcttaacagcgccggcagcgttaatgaccgaatcacagcgctggaaaaactggctaattcaatcagcacggagtaccagcagtccgacagcagcaaagcgatttcggcgaccatgaacacgctgattgttgtgctatgtactggtgccatgaccagtgccgctgcggactccagaccagccagtacagacgaggcagaagagttaactcaacgagtttctgtgcaacttgatacggcgctggttctggctggagaccgcgcagacgatgatatgtataacgcgcttctcgccgtcagatcggcattcctttctacgatgagtgagcgtgcttctggtctgagcgagcttctgcaggttactaccgctcagccgcttccggcgctgacgctggcaaaccgattataccaggatgccacccgtgcagatgaactggtacaggaagcgcgcgtaccccatccggcgtttatgccgacaaccatgaaggtactgaggcaatga

SEQ ID NO: 35407 - DNA, 1929 bp, Escherichia coli
atgagtaattcttttgattttgagctggtggccagcgaccaggttagcgaggctatagaccgcattaatgaggctgtccgtgacctggagccgaagctagataaaactaaagaagggctcaagttaggcggtcaggaaacagccgacggactgagcggttttatttctcgcctcgagaatatgtcgaagagcgcgcgggataacgtgcagtttattggcgacatggttcccccactgaaaatggtgggggagctcacggggaagatgggggcgctggggttagccggtgctgccggctacggactgaaacaggtcgcttatggatttcgggaggcatcccgtcaggcctataatcttgatgtctcggcaaaaaatgcgggaatgcgcgttgacgattttacccgactttccggggcaatgcgtattcttggggcagacagcgagagcgctaatgcatcaatagaaggtattttcaaagcattcaatgaggctgccagtggtaaaaacgagggggttatggcagcgatggcgcaaattggtgctcaaatccaaaaaaacagcgatggttcagtaaatacccttaaaacactggagtctatcgcaaaaatttttccaaccttgcgacctgaacagcagaagtccgccgctgatgcacttgggctgacgcccgaattgctggcgctaatgcgtgacggtgagcgcatgaaaaagctgctggcgaaatcggatgaatttggtctgactgtggatccggcactaaatcagcaattgagtgaagtgaacggcactatgaatgagctcagcgcatcctgggatggtctgtggcaacgttcaaaaaacaaggcacttaagaccattctttcggatggttcagtcaaagacggccttgaaggtgttaccgatctgttcactaatggtgattttactgggctgtctcatgctctcggttttatcaacagcaatgatgctgagaaactacggcgcattcagaacgataaggaactttataacagcttaccccgcagtgaacgtgggcaggttgacgcgggtttcatgactgatgctgtaagaaagcggtacgatgcgaattaccgcgcgaccgattctgcgattcaattgcagaatgacttatccgctatcagccagccacaatccaacgttgcacgcggcaatgttccttacggggaaacaaggaataacgcaattggcttcagaaataataatcccggtaatttgagggttgcagcaaacgcaacgggtaaaaatggcggattttctacctttgcgaatgatgccgacggaagaactgcaatggcgagacagctgatgttgtatggtgacagggggaataatactctggatgggattattcatacctatgctccgcaatcagagaataatactcgtgcatatattgactccgtctcaaaagccactggatatggagccaaagagcaagtaaatctgcacgatccggaaacattaaaaacgataatggcagccatgattaaacatgagaatggcgcacaaccttatactgaggaacaactgctaaacgccatccagaccgccattactgatgatcggtggtcagggaagagaaatccggatgtgctggcccagcagcggtatgacattatctcaggttcgcaaactggaaatcgtgactccagcactcttagtaacccgagtgatgaaactgatattctctcaggctcgcagaacagaaatcgggaatccatcattctgagtgatacgggtaagaaaagtgatgaaagtgtactcggcgacaatctggctaagtctcttaaagaggcaatgtcagaacaaccacttaagctcgaaatcacaatggttaatgataagggtgagcgaaaaacctataatgcggaaaataatggcagaataacaacggccatgaattactga

SEQ ID NO: 35408 - DNA, 279 bp, Escherichia coli
atggctgagattgaacgcgttaaaaccattccattaaccgtagcgctggatgatgctgcggagaagaccacttatacgcagctggagctgaaagcacccacgctaagccaggctgagcagttttacgagaaacaggctgcgtcaacgtcgctcgcggcgatgcgcctgcttattgcgctggtttccggtacgcgtgaaagcgtactgcagccgatggattttctcgacttccgtaagtgtgaggagtatctgctcagttttttgacctggaagccctga

SEQ ID NO: 35409 - DNA, 372 bp, Escherichia coli
atggcaggtgatactactaaccgcctggcgggaaccgcctatgtcactgttaacggtgtgacggtaatggtggagggctcgtttaaataccaggctgccaccgtaaaccgtaccaccctgacagggatggatggtgtgcacggatataaggaaaaacctgtggcgccatacatttctgcccgactgcgtgacagtggcggaacgaatgtgcagggctttaaccagcagacgaacgtcaacgtgatcgccgagctggctaacgggaaaactatcattggccgttcactctggacggtcaacgtccaggaagtggaaagcgaagatgcagtatttgatgttcgctgggaaggccgcgacgtaacggagaactaa

SEQ ID NO: 35410 - DNA, 1503 bp, Escherichia coli
atgaccgtacctttcgctcgtgttcccgataacctgcgggtagggcttttcttcgttgagtttgataactcaatggcgaataacgccactgccacgcagcgcaccctgcttatcggtgggatgctcagtaccggctcaaccccccctggtattccgcagcgagtttcctcttcggataccgtcggtgagctgacaggaaaagggggaattctgcaggccatgatggcggcgtatcagaaaaatgataccgcagccgaagtctggatcctgccgctggaggaagactccgattccatggtggctgcaaccggcaccattaaagtgagcagcgcaccgacggcaaccggagtgatctccctttatattgctggtgagcgcattcagttgaccgttgtagcaacagatacggtggcagcgatcgccacctctctggccgcggcgattaacgcaaaaaccacgctacctgtaaccgcaagtgcgactacggataccgtaaccctgaccgcgaagaatcttggtgctacgggtaatgggatcgacattcgcctgaacttcctcggcttacctggaggcgagtccacacctgcaggcctggaactgacgattactgctatgtctaacggagtcggggctccggatattaccggcgagctggcaaacctgcaggatcggacattcgatttcatcatcaacccttacgacgatacaacctcgttgaatgtgatgaaggagttcctgtcagacactggcggtcgctgggcatgggacaagcagctttatggccattcctttggtaccaccaccgggacttacgcccagctcggtaccaaaggtgagctgcgcaataaccagcatgagaccctgctgggcgtaaataaatcgccgtccccttcctgggcatggtctgcagcttacaccggcgcagctgcggtgagtctgcgtaatgaccccggccgcccgctacagtcgctcgctgttcagggggtgcttgcgccagaactgcaggatcgctttgagctgaccgagcgtaacaatctgctgtacagcggcatttcgacatttacggtcgatgacgatggcacggtgcgcattgaaaacctgatcaccacctaccagaaaaacagctatggcgatgcagatgacagttatctggaagtggagacgctgttcagcctgatgtttgtgacccgctacctgcgcacagcggtgaccagcaagtttggccgtatgaagcttgctgcggatggaacccgatttgcacctggcgcggcgatcgtcacgccaaacattatcaaggccgatcagattgccgagtaccagactctggtatggaacggttatgcgcaggatgcggaggcattcgcaaaaaatatcatcgtcgagcagaacgccaaaaatccgaaccgcgtcgatgtgctgtggccgggaaccctcatgaaccagttgcgcattttcgcgctgctcaatcagttccgcactcgggctgaatcaacaggagcttaa

SEQ ID NO: 35411 - DNA, 198 bp, Escherichia coli
atgtttgttaagccgaacaacgggctcagcgttcgctgccccgtcaagggcatcccattgcctaaagagggtgctgaagtacctgacaatattttctggcgtcgccgtctgagcgatggggacgtgatcctctctaaaaaggatgagggcgcgccagagaaacaatcattacctaaaaaagcgggagaaaatgaatga

SEQ ID NO: 35412 - DNA, 546 bp, Escherichia coli
atgaattcagcagcgatacggcaaatggttgtcactgcactaaccgggacaaccagcgcgggcgaccgcgtattctctccacgcgactggtcaacttcaccagatatgtatcctgtgttgttggttcagacgccttttgaacagaaaaaatcacaggggcgtaatacccctgcttttaccaccctcaccactgtcaggatcactgggcgcgttcaggagtatgacggcgatacagtggatgatggagccatgcgggcagagctggcgcttgaaagccttcgcgagcaggtggagcgcgcggtgatcaacagctacgaactgacgcggaatattcagaaatacgcggaagttcgttcaaccatcaatgttgattcagaaggagaggcccatatggggcagcttcttttcgagatcgacatagagcattaccaggggccggaagatttttatcctgtccagtcggttccccttgagggcatggatattgcggtcgatatgccagacggcacagttaaaccgggtatcagcctcaatcttcaggagtaa

SEQ ID NO: 35413 - DNA, 360 bp, Escherichia coli
atgggcgtggactgggattctcatcttctgagtccgctgcatgatgtctttggcgatgagcacgagtaccgtccacgtaacggtactccttttacaattaacgggatttttgaccgtggttatgcgcaggttgctgaaaaccttgatggcgattcagaaattaacacctccagcccgatgttgggtgtgcgcgatgctgaatttcgcaagctgggtaaatcgcaacctgctgtatctgaccgggtatttataaagacggtcggtggtcacatcatcaatcagttatttgttgtgtcaaacgtcgaacccgacagtcatggcggatctcgtcttgtcctcaatgtggtaaaaccgcgatga

SEQ ID NO: 35414 - DNA, 411 bp, Escherichia coli
atgcatccctctgcgcaacggtggtctgatatggcaaaacaacctaataccgggctggctgatgatctgaatgcagaaggatctgccaaagacggcctgagcgttgacaacctgaatgctggcgataacacccaggaaaaacagcctttgagcaaaacagatgatgccgaattgtctgttgatgacgatggtggtgacgaaaaatccggagacactgaatcgcaggagtatgtggtgttgaaagggaattgcattcgtcatgacggggagatgtaccgcgaaaatatgcgcatccctgtaaccggcaaagatgctgagcgtcttctgcagtccggcgttattgctgatgttgatgtgcttcgtaagcgagttcttgcttctcagccatcagtttcagttacgacagggtaa

SEQ ID NO: 35415 - DNA, 1050 bp, Escherichia coli
atggaaaatatttttgataccagcgtgctggtgcaggttgttcctaacctgaaaaccagtcagaactggctgctcgatcgcttcttcccgaatgtcgtgacttacgagactgaagaagtggcgattgatgttgatgtcggcctgcgtcgtatggcgccgttcgtctccccgctggtggaaggtaagctggtcgaatcccgtaaataccagaccaataccttcaaaccggcatacatcaaagataagcgcgctccggacctgcgcaaacctatccgccgccagattggtgagcgtattggcggggaatataccgctgccgagcgcgaaatgctgaaccttcagtttgaaatgactgaccagattgacatgatcaaccgtcgtctggaatggatggcggcgagtgcgctggtgtctgggaccgtaaccgtcgccggggagggctatgaaactaaggtggtggatttcgggcgtgcttcggatctgaccatcactcttagcggctcggataaatggccactgaccgttgcagctggcgctaccaatacccagccatcagatgacattgaaatctggcagactactttcctgaaagagtccggctctgtcgccacggatctggtctttacgaataagtcatggcgtgcattccgactggataccaccatcaaggataacgccattacattcccggcgctgagcccgtttggtaaccagattaacgccggcccacaggtaatgaagggcgcaatttataaagggcgctggggtaactttgacctctggttatataacgactggtttattgacccgctggacaacgtcgagaagcctatgatccccgatggcgctgtcattatgagtggtgccgatctgatgggtacccgcgcctttggcgttatcctggacccggctttcaactacggtccgctggcttatgcgccaaaatcctgggtgaaagaagatccagcccagcgtcttatcctgatgcaatcctccccgctggttattccgagccgggtaaatgcatccctctgcgcaacggtggtctga

SEQ ID NO: 35416 - DNA, 405 bp, Escherichia coli
atggatcagtttggtcagaatgcgtttgcgcctggcatgaagagcgcgctgtttgttccggatcagcttgtcgctggcacgctccagctggtgactgacaccgggatcattacgggcggtgcctttaagcgtggtactgtcctgggcctggtggctgccagcgggaaatacacgcaatgtgtgaaaacggctgaagatggcagtcagttacccgttgctattctggttgatgatgttgatgcatcgtcttccgatcagaacggcggcctgtatctgatgggggaattcaaccagcaccgaattatttttgataactcctggacgaccgctgacctgaaaaaagcgctccgaccgctggctatcttcctgaaagacagtgaccaggcacctgtaaccacctcctga

SEQ ID NO: 35417 - DNA, 591 bp, Escherichia coli
atggcaaagaaaaagacgtttagttttgctcacctcattggtcttggcccttccgcttctgaggaagaagaggataaaaaagccaaaaaagcgaaagcccgtcgcgcggaagaggatgagcgcgaagatgatgccgatgatgatgagcgcgacgacgacgcggaagaagacgaacgcgacgatgatgctgaagatgactgcgatgatccggatgcgtcagaagatgatgattctgaagacgacggcgacgacgatcgcaaagagagtaaggcggtaaaaaatgcacgcgctgctgagcgtaaacgctgcgcccgtattttcggcagtaagcatgcagctgcgaatccttcactggccgcgtcactggctttcaataccgggatgagttctgcggcagcaattaatgtcctagcctcttcggctccggccgcagccgcatctcagccatcccgtaaacgctctctcgatcagcgtatgcaggaaagccaccaggtccggcttaatccggatagcggacagaaagagaccggaaagtctgcgctggtaagtaaaatgaccggcctctacaactccacaagaggagagaaataa

SEQ ID NO: 35418 - DNA, 867 bp, Escherichia coli
gtgaatctaccccatctggcccagcgattatttaacaccccgctggcgctgcacccgagtaaagccgaagtcatcatggcatccgtaatggaccgatttggtatcagtaaaatcgaatcttctcttgccatggaggatgactggtacggatatgacgataaccggggacgtgaatcccgtagtgatccgggttatgacaatgtgctgggtgtcgccgtcatcccgatatgcggaacgctggtgcaaaaactgggcagtctgcgtccgtacagtggaatgacagggtatgacggcattcgtcaggcgtttcttactgcgatggaagatcccgacatttcgggcatttgcctggatatcgactcacccggcggcgaggtcgctggatgcttcgatctggttgatgtcatttacggctcccgggggaaaaagcctatccatgccattctgacggaaagcgcttattccgctgcgtatgccattgccagtgcagcggaccggatttctgttccgcgcaccggcggagtgggttctgtgggtgtgatcaccatgcaccttgactggacgcagcggattaaagatgacggtcttaaagttacgatcatcacctatggatcccgcaaggctgaaggttcgccgctgagagagttgtcagatgaagcgctggccgccatccagcaggacattaacaccatgggcgaattgtttgtgaacactgttgccagaaaccgggggattagcgcaaaggttataaaaagtacccaggccgcctgttttatggctgctgatggcgttgaaattggactggctgatgaggtgtgtcctcctgacgctgcgttcaaaaacttacttgaaaaaacaggagcctga

SEQ ID NO: 35419 - DNA, 1638 bp, Escherichia coli
atgaataaagtacagatactgggctctgatgggcagccgttgcgacagcagcgtccctctatgctggtgggggggagccgcgtaccttatgacgcagctgactctttcagcgatcaactggcgaactggcaacccgcgctgtggtccccggacaatgaaattaacatttaccgggatcgcatcgtgtcccgcgcacgcgatctggtccgtaatgacggctgggcaaacggtgcggtcacacgtctgctggataatgcggttggtgccaacttccgccccatcatgaaacccgattaccgtgttctcagaatgatcaccggaaacaaggcgtttgatgcgtcctgggcggaagagtacggaaaagcactggacgggcactggcggacctggagtaacgatcctggccggtattgtgatgttgaacgaaaactcaccgtgtcgcagatgttgcgcctgggatttcgtcacaagcttattgacggggatgctctggccattctccagtacagaactgacaggcttggtcccggaagagggcgttacgccaccacggtacagattgtcgatcctgaccgcctcagtaatcctcagcagaatttcgatatgccaaatgtccgtggtggcgttgaaattgatgcggacggtgcgccggttgcttaccacatcagggaggcccatatcggtgactggtggagcggggctaaaaccatgacgtggcagcgtatcccgcgtgaaactgactggggccgcccgcatgtggttcacgattttgatcatgagcgtggcgcgcagcaccgcggtaacggcatcctgactccggttattcagcgtctgaaaatgctggtgaagtatgaccagagtgagcttgaggcagcaattcttaatgccatattcgccgcttacattgagtcaccctatgaccctgcgatggttcagtctgccctgggcgagacctatgacgagtcggagttaggcacttatcaggacgggcgtgttgagttccataacgatcggcgtctgacacttcagaatggtgcccgaatgcccattctttatcctggtgagaaaatcacgacggttaacgcggcgcggccctacagcaattttgaagtcttcgaatctgctgttctccgtaatttttcttcaggaacagggttgtccccacagcaggtcacccaggactggtctgacgttaactacagttctgcacgctcctcgttgctggaggcatggaaaacactgactcgccgccgggacgatttttctaccggcttcgctcagcccattctcaccgcctttgttgaagaagttcacgacaatgaggatttacccctgcccgcaggcgcacctgattttgttgacgccagagccgcgtattctcgcgcgcgctggatggggccagggcgcggctgggtggatccggttgcagagaaaaaaggcgccattcttggtctggatgccggactttccaccctcgagattgaggtgggtgaaaacgtcggtgaagactgggaagaagtgcttgatcagcgccagagagaaattgagtcatgtcttaaacgcggattaccgcttccgagctgggcacaggctgaccagtttgcgagccagaccattaccgatccggaggaaaagtga

SEQ ID NO: 35420 - DNA, 264 bp, Escherichia coli
atgttcaaccggaacaccagcctgcttgccggcgcaatgactgacgatcagctcagggatgcgcttgcgaaagctcagcaggcgtacattgatttagcaaccgggagccacggtgtttcgttttcctatacgcagggagacgggacgcgatcagtgtcctatcagcaaagcaccctggctgatctgctggccctgattcaacttctgcaggcgcaactggggattatctctcgtccccggaaaccagcgaggtttagattctga

SEQ ID NO: 35421 - DNA, 2124 bp, Escherichia coli
atgtccacaaacacatctcagtcctcggagagccagagtttaacccggcagaagattgagcgtcttgaattaagcgtccgcaaaggctggacacccccgccgcgtatcagtgtgccgcagtgggcagatgactatcgtaagctggcaaaagaggctgggagcacttcgggaaactgggaaacatcgacggtagaaattgcccgcggaccgatgcttgccgcgacggagtccggggttcatatcatcactgtaatgtgctgtacccagttgatgaagacagcactgctggaaaacctttttggctattttgcccacctcgatccttgtccgatactgctgctgcagccgaaagaagaagccgctgaacagttttcgaaagagcgtattagcccgctggtaagggtgacgccggtactgcgtaaaatcatcggtgattcgaaacagaaaagctcgaaagaaaccattctttacaaggcattcactggcggatttctggcgctggcgggtgctggtagccctgataaccttgcgcgtcgtccgattcgtgtcctgctggcggatgaagtggacaagtacccgataacccgcgaaggcgatccaattgcgctggccgaagagcgtacagcgacatttggcctgacctggctgtctgtacgcgcctgttcgccgacggtggaggatgagagccgcattgctgacagctacgccgactccgatcagcgccgggcatctgtggtttgcccgcactgtggccaccgccagttccccgactttttcaaacacgttcagtggccgaaagagggagataaacacctgactaaatcggcgatgctctattgcgaatgctgtggtagtggctggtccgaaggacagcgcctcagagctctgcacactattcgatggcatcagacgcgcccatttgagtgctgcggggagcggcactcaccgctgatggattatgaccttgcctggcgggcggcagacgagggcagcgttgaaaaggtctggcaatggtcagagtcggaacggcatgcggtctatcgcgcaatctgcccctcctgtggaaaggaggcagtcgataaccaccacgcggggtaccaggcatccaagcttttcagcccctggcaaaaagataagccgtcggatattgcgaaaaaatatatcgatgcgaagggcgatccggataaggaacaggcgtggtggaatacccagatggggcttccgcaccgacctaatcatgggaaacagctccctgttgatgttctgctggcgcgccgggaaatatttccggccgtcgttccggacggggtggcattgttaacagctggagttgatacccaggacgatcgcttcgaaattacgatcaccggctgggggagagatgaagaatcgtggtcggtcgcgcatgacgttatttatggtgaccttgagacggaagaaccctggaagcgactggatgcatacctgaaacagatctggcgacgtggtgacgggcgcggcctgaatatcatggcaacgtgcatggactccggcggccaccatacgcagaaggtatacgaattcgccaaagagcgtcttggccgtcgtgtctgggcaattaagggggagtctgcacagggaggcaaacgcaatcctgtctggccgaccaaacgaccatcatcgaaaagcaaagccagtttccgccctgtcattctgggggttaactcagcgaaagacgtgatacgcggtcgcctgcatcttgagccacccaaacctggcgccgccgctgcgggttatatgcattttcctgacgatcgcgatctcgggtacttcaatcagctgctggcggagcgactggtttacaaagtcatttccgggcagcggtacagtatctgggaagcaataccaggacgagctaacgaagcgcttgactgcctcgtttacagctatgccgcgctgtgcggtctcaaacatatggggttaaaactcaacgtccgggccgccaacctcgaagccgatccggataagttcctgccagcgccagttggacaggaagaaaaaatcaattacgagctgccgggtgcggttattgaagaaccagcgccggtcaaacgtaagcgaatatcgcaactcctgccgaaataa

SEQ ID NO: 35422 - DNA, 570 bp, Escherichia coli
atgaccacgatgaaccagagtcagtacgcacaacattcaggtgtggatcgcaaaacaattggccggtggattaaagccgggcgcttcattgtgatggacggagacctgattgacgtagaggccagcgatgcggcattgaagaaaaaccgcgatggcaaagacccgcgtgcctcgaacgcgaagaaaaagaaaactcccgtcgttagcgataacgatgatgacggtgatgaaatcaataaaactgtccgccagataatgctcactgaaggggcagatctttcgagagaggaagcgggacgtatccgcgagaattacatggccctacaggcaaagctgcagtatgaaaaagacagcggccagcttattgagctgacagcagccgaggaggttttattcaacgcctttcgccaacagcgtgatgcctggcttaactggccgtccagggtggcgccgctaatggctgctgatctggatgtaccggcggacaggatgacagaggtgctgattgaacatgtccacaaacacatctcagtcctcggagagccagagtttaacccggcagaagattga

SEQ ID NO: 35423 - DNA, 210 bp, Escherichia coli
atgatcgccagaggtgggacatgggacacaaatctgaaagttgtagctaggaaaacaccgcggcgcgcaatgcccgtgccttacaaaaggctcaggaaggacccaaaacccctggggggctatctggccgagctaatcgcctcagcaatcgcctggtgcagcgctgagggtaataatgcgttggccatggtgtttgctctgtccatatag

SEQ ID NO: 35424 - DNA, 642 bp, Escherichia coli
atggcgacgcttaaagacctttccagtcagttaaggcagttgcagaagcagataccgtttgcgactgcccaggcgatgactaaagttgttcgccagattgagtcagcccaaagaacagcatttgagcggcatctggataatccaacaccttttacagttaaatcggtagggtcggttggtgccagaaaaaacaaccttcgtgcaaaggtgtttgttcgtgatactgctgctggttaccttgaacccttcgagttcggcggagagcacaagcttaatggtagtgctttgcttaacccgaaagacataaagctcaataaatacggcaatctaccgcgtaataagctctctcagcttaaagcaaagccaaacgtatttattggtgacgttggcggcgtgaatgccgtgtggcagcgaaaaaagcccaaaaccaaaaaagcgaagaagcgggcaaagcgttctccgaacggcacgcgcagggataagattaagcaacctgcaccaaaattgctcattcggtttggtgacgctcttccggttaaaccaacgctcggctatatggacagagcaaacaccatggccaacgcattattaccctcagcgctgcaccaggcgattgctgaggcgattagctcggccagatag

SEQ ID NO: 35425 - DNA, 552 bp, Escherichia coli
atgagctactcacaagcagaaaagttacaaatccttatgatgtgcgatatttatgaaaagttaggtattgagaacagctataaccctgaaataattcgaacagcaatcgatactggaaactactgggccatcgagtgggcttatcaagatttgtcaacgggtgcaccaaccccacctgaagttactttcgtatgtgatgtcctagatatgttcggcttattacaatatacatacgaaaatttgactgacattcaaaaagaaaaattactaaaagatgttagcaatttcaattacaagcacgatgtgattttcagtggattcgactggaacaatgaaagtgagtacgcaagtattacaagaatgttcaaattacttgaccgttttagtactcaaaacattgtaaaaaactctcattccccacgcatagcaatttatcagcgtatgcttaatgagttcttaccaatcagaaaagattttattcatgacgtaggaatcccatatgatggcttttgcgcaattctaaacgctcgagttcatccttccaatcgctga

SEQ ID NO: 35426 - DNA, 516 bp, Escherichia coli
gtgaaatttaatctcttcgcggtcctggttgtagtcattgcaggtctgtcagtcgccctcgtcaaaagttgctcaaacgccagtagcctacagagcgataacgacgttcttcgaaatgacaatgccttgcaggggcaggtgatcgctactcaggctttcaacttcaatcgatttaatcaggttgcagaacatgccaacaggcttaactccctgatcgacatcagcactgaagaaactgtaaccgaataccgggagatactccgccgtgaaaaaacttgtgatctgcctgttcctgctgatatcgctggcgggttgctcgaatacgcgcaccgtttacgtaccagcgccatgcacaccgataccaacagacctgactcagccgatgatcgtgccgctgccgccagcccaatgacgtattgccaagctgttttgtggattaagccgctgctgggagtgattgagaagggcaataataatttcgcgggtatacgtcaaatcgagcaggatagaaaatga

SEQ ID NO: 35427 - DNA, 537 bp, Escherichia coli
atgggatccagagcaaaattaagcgctgctgttctggggctggtacttgctggtgcgccagcatccgtcattctcgatcagtttctgaatgagaaagagggaaacagccttacagcgtacaaagatggcagcggcatctggacgatttgccggggagctaccacggttgacggcaagcctgttaccccaggtatgaggctatcgccagagaaatgtaatcaggtgaacgccagcgagctgaacaaggcgctggcttgggtcgaccgcaatatccaggtaccactgaccgaacctcagaaagcggggattgcctcattctgcccgtacaacattggtcctggtaaatgctttccttcgaccttttataaacgcatcaacgccggtgatcgtaaaggggcgtgtgaagcaatccgctggtggatcaaagatggtggccgtgattgtcgattaaccaaaggccagaagaacggctgctatggtcaggtcgagcgacgggaccaggaaagcgcgctggtgtgctgggggatagaacagtga

SEQ ID NO: 35428 - DNA, 303 bp, Escherichia coli
atgaaaatgaatgattcagggaacattttcacgcagttcttcgcgtgggtagcagctctggcgtcagccattggttttaccactcaggatatggtgttcatgttctttggcgccgctggtctgcttatctcgtttgcctcctatgtcaatggtcgcgtggatgcccaccgcaggcgtagagaggacgaaaagcgaacaaaaatggttaatgactacctgaaaggcgttggtgataaaccccttcacgaacgtcctgcggctgcaagcgtggtcgttgaggcattacaaaaggaaggtgagtga

SEQ ID NO: 35429 - DNA, 1053 bp, Escherichia coli
atgaaaaatactgtaattataaacagtgttgagttagtcaacgctgatagcctgcaatacatcgccactctccctgataactccattgacctgatagtcacggatccgccgtacttcaaagtgaaaccaaacggctgggacaaccaatggaaaggggatgatgattatcttcgatggcttgatatgtacctcgcacaattctggcgagtgcttaaacctgccggcagtctttatcttttctccggtcaccgcctgtcggcagacattgagatcatgatgcgtgagcggttcaacgtcctgaaccacatcatctgggctaaaccgtctggccgctggaatggctgtaataaagagagccttcgctcttacttccctgcaacagagcgcatcctgttcgctgagcattaccaggggccgtataaaccaaagagcgacgggtacgctgagaagggaagcgagctgaagcagcatgtaatgactcccctaatttcttatttccgggatgcacgtgaagcgcttggcatatcctcaaaacaaatagccgatgcgactggaaagaagaacatggtgtctcactggttcagcggtagccagtggcaattaccgaatgaatccgactaccggaaacttcaatcccttttcacgcaggtagccatcgaaaagcaccagaacggcgaactggcaacaccacaccaccagctggtggccctgtggcattcgttaaatcgcaagtattcagagctgctcgaagagtacaaatcgcttcggcggcatttctctgtttccgtatccgttccttataccgacgtctggacacataaacccgttcagttttacccaggtaaacacccatgcgaaaaacccgctgacatgttgcggcagatcatcaacgccagcagtaagcctggtgatgtggtggctgatttctttatggggtccggttcgaccgtgaaaatcgcgctggaacttggccgccaggctatcggcgttgaactcgaggaagacaggtttagccagacggtggaggaaataagggcgttaacaggggagtaa

SEQ ID NO: 35430 - DNA, 693 bp, Escherichia coli
atgaatttacaagaactcgaatatacccgtattgaattgcgccgcgcgctggccgatttctcaggatcgacgaagggacagctgcaggcgttcagtgagcatccaccagcagataaaaataagtatccccggcaccatccagaaatagtcatggagggtggggaatgttgtggagcgaaggttgtaaaaacgctggccactccgctttatgttctggagacaagaagccgtagacgcccattaccccctatgaaggatgccgagtttgcgagttctgcgtggcgccgctcggtgaatggacttggagagcatctgcaggcgtgggttcggtattgctatggatatgatctgtctttccggtaccagaccttaatgtgccagtacgtttgggcacagtttcagcatcagcaggggagtaagaagctccaggacagagtcacaaaaaaattagtggggctggtttggctcgcggcccaggaagttgctgcatcacgcaataacgatacgtaccaggagtatgcgggggcggcactggcccgcatggtgagcgtggagcgttcaacctggcttagggtatacgctgctcactgggcagcatttaaagcagctttcgtggaaatggacagcctggcgttatgtgaaagcctggcgcggtacgaagagtatgaggaagttaaagtggtagaaatgtga

SEQ ID NO: 35431 - DNA, 1062 bp, Escherichia coli
gtgagaggactgtttacagccgagactgttccgcgcctggggcttgtgttgttaaagccaggtagcgatctgatgtcactgttccagcaggggcgtgtgctggtggagcctcagccaaaaagtatggctgggcttccgtcggggctcgtccctgatgcgaggcagccgctggcagaagataagtccctcgaggaattcttctccgacgagagggttatccgcgccgcaggcggtttatccgcgttggactcatggttagagcgcaacgttaaggaatgccagtacccgcacgctgactatcaccaccgcgagctggtaacaatgcgccaccctccagggtcaatgctgctctgctggcattgcgataaccagctgcgcgagcagaccaccgcggcgctggcagaactggcccggcgaaatctcatcaactggctgatcaattcgatcctgtctgcgcttggctacaacaccgagcgcgaactatccctcggcgaattgtgctggtgggccgtttactcgggcattgctgatgcaatcacagaaaggatggcacaacgcgcactccgcatgccggatgagccttttttatccgtttatcgtgaaagtgacattgtgccgatgcccccggcaaaaagcattttgcagaagaaggtcacccctgcggccacggctgcgaaattaaagcatggagcaaatcaggaagtggtctacgaccagccaaagattctggctctgcatgcggatccagaatctcctgaatcattcatgttacgtccgaaacatcgtcggtgggtgaatgaggattatacccggtgggttaaaacccagccgtgtgaaggttgccggcggccagcggatgatccacaccatgtcattggtcacggtatgggcggtaccgccacaaaagcacatgatttgttcgtgttccctctgtgcagagagtgtcacgacaaactacatgccgatttagcagcgtttgagaaaaaacacggtactcagctggagctgctgttccggtttatgaatcgagcgttggcgatcggcgtaataacaaaagcgtaa

SEQ ID NO: 35432 - DNA, 693 bp, Escherichia coli
atgaatcagttaaccgcaaagggtgttgtgacaatgtccagccgtgaaattgccaggctggtacagagcaaacatggtgatgtgaagcgctcagctgagcgccttgcatctgctggtattttaaccgcgccgttggcgcacaccccctacacacacccgcaaaacgggcaaacctacgaggagtattggttcaacaaacgtgattctctggtgatcgtcgctaggctgtcgccagaatttaccgccgctgttgtcgatcgctggcaagagctggagaacagccaggccgtaagtgtcccgcaaacattgccggaggcattacgtctcgccgcggatctggccgagcagaaagaacaactcagccagcagttagccgctgccgcgccgaaagttgagtttgtcgatcggtactgtactgccaaaggctcaatgtcattccgccaggtggcaaagctattgcaggccaaagaaacagatttccgcttgttcctcattgagagcgacattttgtaccgtctcggtggagtactgacaccgcggcaccagcatattgctgccgggcggtttgaagtgaaaaccggcactacgagtgaaacaaactacgcattcagccaggcgcgttttacacctaaaggcatcgagtggatcggcggcctgtggacggcacacatcgctaaggggcatgccgcgtga

SEQ ID NO: 35433 - DNA, 1938 bp, Escherichia coli
atgcgtgaaattatcgttgataactttgctggtggtggtggcgcgagtaccggcattgaactggcgatcgggcgtagcgtggatatcgctatcaaccacgacgaaaacgctattgcgatgcataagacgaatcacccggacacgctgcattattgcgagtcggtgtttgacgttgacccaagtgcagccaccagcggtaaacctgttggtctggcctggtttagccctgactgccgccacttttccaaagcgaagggcgctaagccggttaagaaagagattcgcgggctggcgtggattgtcctgcgctgggcgctgtcagtacgtccccgcgtcatgatgctggagaacgtcgaagaatttaagacatggggcccgctgctggatgaagaattacgcccggatcctgagcgtgctggtgaaacatttgaggcatttgtcggcatgctgtcgactggtatcgcggcgaatcacccagcactggctgaggtttgtgaatttcttgccattgagccgcacggccagcaggcgcaacagctgatcgccgggcttggctatgaggtcgattatcgtgagctgcgcgcttgtgactacggcgcgccgacgatcagaaagcgtttcttcatggtcatgcgttgtgacggccgcaagattcattggcctgaagcgactcatggggatccaaaatcactggaagtacaaagcggcaagctggcgccatggcgtgccgcggcggagtgcattgactggaacatcccggcccgttccatcttcgaccgcaaaaagccgctggcggaaaatacgctcaaacgtatcgcgcgcggcatccagcgctttgttatcgaaagtgcatcacctttcatcgtgaagtgtaaccacaccacgacgaaaggaggttatgactgtttccgcgggcaatcgttgttagagccattgcagaccatcactaaaaagcatggctacgcgctggcggtaccgcatcttactaaattccgcaccggggccaccgggcagccagtgaccgagccggttccaactgtcaccgctggtacgtcggcgcgcccaggcgggaatgggcatgcgcttggcgtagttgaggccgccctgacaccgttcctggctggcaatggcggcagtgagtaccaggcaaagccgcgcccgctggataaacccgctcatacaatcctcaagcagtcccgcgcgtgcgttgttgctccggtcatcgcccgccagtttggcgccagtgttgggcacagggctgacgaaccgagcgcgacgattactgctggtggtggcggtaagtcgcagctggtaactccaacactgatccagatggggtacggcgaacgcccagggcaagaaccgcgtgttattcaactgaataacccgctcggcacggtcactgctggtggtaataagtttgcaacggtgagcgcgttcctggcgaagcactatggtgggaattacacggggccgggtgttggtatggatgagcctgcccactcagtcactactgttgatcaccacgcggtagttgcgtcgcacctggtgaagctacgcggaacctgccgcgacggtcagaccatggatacacctatgccgactattaccgctggtggccagcacgttggcgaggtccggacattcctcgaaacctactgcggtgatagcgaggatgaatggctggtgacgatcgagggggttaagtaccagatcgtcgatatcggaatgcgcatgctgcaaccgcatgagctttataaggcgcagggcttccctgacggctacgttatcgatcaggactatcgcggcaatcgttacgccaaagacaagcaggtagcgcgctgtggtaacgcagtaccgccgccgttcgctcgtgcgctggtagaagcaaatcttcctgaattatgtgcaaatcaaaaggcgggtgcagccgcctga

SEQ ID NO: 35434 - DNA, 1335 bp, Escherichia coli
atgattgaaagcaaatactgccgtgcgctggttgaactgcgttcaagaccagcccacgagttgaaagaggtcggcgatcaatggcgcactccggatctgttgttttggggtatcaatgcgatgttcggccctctggtgttggacctttttgccgacgacagcaacgcgaagtgcccagcatggtacacggctgaagataatgccctgacacaggattggtctgagcgtctggcagaactcggtggtgccgggtttggcaacccgccttacagccgctctcagtatcacgacaagcaggccattaccggaatgacccacatcattaaccacgctatggcaatgcgagaaaagggggggcggtacgtttttctcattaagtctgcgacgagtgagacgtggtggccggaagaagcagatcacgtcacattcatccgtggccgaattggtttcgatcttcctacatggttcgtgccgaaagacgaaaagcagcagccaaccagcgcattttttgctggcgctatcgtggtcttcgacaaaacatggcggggtgaacgtttcagttacatcaaccgcaccgacctggaggccaaaggccgtgcttcgatgtcgctggcccagtttgccgtgggaagaacgcaaactgatgcggcgccggagctggacgctgaggtagtgccggagaaatcagaggcagaactgccattaacccaaaaagccattctggaaaccagtggtgtagaagcttgggcctgtgttgtcgcggcgttcggcgagaaagatgagtacaccttcagcgagtcaaagtttggtcatacctgggctgccgactctctggaaaaccctgaatttaccaatgtttcaccgctgacgatcgatagagcgaaaaagctgatcagcgagagcatcctggtgggtgttaatgcatggctggaaacattgccctttgatagcgatgacgtgaaacaagacatgtcagagcggcttcgcacggttgccgttgaatctgcgaaagaatacggcatcaaccacagtgaattcatcgcgaccatggaaagcctggataaagccaaatggtcaaatattcgggggatccgcgctcatgtacgtgagacgcaggaatcaaaggacaaggcgttaaacgaatcgcgcgtttggcctcttgaggttggcctggtgtttaaccagattgaaggtgctgacgctctacctgtttcacaacagaacaagctgaaagccaatatcaaccagctgtggctcgaacgtatgccgacgagtgaaattatcacgaccgctggtggtctcttcaacagcatgcagggggccgtcaatgcgtga

SEQ ID NO: 35435 - DNA, 933 bp, Escherichia coli
atgagccagatatttgaaatcgttcaatcgctatcgggacaacggaactgcatcaccattccggtgccttacctcgattttttctcaggtgaccagcaggcgcatgccttaggtgctgttctaaaccaacttgtgttctggtcgggtaaatccgacttgaatgatggctggttctacaaagaacacagtgagcttgccgctgagattcgaggggtaagtgaagatcaggtacagcgcctggtaaacaagatttgcactcgttggcttcctgacgtagttcaaaagacccagcgccaggtaaatggtacaaaaaaaacgcattaccgcattaacggcgaagcgctaattaacgttttattccctgtaacactggattccgcagaatcgcggaacgggaaatgcgaagtcgcggaacctattccgcaaaatcacggaaccgaaaacgcagaaccgcagaaccctaaccgcgaagtcgcggaacctattctctatacagatcattactcagatcatcacaaacagatcattaacccctcttgtccggttgcgccgcaaccagaccctgaagtgttgatcactgataacgccatcctggttttaactcatttgaaccaggttagcggctcccggtaccagaaatctaaaacctctttggaaaacatacgtgcgcgtctgcgtgaaggttataccgtcagcgacttgacgctggtgattgacctcaagcatgaacactggaacggcaacgatgcgcagtatcagtacatgcggcctgaaactctctttgggccgaaaaaatttgagggttatctgcaaagcgggatccgctgggataaaaaaggccgtcccccgcgtgaaagctggggcgagaagaaacatgacccgatgaagttcggcccggtagataccaaaattccagaggggttcagaggatga

SEQ ID NO: 35436 - DNA, 549 bp, Escherichia coli
gtgggtatagaacctgaatggaaagtagataagcagccagcctggctggtggccgcaatcaaaaaaacgatcaccgagcttcctggcgggtattccgaagctgctgagtggttgggtgtgaccgagaacgcgctgtttaaccggctgcgtaccgatggtgatcagatcttcccgctcggttgggcgatggtgcttcagcgtgctggtggttcaaaccacatagcgaatgctattgcacgtcactcgaacggtgtgtttgtgccattggctgatgttgaagatattgagaacggcgatatcaaccagcgtctcatggagtcagttgagtggatcggcaggcattcgcaatacgttcgtaaagctaccgctgacggcgttattgatgctcaggaacgcgcccagatcgaagagaacagctatcaggtgatggctaagtggcaggaacatttgacgctgcttttccgtgtgttttgtgcgccggaaaaaggtgacgcccgcgagtgtgcagctccgggcgtcgtggcagacaaatcttgtatggagaagtaa

SEQ ID NO: 35437 - DNA, 216 bp, Escherichia coli
atgacaaccgacgagattgaacaacatttcggcagcactgagaaagttgccgaattttttggcatcaccagtgaggccgtttaccagtggcgtaatcgccccggacgcttaatccctaaaggacgagctgctgaagctgcgtatcgaactgctggtgaactggaattcaacccagaacgttatggcaagaatacagcgcctaacgatcagaaataa

SEQ ID NO: 35438 - DNA, 627 bp, Escherichia coli
atggaaacggttggtcagcgcattaaagccctacgcagggttacaaaaacctctcaaaaagaactgggtaagttctgcggagtgagtgacgtagcagtgggttattgggaaaaggatgtgaatatcccaaacggagaatcgctggttaagctggctaaattcttcaatacatcaatagattacattctttacggcactgaatttgaagggaccctcataactaaaatgaggcgtgtgcccgtgatttcttgggttcaagctgggcagtttacggaatgtaaggccgctgatttattcagtgatgtcgataaatgggttgaaacctcactacgcattggggatagctcgttcgctttagaggtcaaaggggattcaatgaccaatccaaatggcctcccaacaattcctgaaggggcaaccgttattgtcgatccagatgccgaaccccttcatggcaagattgttgttgcgcgtattgatggtactaacgaagcgactgttaaaaaactggtcattgatggcccacaaaaatttttagtcccactaaatcctcgctaccccaacatcccgatcaatggtaactgcctcattattggagtagttaaaggcgttcagtacgaactctaa

SEQ ID NO: 35439 - DNA, 372 bp, Escherichia coli
atgagtaatgaccgcatgaccgtagtgcccgatttcctgggcgaactggatgccggcgtgttcatgaacaagatcgcggcagctttaaacactaccgcgcttggcgttctgaacaacggtaccaaaggcaaagtagtcctcacctttgatattgagcgtatgggtaactccgtcgaagagaagcgcgtcaagatcaagcacaagctgaactacgtcacccccaccccgcgcggtaaagcctccgaagaagacaccaccgaaacaccaatgtgggttaacaaaggcggcaagctgaccatcctgcaggaagatcaggggcagctgttcgggatcaacggcggcgttgacggaaagcttaaagcggcacagtga

SEQ ID NO: 35440 - DNA, 831 bp, Escherichia coli
atgtcccagattttagacggcaatgccctgcagcaggtgaaagaccttgttctttccggttatcaccttactgcagttaaagaaacagcatgccctactgccctgctccctgatggcgtaaacgtagagagccttgagcgtttcgatctggagcgttttcgtttccgcggtgccatgaccacaaccagcattcctgactttgttcgttatgcagctggctatgccaacgaagctgaaccggcgcgatgctttatcgatgctgataacatgaccgcacgctccgtgttcaatatcggtactctggctaaccctggccatgctgataacgtcgcatctatcaccctcaaaaagacagcgccattccgagccctacttcaggtaaatggcgatcgactgggccagaaggaaattgctgaatggctggaggactgggccgacttcctgagcgcatttgatgccgacgggaatgtgttgtccatcgcgcaggcagctggtgccgttcgtcgcgtcaatatcaaacaagtctcggaagcagctcatgaagacgaagattttggcggcagaaagtccctgatgcagagcgttgaagccagcagtaaagacgtgatgcctgtcgccttcgagttcaaatgcgtgccgtatgaaggcctgggcgaacgccgctttagcctgcgtaacagcctgcttaaaagcggggaaccggtgtttgtactccgcatcgttcaactggaagcccaggaagaagctatcgccaacgagttccgtgacctgctgatcgagaagttcaccgacaagccggttgaaacctttatcggtaactttaaagcgtaa

SEQ ID NO: 35441 - DNA, 540 bp, Escherichia coli
atgagttatatccagacactttcaggaaagaaattcgattacctcaattcaaccgctgacgatgtggagatcgaggatatcgcgaccgcactttcacacatctgccgcttcactggtcatctgccagaattttacagcgtggcccagcactcggtgctgtgcagccaaattgtgccgccagagtttgcctttgaagccctgatgcatgacgcggccgaagcgtattgccaggacatccctgctcctctcaaagcacttctgccggattatcaacgcatcgaaacgatggttgatgacctgatccgcaccaaattcagcataacctctgatatgtcagcggtagtgaaatatgccgatctggtgatgcttgccacggaacgccgcgatctggatatcgacgacggctcactctggccttgcctcgaaggtattccggccagcgacattatccagatcgttcctcttcgcccaggccaggcatatggcttgttcattaaccgtttcaatgagcttacggaatcacgcgcatgcctcgcatga

SEQ ID NO: 35442 - DNA, 198 bp, Escherichia coli
atgcctcgcatgaagataaaagaactggtagccgcagcccatgctgcggcggggaaactgccaccagcagaagcctctctgatgcgtgaggtagccactcgcctggacgttacatttgccgccttgacggaatcgatggaccagcgaatgagccttgacgccgaaattaaccatcttcgtcaggagtccgtccaatga

SEQ ID NO: 35443 - DNA, 504 bp, Escherichia coli
atgaccaccaacaaatacgcgactctgcgcggcacaatcgccagagctaaacgcaacgactgccagaaggtagtgatgcgtgtgacgttagttgaagaactcctccttcaactgtcaaacgctgagaagcaggtagctgcgctagctgcggaagttcaggcggtgcgatgggctgccgggcaggtttattcagctgggtataatcatgggcaccttaatactgctgatgaactcccctatgcatctgatgaagaacttcttcagagaggaaatgaagtccttatcgagttcaccgacccagaccattcaggcaatgtgaccgacgctgtactggatgaagtgcgtgcccacgctatcaaatctgccctcaacgattgttcggagtgcctcgatagggactgcatcatggattcgaacggcatcagttatgaagatgctgcactccgtgaagcgggtgccatggcgctgcacgatgcgttacttcgccaggagcgtgccgtatga

SEQ ID NO: 35444 - DNA, 222 bp, Escherichia coli
atgagttcagacatcatcgatcaggcaaacgagctggtagagcaccgcctgcagctggccatacaaaaacaccgtattgatcagaatgcagtctctgcagagcactgttctgaatgcgaagaggacattcctaaggcgcgccgggttgcaatgcctggctgcaaaacatgcgccagttgccaggaagttttagagctcatgataaagcagcgtaaggggtaa

SEQ ID NO: 35445 - DNA, 213 bp, Escherichia coli
atggcaataaaccagaaaataaaaacccataccggaaccatcatcaccaaagatggcgagaaaaccgtgcagttgcgcgagactccaacgacctggtgtgttggccgcactgaaacctaccggaaagaagatggccgccgcagcggagcgccgttgacatcacgcagactgattctgagcagtattaagccaatcgaaggcggtggagcatga

SEQ ID NO: 35446 - DNA, 234 bp, Escherichia coli
atgagcaatttgttacttctcaaatgcaccaaagacactgaaggttggtggactgagggagaggtttacccggctcgtgtggttgcgggtggcttcgttctggttggtgatgatgacgaactggacggagaaggatggagtgccgcgccgaaggaataccgtgaagatggctcagtggtttatcaggtcggcggcgttgatggtgaagttttgtttgaggaatcagcccaatga

SEQ ID NO: 35447 - DNA, 393 bp, Escherichia coli
atgagcgacgttggcaaacaaccgtaccgcgctgacggcggcgatataagcactggccgcctcaaagagatagcagacaacccatacggtgacgaggagaagtgctggctggcgaagcgcgtgctggcatcgctcgaagcggagcctgtgtcgcaggttctctcaagtcgagcgggtaacgatacatcaacgattgataaagctctgccagaaggaaccacgctctacaccgtcccaccagcgccggtagtgccgaatggttgggtgatggttccggtcgcgccgacagaagaaatgcttgcagaactctgccttgttaaaggttggacagaccgagcgcttaatgcccggtaccaagcaatgcttgccgcagcacccaagccggaggcctaa

SEQ ID NO: 35448 - DNA, 222 bp, Escherichia coli
atgcccagtaaactcacacagcggcgtcttcgccgacttaaagccgatgtcgcatggtggcgtgcagaggctgaagattgcagaacacgtctgctggagctggcgggggaaatcgatagagtacgagcacagatcgtcagagtaccaatgccggtggttgtcccctcggctttaatcgcagaattagcaatggagaaagcagttgaacgacttaatgattga

SEQ ID NO: 35449 - DNA, 561 bp, Escherichia coli
atgattgaccttgaatcaatgggaaaaaagccaaacgcgccgatcgtctcaattggtgccgtcttttttaaccctcatacaggtgaacttggccaagaattctatacggccgtctcgcttgaaagcgcaatggatcaaggggcggtaccggatggagaaacgattctttggtggctaaaacaaagccctgaagcgcgctcagctatttgcgttgatgatgcgatgcatatcactgatgcactgtcggaacttagccatttcattcaccggcatgcatataatctcaaatacatgaaggtctggggtaacggggccacgtttgacaatgtgattctgcgcggagcttacgaacgcgccggacgcatttgcccgtgggaattttggaacgatcacgatgtacgcacgattgttaccctcggtcgcagtgttggtttcgatccgaagcgtgacatgcctttcattggcgatgttcacaacgccctggctgatgcgcgccatcaggcaaaatatgtgtcagcaatttggcagaaacttatccctgccaccagcaccaacgagtaa

SEQ ID NO: 35450 - DNA, 210 bp, Escherichia coli
atggcaaagctaatgaaagcgagtctctggagtaagcgcgaatttaccaaagactccattcctgacaaccgtacaattaaacgttgggtcgaaaacggattactcatgggaaggattgtagatggttcagtttttgtctatgaaaccgaaaaatggggagttgactcaattgttaatcaggcggtacgtcagttaataattgagggttga

SEQ ID NO: 35451 - DNA, 1182 bp, Escherichia coli
atggcagcaaggccacgaaaaaaagaataccgccaccttcctgattatcttttttttgataaagatcgtggcgtgtataagttcacgcttataactgggaaaaagaaaactctcggttcggatcgagtaatggctatagccatcgcccgagaatataacctgaggatgcgccctgaaaatacaccatcgatagattcattaattcgggaatcgggagggctgaatggtgaagcccaaccgttttctgaacatgttgatcgcattatggagagagcaatcaaagatgagcagccgtctaaaagcacacttgacgattggaataatgatgccatcagggttaaagaattttttaataacatacccgcatgcgatattgagcttgagcacgtaaatgcctacatacgaaattaccattctgaatcgtcggccaatgttcagaaccgaaaagttagcttcctgaaaaagctattctcttatgctgttgatgaatcgctaatgatggataaccctgcaacacggaaaaaaatgcggcgtgtcgataaaaaggtccgccggcgacttactttggaacagttcctggccatacatgcagctgctgaaccttggctgaagactgcaatggaccttgccatacaaactacgcaagcgcgcctggaagtttcccggatccggtactcgatcaaggaacctcaagaaggggtttgcggctgtgtatggttcgatcaggaggaggctggcatattcggaacgctttacattcatcggcaaaaagtgcagcacaaagaggcttcacacgtcgctattccgatcggcagggccctgaaagagatcatcgacaacagcagagacaatgtggccagtccttatgttgttcaccggcttctggaaaagagaagcaatccgataagcaaggaagttaaccacccaacacaggtggcccctgactatttgagcagggcattttcagagctgcgggaccggataggtgtagcggcagaattacctatcaaagaaaggccaactttccacgagattagagcgctggcggctcatattttcgaaagacaaggtatcgatccgcaggcaaggatggcccatagtgatgcaaaatcgacaaaaatttatacccagaatcatgttgaatgggttgaagtaccgcatgcagaaataaaaatggcatag

SEQ ID NO: 35452 - DNA, 522 bp, Escherichia coli
ttgagcggacaagattatcgtgtacccccgcagaaccgcgaatcaatacgttctatcgtcagatctctgcggagcaccttcggtattacaggtctgatgtttcctgttatggaggtgatcgagttcgcattgcctcagttgatcccagattttgaactccatatcggtgggatgaaggaaatgggggagacgcacggtctcacctacccacaggaacatttattgattcttcgtgaagacatttacgagggtgctttgaatggggtagggcgtgacaggatgactgccgcacatgaactgggtcatcttctcatgcacaggaacattgctttcgcgcgttctgctccaggggtaaaaatccgcccttttgagagtagtgagtggcaagccaaatgtttcagtggtgagctattagtaccagctattcatgccaatgttctgaaaggtatgagtgctgaaaatgtagctgaggcatgcggagtatcattagtggccgcacgatatcagttagacaaaatgtaa

SEQ ID NO: 35453 - DNA, 360 bp, Escherichia coli
atgttaacgccgtttggtaagacagtaagaaaaatgcgcatagacctggggcttacgcttaaaagcatggctgaggctatgggtatgacctcgtcttatctttcagcaatcgaaactggtaaaagggcggtcactaaacccgtgcttgatagcatcattggctatctgaatgcggatgaaaaacaaaaagaaaagcttatcagtgcagctcgtgactctcagcaatcagtagagatcagcttgtcaggtaagaacgaccatgctcgtgaagtcgcaattgcgttcgctcgtagttttgatgagttaaatgaagaagacttccggaatttacgacagattttgaatcgaaaacagcagtag

SEQ ID NO: 35454 - DNA, 237 bp, Escherichia coli; identical to SEQ ID NO: 15353

SEQ ID NO: 35455 - DNA, 285 bp, Escherichia coli
atgaaacgcaaaattattgtcgcttgcggaggcgcggttgcgacctctacgatggcggcggaagaaattaaagagttgtgtcagagtcataatattcctgttgaattaatccagtgtcgggttaatgaaatagaaacctatatggatggcgtgcatttgatatgcaccactgccagggtggatcgtagttttggcaatattccgttagttcacggcatgccttttgtttctggtgtcggtatcgaagcattacaaaataaaattctgactatcttacaggggtga

SEQ ID NO: 35456 - DNA, 297 bp, Escherichia coli; identical to SEQ ID NO: 26770

SEQ ID NO: 35457 - DNA, 309 bp, Escherichia coli
gtggccgaccgcctgacggtacagagcgccagcatcgtgacatggcggctgaatgcaaaactgtacttttaccccggcccggaatccgaacctattctggcggcggctgaatcgtcgttcaggaagtggctggctgagcaggggcttatcggtcaggacgtggcgttgtccgccattgctgccgcactgcatgtgcacggtgtgcaacgcgtggagataatcgaacccacacagaatatggccatcagcgacatacaggcggcgcgctgtgagtcgttcaccatcagcgaaggtgggcgcaatgagtaa

SEQ ID NO: 35458 - DNA, 144 bp, Escherichia coli; identical to SEQ ID NO: 22365

SEQ ID NO: 35459 - DNA, 327 bp, Escherichia coli
  misc_feature (267)..(276): n is a, c, g, or t
atgttaagaatcaatcaaatagtaaagatccttggtgaaatgaaggcatatgccccttatacatacaaaagtaaaacagataaagtggttgataaaatacatggtagattagtcaggctcggggtttttatcatcgctttacttgctttatgcattgctttgtataaattcaatagttgttttagaaccgagacagttgtagatgttatttttgggttgtattttacaggggtgctaataggattagtaataatggcattgccaccnnnnnnnnnnactttatttgcgaaatatcacatgatgaagataacgcaaagcgtcttttag

SEQ ID NO: 35460 - DNA, 255 bp, Escherichia coli
  misc_feature (219)..(228): n is a, c, g, or t
atggggtttataatgaataaagatagatctttaaatgaaatgatgttaagcttgtttaataaatcaactattgttgacttgtcaagtgagacaatatctgagagtaaatctctttcaggccgtatttatcaggatcctgaacataacggggaatttgaacttgatcgtgtattgacagatatttatgctcctcagttaattatttttttaccagataannnnnnnnnngggggggctaccaggctgttatgttag

SEQ ID NO: 35461 - DNA, 564 bp, Escherichia coli
atggccgcacgctgtgcgtcttcgattttcttgcgcgccctttccgcttcatccggaagcacaccgagcttttcaagtatccacgccagcgtatccagcaacatttttgcaggtgtcagaacaagttgtaacgcaccgccaagaacgttaccgaatatctcgccagcactggtacatttatccagcgtttccttgctggactccatcggtgacagcagcgatttaaaccagttaaacacctggctgatcccactcccgattgcgtcaaaaacaggaccaaaccgttcaaaggtttcgcgcaacggggtcagcctttccataatcccgctgaacaccccggcaaaaaatgccctgatgggatcccagtatttccagataagaacggcagctccggcaagcgcagccacgataagaccaaccggactgaacaacgccccgatagcgcctcccagtaaagaaacggaacccgtcaccattccccacagcgcaggcaacaccctgacgacattcattgaccgggtaagaatgtcaaaaccaagacgcagggtggccagcttcccgtaa

SEQ ID NO: 35462 - DNA, 174 bp, Escherichia coli
gtgctaaaaaaaatcagtctgacatctgaaggtatgttttttattcagaggctcactcttgcacaaagcatgtatctgaaagaaatctgggattatctgacccatgatgaacaggaactgtttgaagtcattaataaaaagttactggcacatttttctgatgccagctcataa

SEQ ID NO: 35463 - DNA, 807 bp, Escherichia coli
atgattgcgtcctatcccgccgaacagcgtgaagccgtttccgccgcgctggagctggaatcggaaccccttaacgttatcgctcaaaccatgtcgtttcgtgaaatgcttttacgccagcgggttaacgagggcgcacgcgcctgtatgttaagccacggttcagggacaaacctggacaacctcgcgggtaatatgaacacaaagcgcctgattatcactccggcaacggataccaccgacgcggtgatggagagcgacacctcgctgagactgcgggcgcagcgggcgtatgacggcctgagtgttgctggcccgtcaggtgcatacgagtattttgcccgcagcgccagcggtctggtgcgtgatgcgcgggctatcagcccgtctccggcaaatgtgacggtttccatcctgtccactgagggcgacggcacagcaacggaggcgttgcttaataccgttcgcgccgttctgaatgcagaggatacccgcccggtggccgaccgactgaccgtacagagcgccagcatcgtgacatggcggctgaatgcaaaactgtacttttaccccggcccggaatccgaacctattctggcggcggctgaatcgtcgttcaggaagtggctggctgagcaggggcttatcggtcaggacgtggcgttgtccgccattgctgccgcactgcatgtgcacggtgtgcaacgcgtggagataatcgaacccacacagaatatggccatcagcgacatacaggcggcgcgctgtgagtcgttcaccatcagcgaaggtgggcgcaatgagtaa

SEQ ID NO: 35464 - DNA, 324 bp, Escherichia coli
atggtgatgtttgtcatggattacgccggggagctggacgacctcacgctgccgctgctggcgtggttatccgaaaatcagccacagttgttgctcaaccctgagcgtaatcaggacatcaaattctccgccgttatcaatgacgatgacagcgccgatctcctgtttacactccccctgcgggaacgcgttcgcatcacgcgcagcagtcagggcacaccgcaggcagagcacctgccggagccaaaaccccgcctgccatcttccgaaggcgactggtcgcatgtattccaggatgtgacgtggggtgaaagcgatggataa

SEQ ID NO: 35465 - DNA, 645 bp, Escherichia coli
gtgaaagcgatggataaggcattcacccgcgtggatgaaacctttgaggctatccgcgacagcctgaatcagcaggccatcaataacatcgccagaaagctggcacacgatttacgtcgcgcccagcaggcacgcatccggtcacagaaagcgccggacgggaccgcatggacaccacgcagacgccgtgtaacccggatacaggagcgcattcgctttatctggaataacgaagcacgcacactgaaaaactggcatcacgacacggggaaatacgggcgaaccattaccgggtgggatgaggataaaaacaatatccgcacgttttaccgggatgacatcgaccgctttctggaaatacgcacccggcgcatcaaccaggacagcacaaagcgcgtccccatgttcgtaaaactgcgcaccgcccgctacctgaaagcccgtgcggatacttccggtgtgacggtgggttacagcggcgtggctgcacgtattgcacgcgttcatcagttcggtgagcgcgatcaggttgcgccgggcattttcaccgattacccggtacgtgagctgttgggcatcagtcaggcagatgaacgcctgatttataacacggtgctgggccggattgcggaggctgtacggtga

SEQ ID NO: 35466 - DNA, 270 bp, Escherichia coli
atgaatggcaattatattcacatcgctgtactggtattgcgtgtcggtcgtctggacaaagcgatcgctgaccggatcaaaaccatagcgcacgccatcaagcatgtagttcgcgggctgcgtgccaccgaacggcgcagaccattccgacttgaagctgttcgggctgatggcgttgcggcgttcgccgttctcagtccatgccagcttgatgttggtggagccgtcgtcgatacaaattttcatgtcgcttttccttatgttgattaa

SEQ ID NO: 35467 - DNA, 219 bp, Escherichia coli
atgactaataagagcgatgaagaactcgctgaacttgctagacagaacatcttggcatcacgtaacaagcagcttgatagtgctaagttgtatctctcaagagagcttcaggctatgaaagagcttgttagtgaatatgagtcgcagaagaaggttgctatgcaggctgatattgagcagcttacgaagatttctagcaaatatgcaaaagctatttga

SEQ ID NO: 35468 - DNA, 1350 bp, Escherichia coli
atgaacgcaggattacacttcagtgagatcagcaaagaacaatttgatatttatttttacggtcgctcaccttaccttaagacattttctgaggagatacgctggtttaaatatgaggggaatgggataacattgttatccacaataatcatatgcaatattgataaagattttaacgcaatagtcttaggtcgggatttagataaaaaattcagagcaataaacgtcttggcttcatttgattcaatggatgtcttgcttaataatttgaacgatgacataccaaagatgctggcgcagcaccaaaatggtacattcatgcaaggcgatgaatcatccaaacctttttcattattcttgagtaaagtcccagagaaaaaaaggaatgtttatataaaaatgctcctcgaagaccctcttcatttccctgcatatattgttcttgaggaacttgcatactggttcaaagatcctgatggaatatttataagggattttcaaagtgatgcatttaattcaaggttatttgaattatatttgaacgctgtattttatgaactcgactttgaaatgaatagagaatacaatcaaccagattttctgctatctaaatttggagtggaaattgctgtagaggctgtaagcattgctgaagcagaagcccctcttgaaagaaaagtcattaacgatgaacagatggatgaattaagaaaacatgttctaaatgtcatgccttttaagtttgcaagaagtttattaaaaaaagtccggcattgccctgagccagagaaagttcattactgggaactcaaccatacaaagaacaaaccatttgtcatagcaatgcaggattattcaaaaagaatgtccatggccttctcaagcgaagccttgcatagctatttgtacgggattgatattgagtcaggcatttctattgaaagacatacagatgaaaatagaagtatcaagtcgaacttttttggctcagaacaaaataattatgtttctgccgttttactcactactcaagcaaccatacctaagtttaaccggatgggaattcttgcaggtgtagaggcgagtggattcaaagtgtacgtcagtggtgttaaaactgatcaggatgcagccccacatccattttcagccgatgtaagtgaccctaactatcaagaaccatggtgtacagccatgtacatgtaccataatccaaacgctatacaccctgttgactatcaattattcccaaatgtagttcatgtatttaaaaaggacgaacactttgaagagtacattcccagaaactatattctccaatcgactactatgatatgtaaaacggaataa

SEQ ID NO: 35469 - DNA, 504 bp, Escherichia coli
atgccatttgctcgttatttctgcattttcataaacgttggtttgggagaaggctctgcattacccgttggtgtccctgttccatggccttccgccactccgccaacaggctggctgaaatgcaacggcgcggctttttctgctgaagaatacccggaactggcaaaggcttatccgacaaataaattgcctgatttacgtggtgagtttattcgcggctgggatgacgggcgcggggttgactctggacgaggtttgttgacggcgcaggcggaaacaaagataactaaccaccacggcaatggcggtaatgctgatgatatttcggctggtgtctccggttcacctcccaaaaactttgtcagaaacgcggattcggcagttaatgctggttctggttttaccgcttttggctctggaaatttgacaatgaatggtgttacttcttatttcggtgtccgtccacgcaacatcgcatttaactacattgtgagggctgcataa

SEQ ID NO: 35470 - DNA, 264 bp, Escherichia coli; identical to SEQ ID NO: 33160

SEQ ID NO: 35471 - DNA, 687 bp, Escherichia coli
atgtgtggtgatcatccgatgatcgtccttatgcaagctatgcagctgaaagtcataactccagagcagtacgctagcttaatgagtctctacatggatgtagaagacttcaccttcggcatggtggtcctcgataaacactcaggtgctatattagtaggtatgtatacccccccgatgattgcgataaaaagcaaacaaatagtttacgatttaggttcaactggcggcgaatttgcagcacattgtctctactatgcggaaaaaaggcttagaaaaaaaaagcgtcatcgtggatactctacatcgtcagtgggatgtaagatcaccagcgctgtcaaatatgcatacagacgagatcgctactccggtggtaaagtatacaaaatcatttggaaaaataacggcatcatgtacaacaacataccgttatctaacaactcggtaaaaaaccattaccggcggattttaaaagaaacattaaagatcattcatagcaggtacgaagagaaaataaacatgagacagaatgcccagttaaatacagcggcagcctcgctctctcagacgggtcagccgaaaacacaaagtcagccacataaccaagcgcctagtgcgagtggtgataaaagccatcggatgactatgtctcgagccattaactatgctcgccttttttctgactga

SEQ ID NO: 35472 - DNA, 537 bp, Escherichia coli
atgaaagatgataaagcagttgtcgtatttacaggcaaagatctaaacataatgagagctgagggaggttcaggttattggctagcaaaagcagaacggcttaatgacgccaaatatctcatcgcagtaagaaaccggagagaaacatgggcggtgaaagacctcgaacacggaactggctttctgattgcaaagatcaccggatgctttaaaaaccctgattacgacgacagaaacgtaattacatttgaggaatatgctgaaatttcagtgaaaaaggcatggaaaatgctaactggcggtcagcgttatccggttgcttatctgacagcagaggaagctttttcccgtatagggataacgctagagcagctggagtggaaaaaacgccagacttcaacactatctcagccaatcccctctgcagaagcgccgaaaaaactaagcctcaacgaggcagttgaaagagctaagcaagatataagcaatgcaactggtatcgatgtatcttctattacgataactatcaatatctga

SEQ ID NO: 35473 - DNA, 309 bp, Escherichia coli
atgtcgatatctatgcagcaaatagattcatgtattgaaacgaccatcaatcgtctttctagcgaagctggtacgatggttagtaatttctatcttgacctgcgctctcccggtagacagcgcattactgaaaagctggtagagcaatcaatagatctttgcaggtctcgtggtatctatgctgagcgggaaggtaatgggttgcttgtgagagtagatctgagaacgtgctatctgaatccaggtcaagctgaaatgtttaatgtagctattggatatacgcgttcagttcacgggaatcatctataa

SEQ ID NO: 35474 - DNA, 690 bp, Escherichia coli; identical to SEQ ID NO: 10368

SEQ ID NO: 35475 - DNA, 375 bp, Escherichia coli
gtggcgcttgaagagcttcgctggggcgcgtttggtgatgtgatacgtcagggcgaaacaggccaggttaaccagctactggatattctcagacataaagcattaacgcagatggcacaggagagtggcggtagtgcaaccgtgcgtctgaacactctggactggcttggtggtcagggccgggagcaggcagataacgagtggcatgacgcgattaactggctgggagactggtgcagtgaagagcagcatccggtgatctggtcaaccacgcaggctgcagaacacttaccggttcgcatgcctcgcctctgctctgcagaacgcctctctgaaagtatggtcgatgaaatatttcagaagggggctgcatga

SEQ ID NO: 35476 - DNA, 222 bp, Escherichia coli
atgaaaattatcacccgtggtgaagccatgcgtattcaccaacaacatccgacatcccgtctttttccgttctgtaccggtaaataccgctggcacggcagcgctgaaacgtataccggtcgtgaagtgcaggatattcccggtgtgctggccgtgtttgctgaacgccgtaaggacagttttggcccgtatgtccggctgatgagcgtcactctgaactga

SEQ ID NO: 35477 - DNA, 375 bp, Escherichia coli
gtggccttcacctccacccgtgcggcacgggaatggctgattctgaacatggcgggactggagcgtgaagagttccgggtgctgtatctgaataaccagaatcagctgattgccggtgaaaccctcttcaccggcaccatcaaccgcacggaagtccatccccgggaagtgattaaacgcgccctgtatcacaatgccgcagccgtggtgctggcacacaatcacccgtccggtgaagtcacccccagtaaggcagaccgccttatcacggaacgtctggtacaggcactgggcctggtggatatccgggtgccggaccatctgatagtcggtggcagccaggttttctcctttgcggaacacggtctgctttaa

SEQ ID NO: 35478 - DNA, 135 bp, Escherichia coli; identical to SEQ ID NO: 10665

SEQ ID NO: 35479 - DNA, 135 bp, Escherichia coli; identical to SEQ ID NO: 10665

SEQ ID NO: 35480 - DNA, 540 bp, Escherichia coli
atggcagttcgtggcattaacaaggtcattcttgtcggtcgtctgggaaaagatccggaagtccgttacatccccaacgggggcgcagtggcaaacctgcaggtggccacgtcggaaacctggcgtgacaaacagacgggggagatgcgggagcagacagaatggcatcgcgtggtgctgttcggcaagctcgcggaagtggctggcgaatatctgcgcaagggcgtgcaggtctacatcgaaggtcagcttcgcacccgtagctgggaagataacggtatcacccgttacgtcaccgaaattcttgttaagaccacgggcaccatgcagatgctgggacgtgccgcaggtgctcagactcagccggaagaggggcaacagttcagcggtcagcctcagccggaaccacaggcggaggccggtacgaaaaaaggtggcgcaaaaacgaaaggccgtggacgaaaggccgcgcagccggagcctcagccgcaaccgccggagggtgacgattacgggttttcagacgatatcccgttctga

SEQ ID NO: 35481 - DNA, 672 bp, Escherichia coli
atgctattgcgaacagacaaacgttatgcagggaagcactggaccggcaaacatcgaacctggttagccaatcaatcatttagtcagccatctcaacagattgcttttcaacactattgtcagagtctggagcagattgaagatcgcatacttcaactcgaccaggaaatatcccgcctgttacctgagtggtctctgtgcaatctggtctgccagttacaggcccttaaaggtgttagtcagctaaccgcaataaccctggttgctgaactgggtgatttttcacgattttccagtcccaaacaactcatggcttttctgggactggttccaggggaatattccagtggaaacagcattcgtcccaggggaataacaaaagttggaaacagcgaactgagacgtctgctttacgaagccgcctggtcttatcgtacacctgcaaaagttggtgcatggcttatatattaccgaccggattctgtaacacaatattccaaagatattgcatggaaagctcaacaacgattgtgttctcgttaccgaagtctgacagcaaaagggaaaaaatcacaagtagccattacggcggtggctcgtgagttgactggatttatgtgggatattgcacttgctgcccaatcatcattcagtcagcagaagcaaaattaa

SEQ ID NO: 35482 - DNA, 672 bp, Escherichia coli; identical to SEQ ID NO: 34799

SEQ ID NO: 35483 - DNA, 426 bp, Escherichia coli; identical to SEQ ID NO: 1009

SEQ ID NO: 35484 - DNA, 600 bp, Escherichia coli
  misc_feature (97)..(106): n is a, c, g, or t
atgttgaaaacgcttaattttgataaagttcttggtatgggagattttattggttatcaacgcgacagaatgactgataagcaaacatttaatgcannnnnnnnnnaatattttgatggtagcaatcctctctacaataaattctataactatgattttcagttggggaagtttgttgatttttttcggcgcagttcattttatggcaatacgttgttgataattacatcggatcattctacatttccttcgacagaatataagaaatcatttaacagcgattctcgttattttgtggacaaaataccatttctgatcattggaaaaaatattacgcctgaagttttagatgcaggcggtgaaaattctttaagtttcgcgccaacaatattgcacatgttaggaattcagtattcaatgaattattttttggggtgttctcttcttgataagacgtgcacatcaccattctcacatctttctgctattggtagtgattatttcaatataggcaaagaaaatcatgttgaactaattcaaaataatagtggtaatgaattaataaaattagccgaacgtttttataacattagtggctaa

SEQ ID NO: 35485 - DNA, 312 bp, Escherichia coli; identical to SEQ ID NO: 6177

SEQ ID NO: 35486 - DNA, 1371 bp, Escherichia coli
atgaggggatctctcagcgcgctgtatcaggaaaaagggccggaatttctcgacgacttgcagggcatgtttgcctttgccctgtacgacagcgaaaaagatgcatatctgattggtcgcgaccatctggggatcatcccactgtatatgggctatgacgaacacggtcagctgtatgtggcctcagaaatgaaagccctcgtgccagtttgccgcacgattaaagagtttccggcggggagctatttgtggagtcaggacggcgaaatccgttcttattatcatcgcgactggttcgactacgatgcggtgaaagataacgtgaccgacaaaaacgagctgcgtcaggcactggaagattccgttaaaagccatctgatgtctgatgtgccttacggtgtgctgctttctggtggtctggattcctcaattatttccgctatcaccaagaaatacgccgcccgtcgcgtggaagatcaggaacgctctgaagcctggtggccgcagttgcactcctttgctgtaggtctgccgggctcaccggatctgaaagcagcccaggaagtggcaaaccatctgggcacggtgcatcacgaaattcacttcactgtacaggaaggtctggatgccatccgcgacgtgatttaccacatcgaaacttatgatgtgaccactattcgcgcttcaacaccgatgtatttaatgtcgcgtaagatcaaggcgatgggcattaaaatggtgctgtccggtgaaggttctgacgaagtgtttggcggttatctatacttccacaaagcgccgaacgctaaagagttgcatgaagagacggtgcgtaaactgctggccctgcatatgtatgactgcgcgcgtgccaacaaagcgatgtcagcctggggcgtggaagcacgcgttccgttcctcgacaaaaaattccttgatgtggcgatgcgcattaacccacaggataaaatgtgcggtaacggcaaaatggaaaaacacatcctgcgtgaatgttttgaagcgtatctgcctgcaagcgtggcctggcggcaaaaagagcagttctccgatggcgtcggttacagttggatcgacaccctgaaagaagtggcagcgcagcaggtttctgatcaacagctggaaactgcccgcttccgcttcccgtacaacacgccgacctcaaaagaagcgtatctgtaccgggagatctttgaagaattgttcccgcttccgagcgccgctgagtgcgtgccgggcggtccttccgtcgcttgttcttccgctaaagcgattgagtgggatgaagcgttcaagaaaatggacgatccgtctggtcgcgcggttggcgttcaccagtcggcatataaataa

SEQ ID NO: 35487 - DNA, 996 bp, Escherichia coli
atgaatgaatttataaaagaacggttttcgtatttagcagataataaaaaagaaaacgtcccagagctaaatgtttcctacggtatcgataagaattttttgtatggtgctggcgtttcaatttcttccgttttgattaataattcagatattaattttgtctttcatgttttcactgattatgtggatgatgattatttaaagtcatttaatgaaacagcaaaacaatttaatacctcaattattgtatatttaattgacccaaaatactttgctgatctgccgacgtcacagttttggtcgtacgcgacatacttcagggtattgtcctttgaatatctgagtgaaagtatttccacactgctgtatctggatgccgatgtcgtttgtaaaggaagtctgaaacctctcacaaaaattatatttaaagatgagtttgctgcggttattcctgacaatgatagtactcaggcggcatgtgcaaaacgtcttaacattcccgaaatgaatggacgttatttcaatgcaggcgttatctatgtcaatcttaaaaaatggcatgaagcaaatttgacaccgtatttactcacgcttttacgaggggaaactaaatatggctctcttaaatatttagatcaggatgcgttgaatatcgcatttaatatgaataatatctacctcgcgaaggattttgatactatttataccctgaaaaacgaacttcatgatcgtagtcatcgaaagtatcagcaaaccattaccgataaaacagtattgattcactatacagggataactaaaccatggcatagctgggctggatatccgtctgcatcatactttaatatcgcgcgtgaacaatctccctggaagaaatatcctcttaaagaggcgcggactgttgcagaaatgcagaaacaatataagcatctgtttgcccatggtgagtatattaaaagtataacttcattaattaagtacaagcttaagaaataa

SEQ ID NO: 35488 - DNA, 324 bp, Escherichia coli
atgtgttcaatttttggcatattcgatatcaaaacagacgcagttgagctgcgtaagaaagcactcgagctgtcacgcctgatgcgtcatcgtggcccggactggtccggcatttatgccagcgataacgccattctcgcccacgaacgtctgtcaattgttgacgttaacgcgggggcgcaacctctctacaaccaacaaaaaactcatgtgctggcagtaaacggtgaaatctacaaccaccaggcattgcgcgctgaatatggcgatcgttaccagttccagaccgggtctgactgtgaagtgatcctcgcgctgtactga

SEQ ID NO: 35489 - DNA, 978 bp, Escherichia coli
atggaatctaagaaaattaatttaaaaaaaagacaacattatgtgccacagttttatttgtctcattggatcggtcgagaaggtgtttttgtgcgaaataacatatctaaaaagtcttatcgacagagaaataccaaagagatcgcagaggaaaactatttctatagtataaaaatggatgatgtcgtatgggatatgttgttatatagatattctgatgaaatagagtctaatccatacattagacttctatttaacgagtttgcaattttaaaagaagctgacatttttgttaataaagagttattgataaacaataatgacgaaaaaagcatggagttcgcccgaaaatgcctagaagattttaataaaatctttcttgaagataaatattcacaggttgaaagtgctatttctgaaataatgaaaaaaataataagagagcaagagtctaaaataattacaccgattgatgacaagatgttttttagtcttttgattttttatagcttacagttgttcagaacaaaaaaaatgatgtcaaaagcacttgaaaaaatcgaaggttttattttgaatagaggggacgaagaaatagtattagatgattctcaaaagaaaactctcctaaaatgtatgttgtacataacatctttccaatttgctcttagaatagagaaagagtgttttgctatcaaaatatataaaaaccatactaaaattaactatattacgtcagattctcctgcaatattctataatgatgattctgttgctgccatgcctctttctcctcgtttatttgtacaattttctttaaataaaaaaataaaagaaatattgccagcaagaataggatttgagactatagatatatacaatactgaaaaaataaaacgcataaataaacttattcatgatttttctgatgattttttgtttgctaagaagaatgtagacttaaattttgatttttaa

SEQ ID NO: 35490 - DNA, 3132 bp, Escherichia coli
atgtttagtaaactgtttaaaagcgtgagcagtctggttgatagtgagctcagacataatttacgtacaaattctgaatatcaaaaatatcgctggaatatttttgaacgcctgctggcctggtgttcgacatactatgggcaggctatgctgattctctgggctggtgcaataatgattgttcttgcctgtttgtatctgaggccggttctggccccatttggcaagaagtattttaaaggaattgaaatgctcccgcaggggctctccgatctgttggggggacaattaaccatcattggtattgtatttccattggttgttggtctgatcagtgtcctgtttcagaaaaaatcgacccgtgagcatatccagtcagcctatcagctttactcgggatacatgtttgcaggcctgagcggtctttctcttgctgcatttattctggtgagtgaacttttgtctgcccggggggataaataccttgatatttgccttgttgtagtggcaataatctggatgatcatgaatattggtttgtctatctggttttttattcagagcctgaatgttctggatgatcgccggcgtgatcgaattatgcttaagtattttatttcaaaagtcgtggcgcaacatatcagaacagcaatggtaaaaaactggttggctcttcctgggagatatattaaccaaatgggacggctgaatgtatctgttgatgtttatgattcaccggagaaggaaaagtctgatcttctgaagttaaaacttaaaatggatgaatgtgtgagagatatctatacacttccattattgcttctcctcaggagattaaaacctgtcgaaacgggacctgcaagaatcagagtcttacccgggtgggggatacataacagcgaagtggttattctggctacaaccggtatcagatataatgctatctgggagaagctgttcaagctctgttttatccgtggaagcaaatgggaaaaaacaaattttttaaatttcaccagaggtttttatggggaaatttatgatgctctggatgaacgaaatctgggggcgtttgaggaagctgcagacagacttgtttcgacctttattacactgaaaagatgtttccagtatggtgataaaaattatattgatgatgtatccatttcattttttccacaaagtttaagccagtcttttcataatgatttctaccgtcttgcagaagaagtggtgaaaacactggataccacatctacgtattttcgaaagatcatacatcttcctcagtctttttaccggtatcggggagaagacagaaccggagagttgcaacaggctcttcagtcccagtgtgatatctggcagatactgattgactggaatgttggaaacaaggcgttatcagtgaaccagaagcaacgttatgttgcaatgctgcaacattttattggcgagtgggaaagctggcatatgtggttgcgtctgacgtttaagaataatgttgatactgctggctatactgaggcccttgtatcacatttgtttcgctctatggaaatgcttattacagcaataacatctgatgatattgatgccactgatctgagtactgatatgtttatgctgtggcttaatcaggggcagtttcataatcattatcacgaagaatatctgtggcacagccttttccttacgccagattttttattgcactctgtttcagacaactgtcagtcctgcatattgaggggggcatcgtataacgaaaaagccgcattatccctgacaatgcgtaatgtgatgactgatctccgcctgttcctgtcagcttatatggtgaggtatctgggacaacaaaaaaatgtcaatttgctcactatcatcaaacggttactgtctccttcactggtcgcccaaactggggcatataatacactaccttcggcaatagtaggtcagactgatattattgatgttatattacgtctcactttctgccatgcagacgagcacagtaactggttttcacgtttgtctcatatggtggagaggctcaccagaaacaacaaaggccaggttatttccgggcggatttatatgagtagtgttgatgatttaaacacactataccctgcatttgctgatatagcggtaatgctgtctgtatctgaacaacgtatcagccagaaagtggttactgcaatcggtgaagggattttttcattttctgataaaaaaaatattgtttatacgctgaaatctctgctgaaaaacacgacagacgtagcaggcaattttctgatgacatctgaggagtacgctacgcgagttgtaatttttaacagtacactggacatgtacatatccgcttttgaagaaagcattaagtcagatattataaaagcaaaagaagatatcgatcttttcagaaggattgatatgaacatatctcaaaatatcattgatgacattaagaaagatcatcttctttctctgtttgagtttacacctgatactggaatttcagaacgctgggaaaaacaatggattaatattggcattgataaggaaagtgtggcaaagaaacttggatgtacaattgatccgacattttttccctcaacaacaattgcagacaaaatacttaatacagttcaccggaaactctttattaatcgcggtcagttgagtgaggatataggcaatctggatgaactttttcataaagtaaaaatttttatgaaaaaagaagaagattgcactctcattgtgtatggtgattgtttttccaggaaattatacgaacttgaatattgcactgataaacataatgaacttggcataaaaagagtaagtaaaccagaaaagggatatcagccacatgttcttcaatatatgattggcaactgtacaatatatttcgttccggactgtcaggataattactcattactggtacggaattcatcttttggccgtttacgtctgttccgttatcctgatgatacgatgttctgcacgttctgccgggaagatgcagatgattcgcttaaaagtattatgacccatctctgggagctggatgcagagatgacagatcctgtcatagctatgtttaatcacgtctga

SEQ ID NO: 35491 - DNA, 282 bp, Escherichia coli
atgaactacgatgaaataacgaaaattaccgctgaacgtattagcgactacatgaccgaagcagttaatacagactctaaagccgttgcggaaatgtttcacaatgctgcctggggagtgagaacattgtggtttgaactcgtcacaaaaataggtatggatatacataaaaagaacaggtatgcgagttatgattttagaaggaaaatcgaaatgcagcatgaagagtttcagaaaatgacagagcgcgagcaagtgcctttattgaaatcgccagaataa

SEQ ID NO: 35492 - DNA, 399 bp, Escherichia coli; identical to SEQ ID NO: 22130

SEQ ID NO: 35493 - DNA, 192 bp, Escherichia coli; identical to SEQ ID NO: 22131

SEQ ID NO: 35494 - DNA, 1590 bp, Escherichia coli
gtggggcgtcagccgggctttgccctgggcggcgtcggctcacatttctttgttgaatttgaaattgccgatctggatctcacccggttggagacggtctggaaccgattaatcgcccgccacgatatgctacgcgccgtcgtgcgtgatggacagcaacaggtgctcgaacagacgcctcgctgggtaatacccgcacacatcctccatacgcctgaagaggcgttgcaggtgcgcgaaaaactggcccatcaggtactcaaccccgaagtctggccggtattcgatctccaggtcggttacgttgacgggatgcccgcccgcctgtggctgtgtctggataacctgttacttgacgggctgagcatgcagattctgttggcggagctggagcacggctaccgctacccgcaacagctgcttccgccgctgcccgtcaccttcagggattatctgcaacaaccctcgctacagtcgcccaatccagattctctggcatggtggcaggcgcagcttgatgatattcctccggcgcctgcgttgccgctgcgctgcttgcctcaggaggttgaaacaccgcgcttcgcccgcctgaacggcgcactggacagcacgcgctggcatcggctgaaaaaacgggcggctgacgcccatctcaccccgtcggccgtactgttgtcggtgtggtcaacggttctctctgcatggagtgcacagcctgagttcacgcttaaccttacgcttttcgacaggcgaccgctgcacccgcaaatcaaccagattctgggcgatttcacctcgctgatgctgctgagctggcatcccggcgaaagctggctgcacagcgcgcagtcactacagcagcggctgagccagaacctcaaccaccgcgatgtgtcagccatccgcgtgatgcgtcaactggcgcaacggcaaaacgtgcctgccgttccgatgcccgtcgtctttaccagcgcactgggctttgagcaggataacttcctcgcccggcgtaatctgctcaaaccggtctggggcatctcccagacgccgcaggtctggctcgatcaccagatttatgaatccgaaggcgaactgcgctttaactgggattttgtcgccgcgctgtttcctgccgggcaggtggagcgccagtttgaacagtattgcgcattgctaaaccgaatggccgaggatgaaagcggctggcaactgccgctcgccgcgctggtgcctcccgttaaacacgcagggcaatgcgcagagcgctcaccgcgcgtatgccctgagcactctcagccacacattgcggcggacgagagcaccgtcagcctgatttgcgacgccttccgcgaggtggttggcgagtctgtcacgcccgcagaaaacttctttgaggcgggcgcaacgtcgctgaatctggtgcaactgcacgttttgttacaacgtcacgaattttccaccctgacgttgcttgacctcttcacccacccttctcctgctgccctggccgattatctggccggcgtcgccacggtggagaaaacaaaacgacctcgccctgttcgccgtcgtcagcggcggatatag

SEQ ID NO: 35495 - DNA, 246 bp, Escherichia coli
atgatttctccggttgtgctgattaccacaaagattccggccacacgacgcgacagccgtgagttcgaaaacgccctgacggaaatatcccctgtggtcatgaccggtatacagataacaggcctttccctgctcaagcatgcgcatgcaatgcgcactccgggaaacgcggatgacaggtttgttacccctgatggtgatgctttgtacatccgtgttcgtcgccttaagcgccataatggctga

SEQ ID NO: 35496 - DNA, 294 bp, Escherichia coli
atgacgagaatgagcgaaaccgaactactaaaaataatccgccgcgttaccggaatcagcccggcagcaggcaaacgtgaggccacgcagccggaaactgtcaccgctgaaaattacgcgcgtgtggtggctgaggtgatgcgccgtgatggtatagaacttaatggcgtggatatgcgcaacatacgaaccagagttcttgagttgctggcctaccgtcgccgcgtggagatgtatcgggagaaggagaaaataacgtaccactggaagaagccggagcggttgcggcggtaa

SEQ ID NO: 35497 - DNA, 498 bp, Escherichia coli
atggttcaggattcatcagcattagcccccttctttcgtgctcaaattgaaaaaaataatcaatacaattcagtttggggcaaacactaccgccagcttgtagaacagattcaggccgaaaaaccaaacttttctgaagccacgattcggcaggtatggtatgaacgtgacaatggtgtctccagcctgatgcaaggagggatgtcattggttgaatttgaaaatgcacaaaaagaccttctaacgctcacccgtcagatagcagaagagtgtacacaagaaaattataatcgggtcattgaacgccttatcaaacttaaagcggacggagtattaaataaggtatatagggctctttgtaatcgtgcttttgcagcaatatacccatcaaaaattagcagtgtcgtgaatgttaataatttttttagttgctacaattattgcaacaaccatttccagctaggtctttccggagaacgggctggctcgcaatgttga

SEQ ID NO: 35498 - DNA, 708 bp, Escherichia coli
atggataaggctattgctgcggaaagctgtcctgtagggatgcctattccttggccatctgattctataccttcaggctacgctctgatgacaggtcagacatttaataaagcctcctatcccaaactgggaattgcatatccatctggtgttattcctgacatgcgcggatggataattaaaggaaaaccatccagtgggcgagctatattatctactgaactggatggaattaaatcacataaccatacgggcagtatttcgagtactgatttagggacaaaggcaacatcatcttttgattttggacacaaaacgacatctgcctctgatcttggttctaagacaacatcgtcgttcaatcacggaagtaaatcgtcgaccagcacagggggccattcacatcaaataacatgtaaaggtgatgctgattacggtggcaatgcactaaccgctgattctataggtgactctcgttatgactacgttaataccgatactgtaggtgatcactctcatactacagccattggtacccatgcacatactatcgcattgggtagccatacacatgaactttcaattggcacccattcgcattcaattgcccttggttcccataatcactccctaaccattaataataccggcaacaccgaaaacaccgtcaaaaatatcgcattcaactatattgtgaggctagcatga

SEQ ID NO: 35499 - DNA, 282 bp, Escherichia coli; identical to SEQ ID NO: 7261

SEQ ID NO: 35500 - DNA, 531 bp, Escherichia coli
atgagcaatcttttacagacgggcgcggagttcgagaaaaagctgaaagagagagccgaatctacagagaaaatgctgaacgacgagttcaggaagctcgaagaatctgtaaacagggaactgacctcaaacgaatctttaatcaggaacgctatcaacgaccatacaacagccctgaaagaactgctggagaggtatcagaaaacgaccgtcgatacgatggacgcgcactggaaaaccgtactgaaaatgagcgtgaaacgctggctgtggctgattatcgtctcagtactgatgtttgccacgaccgggagtctgctgtggtaccagggcatgaagataaacgcgaatatgaatattctccgcgagcagaaagagagtctggagaagctgaacgcgaagacatggggcgtgcgttatcacgaggggagcaacggacgttttctggtgttgcccgaggggatgaaagccgaaacgaactgggcgatggaaaacgggaaacagaatgccgtaaggctggtacaggagtaa

SEQ ID NO: 35501 - DNA, 990 bp, Escherichia coli
atgaattctgaaaataaaaaaaatgaaaacaacgattatgttgaaaaagttaattgcgaatggaaagatctttataatattttaaatgaaaatccgcataaatttaatgaaaatgagcgcgcctacttaatcgacttattaaaaaaaggtgaacttgataaattcagagaatactactggaaattagctcagcaagaaaaaatgaactacagcgataaagctggagatatttttatcaatgaaaacaataagatagatgaattaataaaagaacaaaaacatcttcgagagataatgcgatcatataccaaacgtttattggaggctgaagagtccaaagctacgttacatcttcggaatgaaaatttagaaaaactaaattctgaaaaagaagcaattattgagcaagccgtatctagaataaagcaacttgaagcatctaacagcgaattacaaagccgagtacaacaagaaaggattgatgagaaaataccaggatatgtcgatagcgttaaaagtgaactaagttcagatgacttatatttcattaaaatgtcgcaagtatgggcttttactggctgcattttcgggctacttgctgtatgcgcatcattttatacactctacgccacaattgacttcaacaatgttaaaggctttgagctattttattttttcacacgtggtttaattggtatttccattctttcttggctagcatatatttgccttggcaactctaaaaaatatacccatgaatcaattttgagaaaagatagaagacatgcactaatgtttgggcaagtattcctgcaaatttatggttccacgtcaacaaaagaagatgctgtgttagtctttaaagactggaatatgtctggtaactctgcattttctgacaaaacagaactccctccgggaatccaatctttatgggattcaaccaaagaaaaactaaagccaagtaccgctgaaaaagcacaggagtaa

SEQ ID NO: 35502 - DNA, 939 bp, Escherichia coli
atgtcaactcaaaaaaacacatttcgccatgttagcgagagtttaaaaacttcaataatgcaaaaccgtgggggacagaaagtaattgagcgtatacttgttgcgtatggttttacttcgcggcaagcattttgcaatcatctgggtatctcacaaagcacgatggctaacaggtatgctcgtgacacatttcctgctgactgggtgataatttgcagtatagagaccggcgcatctatcgactggttggcatcgggaatcagctgtgaatcatcctcagttttattaaatgatgaacgtttagcccatactaaatctgatgacctggatagaactaactcaatagtccaaaagttcccaatcgagaccagcataaatcctaataaaggagggaaggcggcaattgatcgcttagtcgaagcctacggctttagcacccgacaagccctagcaaaccatttgcaggtttcaaaaagcactgttgcaaacaggtacttacgagacacgtttcctagcgattggatcattcaatgcgctcttgaaacaggaacttcattactctggctcacaaacggcaatggccctaaatttatcgataattccagctctgtagcccaacttaaacaccaaacaatcattgacggtaaattacatgatgaaggctacttagcatttgacaagacgcttataccttccggattgaaaaaaccgattggagttaccgcagaaggaaaaacctttattgcagatacagaatatgatgatgtttcagatggtagttggttgattgagattgaaggtaaagtaagtttaagaaaattaacaagaattccagttggaaaagtaaaaatcacatcagatacaactgattttgtttgtaagcttgaagacattacaaccatcgcaaaatgttgttgcgttttttcaaaggaaatttaa

SEQ ID NO: 35503 - DNA, 810 bp, Escherichia coli
atgagtactaacagcgaacgtatgtccaatgcgcccgtttactatgcattggtacaggtaaagtttactccaatagctgcaatgagtaagtatgttccagacatacaagatgcgctaagagttgagggatttcctttatttgaggtttccaatacaactcagttgaaatttgaaataaaaaaccccaatgagccaccggtacattcatttgagcctgtgacaagttggttgatgattgatgcagatagaagatctggttttgttttaggcaacgatttcattacgttccatacaacatattatgataaccatgtatctttcatctcgtcattgatacttggtctgagcaaagttctagaatttgctaagccatcgctgttaagtcggattgggcttcgatatttggatgctgtgtttcctgagaaaagcgaaacaattgagcagtatcttgtaaaggaacttcatggtgttgatttcggatggacgccaatacagtctatacaagagtccgtatatcagacacgtgttgagccattgatccctaatggatttatggtttcacgaatacataagatgaatggtcagctaggttttccgccagatatgattcctaatggtttactgccgttgccgagatttagtaacacagagcatcgtatgcacgcaataattgatacagatcattatgttgaaggcaacatgtcaactgatttgcagttaattgaaaaacagattctttcgttgcatagtaaagttaaagaagcatttgaaggcatggtttcagattttgcccgtactaaatggcactga

SEQ ID NO: 35504 - DNA, 663 bp, Escherichia coli
atgtatgcaattcccaccggaagcataggctctgtagatcgatattctccaaatttgcagtcaagctcatgtgtatcaggtgttgttgctgtcgccgcatctttactattagttggtacgggggcttcataccctgtaaatgcttataagcaatggcgtcagtatgttcagccaagggttcagtttgcatttgattccatagaatcaacgtacacgcctgcaatttctcctgaggttgatgtcaggaatgttgcccaacatttagctaatattcgagaagtgctgtctccatcaatgtcagaactggcaaaggatttggggataactcggcaggctctctataaatggttgtcaggggagaaccagcctgatgatgcttcaaaagtgcaattcattaccaaccttagtaatgtcgctgactctttttccaaagctggactccatgatgcgaagctattggtgaaaatgaaagcatttaatggtaagtcattaatggacgtagtaaaagaaggtgaggattggaatagggcagttcaggtattgattgatgaagctaaagcgatgaatgctgctgctgaatcggccaattacttagcaagcaaggcgaaaccgacagatgattggaagtcatctatttcaattcctggaacggtagaggaataa

SEQ ID NO: 35505 - DNA, 849 bp, Escherichia coli
atgttggtacgaggaacatcatggcgtcaggggcatgtacttaaacatgatgatgccgtttcacttggaattctgcagcctgatgaaacgaaccataaagttgtagttataacgcatgattgtgatttacagagtaattcagaaaaaaacgtggaactgatgtttggccccttgaaaaaggggtcaagcaggatgaaaagagctaagcatccgagaatactcgatctatgttttgaaaacccagaaagtgcgaagaagaatgcagtagagctccggcatgaaagaaaagtcatctttcctaaagaagctttctgttgtgaggaaaacgatccagcattctccattagcacagaagagaaacaagctcttaagcaatggttagctgctaagtatggtcgtccagcgtttcctaactcgtttgaagagcgcttgcgggcttacgacgaggataaaaagtttattttcgaaaaagaagttgcggatattatcgccacaaacgcagagcatttgatcggagtttttttcgatttgggcgaagaaagatttaacgatcttgaggaaggcataccatatgagctttctatcaatgttgtttatgatgcaactgaaggtggccccgatgccagaagagcggctgaacaaacatgttctgatctaaaggctttgttttataagttttatggtgatccaaccttgggacattcagaacttatagaattgaatacgtgcatagctgttgctgatactcatttctccctgtatgcattgaggcggatggatcaatggagggtagaatacatcagccttgaagaagattcatatggcgatttcattggtgccggtgtttaa

SEQ ID NO: 35506 - DNA, 189 bp, Escherichia coli; identical to SEQ ID NO: 17693

SEQ ID NO: 35507 - DNA, 435 bp, Escherichia coli
atgtacggaacatgcgaaacgctctgccgtgagctggcagcgcagtatacggagaacacgccgctgatgctggttgtctggtccccggaagagattcaggcactggctgacggtatggaaatttctctgaccggtcatgaaatcaggaccgtcctggcacgcctggaggacatcccggaagaacagcggattgagtccggtatttcttccgctgcggtgatggagatcatcaataacgtgagcgaaaaccgccaggtgaccgtccctgctgaactgctggcgtccctgattcagaccgctgagcaggcattgtggaaacgtgaatgggccgcccgggatcatggcctcgccgtcccggaatgcgtcacccgccgtcaggaggtggttaatcaggcccgcaccctgctgaaaaacaacacacacgaaaacgactga

SEQ ID NO: 35508 - DNA, 444 bp, Escherichia coli; identical to SEQ ID NO: 15094

SEQ ID NO: 35509 - DNA, 1491 bp, Escherichia coli
gtgtatgacccgacggtacagtttgaattctggttctcagaaaaacgcatcacgaacacagcacaggtggaaaaatctgcccgttatctggggaccggcagtcagtggactgtccaggggagccggattaagccggggacggatttctggttttacgtgcgaagcgtcaacctggtgggaaaatctgcttttgtggaagccagcgggcagcccagcaatgatggtgaagggtatctggaaattttccgggggctgatagatgagacgcttctgggtcaggcactgaaagagcgcattgatgcttcagcgctgcgtacggaggtcacgcaactggaagaagatatccgtcagcggatggacacggatatcgcagaagtgacccggaaaatcgggaaggcggaaaacagcctcacgcagctggttgcgaaaaagaatgaggatcagacactggccatcgcgcaggtgagccagaaagtggaccgggtgagcagtgaaatctcacagactgtcagccaggggcagtcagaaaacgcccgacagatagcacaggtccgccagtacgtggataaaaaagggagtgaaattacctcgaccacggataaaaagctgggtgaccaggccgtgaccatacagcaaatccagcgggttcagtcagacacgcgcaatgagctgaatgccatgtatatgctgaaggtgcagaaaacaaaaaacggtattccctatgtggccgggattggtgcggggattgaggatgttgatggtcagaccctgagtaacattctgctgcaggccgatcgcattgcgatgattaccccggagaacggcaacaccacgccgctgtttgtggcgcaggggaatcagctgttcatgaacgacgtgttcctgaagcgactgtttgcggtgagcatcacgtcatccggcaatcctccgacgttttccctgacgccggatggcaggctgacagcccgcaatgcggatatcagtggagccatcacggcgaataccggcacgctcaataatgtcaccattaacgagaactgtgtcatcagagggaaactgtctgcaaaccagattgaaggcgatctcgttaaaacagtgggtaaggctttccctcgtgactcccgtgcaccgaagcgttggccatcaggaaccattaccgtcagggtttatgacgatcagccgtttaaccggcagattgttattccggcggtggctttcagcggtgccagacatgagcgggagaacagcgatacttattcgtcatgccgcctgatagtgaagaaaaacggtgctgaaatttataaccgtaccgcgatggataatacgctggtttacagtggtgttattgatatgcctgctggtcgcggcgacatgacgctggagttttctgtatcagcatggtgggtaaatggctggtatcccacagcaagtatcagcgatttgctggttgttgtgatgaagaaagccactgcaggcatcacgattagctga

SEQ ID NO: 35510 - DNA, 237 bp, Escherichia coli
atggatacacaacggaataccgcgcggcagtttggtgcgcagcatatgatcgagagcctccacaatggatttattcgccccattgatgggaatggcttccagcataaagcccatcgtggtgtcattcatgaacaggccggactcctggttgtaatcacggtacggcagcagacggctgaactgcgggaagctcatctcaccgaggatctgattagcctgagaggattcatctggtaa

SEQ ID NO: 35511 - DNA, 324 bp, Escherichia coli
ttgctgacccgccagacgcgccgctttcgtctggttgtgaaggaaagcgattacccctgctggcttgatgaagatgacgaaaatctgcccgtggtgctcgatgccattctgaaccgtggcgcccgtttttcggcggtggaaatgtacctggtcagtgagtgtgtggagcatatcctggccagtggcctggtctgtgatgtgctgcgtataccggatgaaccgtcccgtcgctggtttgaccgggatattctgcgggaggtggtcctggaagcccggactgaaatccgcagcatggcggatgcactggcgaaaatccggaaatga

SEQ ID NO: 35512 - DNA, 1953 bp, Escherichia coli
atggcacagcgtgataatctctatcgacgcccaagcggtatctatgttctgcggatcaccgttccggttcgttatcgcgccctgatagggcagcgtgaaattcatgcatctacccgcacaacccaccttgcaaatgccagagctattgctgcgcgtttgctggagaagtggtatgcgtctctggaagagttcaggcaagtggataaagataaaatcaggggcaatgccccattgttgactggcgcaggcaaaatcagcctggcgttgttttgcgagtcatttggggttgggcttgagactgtcgtccagcatcttctggcagctaatgtgccgctgtatgcccttgtgtctaaccagcgtggctttctgattgatgatttcagcacgcttgagcgtgatcctgatacgcttgggttcgttttgaataatattgcgtatgacggtgctgaggctgcggtaaacggttatatgaagctttaccagccgcagtttgcccttgttgaattgctgaacgagcgagaggttgaggctacggcattcagggctaacaacggcaatcctctttctctctggttgttggatttacccggggtgacgctgaatgcaagttctttgttcatcaacaacgtgcaggctgaaaaactgcgtagcgcttgggataaggcgcttgcaaaatcggaaccgacatcaaccaccccaccaaaagcttctacagtgccatcaacagtgcttcctgcggccgctaccatgaatccgtattgcaatccgttgtatgcgagtatgacggtttcagcattgctggaagcgtttctggtctacaaaaatacgggtgatatcaagttggccagcgagggtaaaattcgttccagaattgaacacttcacggaaatcatgggcgatatgtccttgagtaggttagatcgtgatgttgtgaaggactacgtcaacagaatgcagaatatgcccggcaatctgtatttgatgcggcgaaaatacaagatttcagatacgcataagctgattgaaacggcgttggctgatggtcagccggtcatgagccgagatgcgattggcagacatattgaatcactcggttctatgctcaaatgggctaagagcgaacgttatctttttgataatcctgctgagaatgtgctggctcagcgccgcgtaatggtgcgtgagcaggatcgccgcgacctcttcaccgatgatgaattagtgcaaattttctcggctgactggtttaagaaaggctcgggaacgcccaatcaatatggtcgttatacaagttttcgcccgtttcactactggttgcccctgctggcattatatgtaggcgggcgcattaatgagctttgccagctttatctgacggatattcgtgaggataaaaatggggttgcctacattgattttaaccttgatgcgccggataaggtgatggatgaagagtcgctggctggcggcgataaatcattaaagacggtgaatgcaatccgtcaagttccaattcatccgcgacttatcgaactaggtctgctggagtatgtggatgcgctgaaagcagccgggtatgatcgtcttttccctgagttaaagcacaacaaaatcaaaggatatcgcgccgccgcctcaaaatggtttaacgaaaactactttggcaaaattcttggctttccccgcgatggtaagaaaactttccattcgctgcggcatacttttatcaatgccgtagacgagtttgagatcaacgagcgcacgattgcgcagctcgtaggacatgttcgcggcagcaccactgcgatgacaacctatcgtaaggatgctgatgtgggcgagcaatttggcgtgatttcgcagcttcactacagtttgcctgatattgcgcagtttgatacgcaagcgggtatcaaggcggtcatcgacgcgcggcgcaggcataaatcgtaa

SEQ ID NO: 35513 - DNA, 333 bp, Escherichia coli
ttgaaaaccgtcgagatactgcaatacaccttacgcaaaggcagcggtgccgcttttcacgccattatgcaggaaatcagtgttcctctacaccaacgccacgggatcgatgtcgtgtcgtttggtaactcgcttcatgattccgattgctactacctgatccgcgcctttgacagccctgaaagcatggctgcgtttctcgatgctttttacgcaagcgcagactggcgcaatggcccacgtgaagacatcgttggcagcatagagaccagtatcaaaacagtgatgaatctgccaccggaaagcgtggaagggctgcgggtgcaatcgtag

SEQ ID NO: 35514 - DNA, 210 bp, Escherichia coli
atggcgacctaccgacaaattgccgatgatgttaaatcccggacggggaaagcagtcaaaacatgctggatcgctcatgttaagtcattgcatggactaacccgcggcgtatcaccgaaccggatcagcgccgaaagccgggtttatccttgccctgatcaatgggctgcggagatcgagcaatcaatgagaaatctgggcgagctttag

SEQ ID NO: 35515 - DNA, 921 bp, Escherichia coli
atgattgctctcaacacagtcaagggaatcattgagatcagcagttggcatgatatcgttgagcgcccgcattttcgctcaaacatcaaccctacaaacgttgaccttaaagagatcatcggtagctaccaatttccagaagatgttccgtgtggactcacaacatgtcatcaaccgcataaacgtggttatatcgtagtgacaaaagaaggttacgaaaccaacatcggaaaagattgtggcaaaaactacttttccgtagatttcgtcgaaatgaagacgcggtttgatcgagatgttaaaacctcactacaacgcgacaatatccgcaaggcaaaagaaacagcaccacaactccttgagcatgtcgagggattacggaaacagcctaaagggggtgattggatatactctcgtattgagaaactccgcaaccgaggtgtaattggtgaggcagcggctaacgaaattcgtaaaatgcttaaggagagacgtaaagagctactctcatctcgtcttgcaacgaaagaagaaagagagcgggatttttccatgaatccgtctttggaggataaatatcgtggccaaccttattacgttaccatcgttacaggctcgattaaccacctcgaagcaatgtctaaagacaatgatctcaaagaactactgatccgtggcgttacacaaacactaaggcaattaatagattgtgatgtcgataatttgaagcctcgtgaacttgcacagctgtccaaagatgcaagcaacattcaagcaaaaattaacatggcccaagagatcataccgcttgcacaaaaattactgacagcttcaaatcttgaaccgcttgtcttttgggtggaagagcatcatggagagcgagcagcggcaccctttaaacgctttattgaacaactctaa

SEQ ID NO: 35516 - DNA, 498 bp, Escherichia coli
atggcgggattagaccttgtattaccgatggcagcgggaaccttgcttggctgggccagttacagcatggtcgctcatataacatcaaaacggcagatcagcacgctacgtgcaattgcatgggggactctgggcactctctcattggtgctgggcgtaagcgcgttttctgctgtaggtgctgagcatcagacagcacgaaaagatatcgtatgtgcagatggcaacccggaatgctatgcgaaaacacatcataacccggtcagggagtgcaagcaggtaatggacaagaaagcgacgtttcgccatgtgtggcaggaaaatgaagcgcagtcggttttcggaacttacttgtggcacgacgagcaaaagagaacgattcaagcatttggacatcaggccaacgccattaacagtctgggaatgctaacaccgcttcaatatttttgcgtttttaacgccaacaccggggaagtcatcgcagcttcgtttgaataa

SEQ ID NO: 35517 - DNA, 960 bp, Escherichia coli
ttggcagcatcacctttaacggcttatattgttggtgatattcagcgttctgttcctgatgaaaaacctactgacccgacaccagaagaaatttgtgaagcgaagccgccagaagaaggtgtatttaataatgttgattcatatgatggtggtcgttatatctactataacggctgtgaatatgaggctactggtgtcattgtttgtcagggtgatggtactgtttgcgctgcaacatggaagcctacaggtactgtagctgacccctctgataaaccctcaaccccccaaaatggtggtggtgagtctggcggtggtgagtctggcggtggtgagtccggtggcggtagttctggcggtggtgagtccggtggcggtagttctggcggtggtgagtccggtggcggtagttctggcggtggctttagtggttccagtctttctaaaggtgatattcagtctgctatcgaaggtgcttcacccaaaatagccagcgatattcatgataaattaacggagaaagacacttcatcagatgataaaaaaaatgccgatgaacaaactaggaataatataaatcgtcttgacgattccattaacaatcttacgcggggggctggccgttttgctgacccttcaggtggtgattctcgttatggaaagggcgactctgaattagatggcgcttctactttggctgattctgaattgggaattgaaaaggattctcacggtgctttatgggaagcatttttaaataaaggtgctatgctgcctaatttacccaatggtaacggctgctctgattttattatttttcccggagaggtttatcagattgatattggttgcgataaattactgactattaaagatgttctttcatgggttttttattgccttacgttctggtatgtctttacttctttaacttcattgcttcgcaaagggggtgagtga

SEQ ID NO: 35518 - DNA, 258 bp, Escherichia coli; identical to SEQ ID NO: 29581

SEQ ID NO: 35519 - DNA, 711 bp, Escherichia coli
atgactgaaaacgaaattcaggaaaccattagagcattcggagatgtcacaaaaagggcgattaaagcaggttttgatggcgttgaacttcatggtgcgcacggattccttctgcagaatttcttctcccctctatttaaccagcgtaatgaccgatggggaggagatcttgaaggacgtatgcgcttcccgctggccgtattacaggaagtaaaaaatgtagtctatgaatatgcgacaaagccctttgctatcggttacagaatatctcctgaagaatctgtaacaggggggctgcggatagaggatacttataaactccttgatcggctcatttcatccggtatttcgtatatacatacctcgctggtcagtattaacgatagctaccctgttgagtcgccaaatggcccccgaactattgaattgattttaaatcatattgcaggcagagtgccggtaatcgccgcaggtaaaatacgcacaccgtctcaggctcaagaagcaatttccgctggcctgccacttgttgcgatcggtaaagggctggtgataaatccagaatgggtgactttagctgaatcaggtagaagtcatgaaattcaaacagcccttaatccacaacgcgttcctgaattaaccattccggataaactatgggatcaaattcaggcatcgaaaggaactggttggtttccgttaatggattaa

SEQ ID NO: 35520 - DNA, 273 bp, Escherichia coli
  misc_feature (260)..(269): n is a, c, g, or t
atggctcctatgacaacctggtcagctaatcctgatggaaccatctctgagcaagaactcgaattttataaacgtcgctcacaaaatgttggtttagtaataacaggatgtacctatgtcacgccaagcggcattgggtttactcatgaatttgccgcgtatgacgaccgtttcattaacagccttgaaaagttagcagctgcagccaaaagtggcggtgctccggctattttgcagattttccacgccggtaataaagnnnnnnnnnngtaa

SEQ ID NO: 35521 - DNA, 132 bp, Escherichia coli
atgaatacgcctggcgtacattccaccgagcgcgccggtatcaacggcaactttcggcacatcaccttcgcccttcagggcactgacgcgaccatctgcagttatccggttagcgcctgcagtgacagttaa

SEQ ID NO: 35522 - DNA, 366 bp, Escherichia coli
atgccagatgtacccagtagttcggtaaggagtgcaggggatgttactgaaaaggtttatttttccataacgttaacccgctgtggtagtgatgttggcaacgcgtatataaagtttaccggcaatacagtttctgaagatgccagtttatataagctggaagatggctcggtagaggggcttgcacttacgatttttgataagaacaaaggcagtattagtaatgatgttaaaagcatgggtttttcacttacatcatcagttgataatatattgcatttttttgcggcttacaaagcattaaaaaataatgtccaaccaggggatgcaaatgcgtcagtatcgtttattgtcacctatgattaa

SEQ ID NO: 35523 - DNA, 276 bp, Escherichia coli; identical to SEQ ID NO: 8395

SEQ ID NO: 35524 - DNA, 234 bp, Escherichia coli
atgcagacgttcgccggtggccctctgtttcaggctgccgttcaggtgatacagattgcagggcaacatcccgaccgactctgccagcactctgacgcaggaaaaaaccgccgtcagtcgcatggcccgctgactgctgatctgctttccggtataggtgtcgtaagacaacccgatggcatccgccagctctgctggcgtggtcaccggcgcgtcactttttcgttgaaataa

SEQ ID NO: 35525 - DNA, 147 bp, Escherichia coli
atgcagtatggggtaaaaaaatataaaaccgggggaatattactctgtgcaggctgtttctatgtttacgacaaaccagtttattctcctttgtcccaaggatattataaggttttatcgggaaagctggaagttcgacctgcttaa

SEQ ID NO: 35526 - DNA, 462 bp, Escherichia coli
atgctgggtgattgtttccctcctgattttaaggctaattttagtcgtgaaagaggtatatcacccggtgatgtattgtatcttcattgtgattttacgaccccacctaaagtaaaatatatggtggttgtttgctgtgaacctcttttagttcttctaataaattcagatataaatgaatttattaagagaaacaatgatcttatggcttgtcaggtcgaaattaatagagaggaccatgattttcttaaatgggactcatttgttaattgcattgaggctcatgctgctttcgatcttgaaattattaaagagaaaatagccatccaatatggcgacgtgctaaaaggtcgcattacagatcattgtatgagacaagttcgatgtgcagttgagatatctaaaatcatggttaaacggcataaaaaactgatactcgctgctcttcaacattatgaataa

SEQ ID NO: 35527 - DNA, 582 bp, Escherichia coli
atgcggttgcatttgccagagcttgacgatgttgtttggatgaagggtgtattgatgctaaatgtaaggtttgattcagaaaaggctttagaggccattctgtacgtcgcctctaaagcaccgatcccagatatctatcatgtcggaaaaattctttattatgctgacaggtttcaccttgaaagttttggacgcctcataacgggcgatcactataacgctatgaaggatgggcctgtagcaagcaacacatacgatattataaaaattgctcgtggagatggacgttacattcctaatggttgtgatgtcgattctgtgcgaaaagcattttctgtatcaggtatgatgattgtgccgagccgtgaagctgatgaagacttttttagtgactcagatttagagtgtattgataagtctatcgcgatgcttggaaacatgtcctttgaagctatcagaaccatgagccatgacgcggcatgggaacaggcagatcacaatggtgagatgtctttggaatcgatagttgcacagctaaaaaatagcaaattaatactggattatctgaagaacggatattga

SEQ ID NO: 35528 - DNA, 981 bp, Escherichia coli; identical to SEQ ID NO: 22103

SEQ ID NO: 35529 - DNA, 996 bp, Escherichia coli
atgggcatgaaaaatcttgagcttcggtacctgacggattattcccctgcggacaaaccgtgggatgagcaccggagtatttccgacgatgtgggtggaatttatctgcgagctgccggatttgaacgttacggcgaacgcgtggcttcctgtagcggtattctgcgcttcgggtggtcaacaaacacggagaccggcgaaacgcgtttgcgattacgtgatgcgcgtttctgtcgggtcaggcactgtccgatttgccagtggaggcgctccctgatgtggcaagcccgtttctatcagtccctgccgaagatcgttgcggaacatcctgatgcccgctggctgttcctgactctgactgtccgcaactgtccggttacagaacttggcgacaccttgaccgcaatgaatgcggccttccagcgtctgaaagatcgcaaagagtttcgcaatgtgctgggctggatacgaactacagaagtgactcgtgacagggatggcaacgcgcatccccattttcacaccttgttaatggttcccccttcgatgttgtccggtcgtgagtacgtgaagcatacccgctgggttgaactgtggcgcaattgcctgcgtgtggagtatgacccgaacgtcgatatcaggacggtaaagccacgtaagccgaaggatggcgaatcgctgccatgtgtggttgcggatgcgttgcgcggtgcagtggcagagacactcaaatattccacgaagcctgccgacatgacggcggatcctggctggtttttggaactgacgcagcaggtctacaaacggcggtttgtggctgcgggtggggcactgaaagacgtgctgaagctggaacgggagacgaacgaggatttgctgatggtcgacgatcctgcagacgggcaggatgacggatctcgtcttgcgttttcatggcgggtggaggctaaaaagtatcgccgcgatcgcacaatggataagccagaacagaaataa

SEQ ID NO: 35530 - DNA, 249 bp, Escherichia coli
atgctgaagtttgccgaacgcccggaccttatcggtttcatccgtggattcatacgccaggaaccctttcggcttcttggtaccatcgccggtggtaaaggcaatttcttcctgttcggcaaattcggttgccagctcgctgttgatccaggcctccacgttgaaaaaggcatcatccagcattttctgggtggcctgcgggttaccgtagatttcccccatgaaaggttcaatcagccccagttttga

SEQ ID NO: 35531 - DNA, 501 bp, Escherichia coli; identical to SEQ ID NO: 11817

SEQ ID NO: 35532 - DNA, 1074 bp, Escherichia coli; identical to SEQ ID NO: 30063

SEQ ID NO: 35533 - DNA, 1380 bp, Escherichia coli; identical to SEQ ID NO: 11788

SEQ ID NO: 35534 - DNA, 288 bp, Escherichia coli; identical to SEQ ID NO: 11880

SEQ ID NO: 35535 - DNA, 225 bp, Escherichia coli; identical to SEQ ID NO: 11866

SEQ ID NO: 35536 - DNA, 405 bp, Escherichia coli; identical to SEQ ID NO: 2569

SEQ ID NO: 35537 - DNA, 375 bp, Escherichia coli
  misc_feature (250)..(259): n is a, c, g, or t
gtgtttaaacttgatacatctaacatccgtccgtgggaagcgactgctgataccctttcacaacagattgatgcctatgtaagtccaatcctcgaaggccgtagtgaagaagatttactcacagagttgatgcttaagcgtggcattgacctgagtgtagacattgaaacccgtcagtttgatggattaaccgtttcttgcgttgacggtggcaaattgtttacctgctttgctaaacaaatccctgcannnnnnnnnnttttcatttgggtgtgtagctatttccttgatgatgcgtttgaaaataacgtcgctaaaacaaatctttgcgccattctggaacaacacggcctgactaacctgcacagcctgtaa

SEQ ID NO: 35538 - DNA, 480 bp, Escherichia coli
  misc_feature (461)..(470): n is a, c, g, or t
atgaaaaaacaaaacttgttaggttgtgcttttattgttgttacatattcctcttatgccgcatcaagtgataacgcaacctttgatcctaattttttaaagatgtctgacggtgaagaagcaagacatttagatttaaagtattttatgcgtccgggcggaatgagccctggtacatacactgtggcaatatttcttaatggggtaaaagttagtactgaggaatctgttgagtttatttcagataaaaaacaggagggggttacatttccattctttaatcagttcattttagctagttggggagtcgatgttgataaatataatatcgaaaaggaacctattgataaaaatatacctggcagcactgcatcgttttctgctaaagataacgcaatttatataaaaatccctcaggcgtcgatgagaaatgaagtttggtttcgggaaccatcagcaannnnnnnnnncatgggatga

SEQ ID NO: 35539 - DNA, 126 bp, Escherichia coli
atgggtgacttagagcgatttgtagagcttgctgaaaggctgggaaaagtggcagggtcacttactagtcttgcattggccatttgtgtgttaattatgatttatttcactttcatttccgcataa

SEQ ID NO: 35540 - DNA, 711 bp, Escherichia coli
atgttatattggaaaaaaatgccatcactctggatcggtaatagactgacagagtttaatagtttagagacttcacatgccattgccgccataaagatatatataactttttgtctctttggaaaagaagaggatgatggagtgcgaaccgtaaaacttacgtttacagaaataagcgaaatagcttctatcagccgatctttggtaaatgaaggtctcaaattgctcgataataaaaaactaattaaatacctatcgcccgcgtcaaaaagaaagaaaatctatacagtggatgttgatgggtgcattcatgacggatggtgtaagctgcctatggcaggcatcgttagcgaagacaggacaatcagcgccttccagtcaatgcataatagataccattttgagcttgtagcgcttcagctatatttataccttctatatgccagagataacttccaggagcatgtgttagctagaaaacaaactatttgcgaaaagcttgcttgccgcaatgtagatttaaataaagcaataacatatttaatacacataggtcttttaaaaggaattaaacaaaaggcagtggagtcttatcccatagaactttttcatgattcattttatttttatgtaaaaacaggagcaagcaatgcgcttacattcaaaaagcaacctcttgttaaccctccagaaaaagaaattccgtactga

SEQ ID NO: 35541 - DNA, 195 bp, Escherichia coli
atgagtgaaaagcagcgccgtgaagggtttcgaaaagcggaagcatcactaagacttgagggaatggatcctagtggagtacctcgttatgaatgtttgaaaacgaggattatctctggcgaaacaagttatgaacaagggcgtaaagaaatattggattactaccttagaataaatcataagggcgaggagtaa

SEQ ID NO: 35542 - DNA, 600 bp, Escherichia coli
atgagactcaagttgacctgttgcatctctaatgatacaaccggtatcaaatgggatattgaaatggtctatagagcaatggataattcacagattggcactccagagtctcatgagcaggataactataatttcgtccaggttagccgcgcgtatctcaaggaatggcgtgcgctgacaaggaaaagccctattgcctctgaaatccttatgtacttgattgagaatatgggcaggacaactaatgctgttgtttgcagctatacgactttgatggagataaccggggtctctagagcatcagtagcaagggcggttaaaatcctgaaggaagatcgatggatgcaggcagtaaaaataggtaatgccacagcatattgtgttaatgccaaagcattttggcaggcaggtagaaatcaaaaaaaatacgcaatcttccaagctaccgtgattgcctcctcctcagagcaagagtctgatttcttagaaaaatcacagcaagatcttcgatatattccttttgtcgatctcaaagaccgccctattgttggcaccgatgaactcccgcctccggatcaaacagatctagatctcgactga

SEQ ID NO: 35543 - DNA, 432 bp, Escherichia coli; identical to SEQ ID NO: 18470

SEQ ID NO: 35544 - DNA, 180 bp, Escherichia coli
atgaatcttatagacgcctggatcgttgaaatcataagcgtgagtcgtggcgagattgtgccgtattggttggttgaggcgaaagtaacagcttatggaagggagtcaataaccacaattctgaagaaatcagaagaggaagccaaagccgttaaagtaggggatgtagttcaaatatga

SEQ ID NO: 35545 - DNA, 531 bp, Escherichia coli
atggggttgtcacgctggaaagtgattgtttgtcttgtgctggccgctgctgctgtttggggttttagccactggcgttacagcgtcggttatggtgatgccgatcagcactggcgtaaagagtgggcgcaacgtgatgcacgcgacgtcgccgcactggcacaaaggcaggctgaggccagggcagaagaacaacgccgacaaggtgaaattgatgcgatcagaaaacaaaccagccagcagcttgctggcgtgcaggctgctgccgatcgtgccagtgctgtttctcgtgggctgcacgccaaagccgacgaactcgccaggcaactggcagaccgtgaacgcgcctgtggtgccggaacttccggcagaagcgaggcaaaagccagcggtgccgcattgcttgccgacctgtttaagcgggctgacgagcgagcgggggaactggcaagagaagctgatgaagcaagagccagaggattagcctgtgaggctgcgtatgatgcggttaagtcaggggggaataagtaa

SEQ ID NO: 35546 - DNA, 432 bp, Escherichia coli
atgagagcttacttcatcccgtctgtgccaacttttatccaggaatcctggaaacatgatggaacttatacagaagaaaactggccctctgatgccatccttctcactgaagaagaaaccaacgcgtactggatgattccaccaccgaaagggcaaaaattaggcgttgtcaaagggaagcctgcgtgggttgatattcctccgccaacacaggaagagctgatccaatacgctgagcgtgagaaaaaacgactaattaatgtggctaacgacttcattaatagtaaacaatggcctggtaaagcggcaatcggacgactgaaaggcaatgaactggtgcaatacaatctgtggcttgattatcttgattcccttgaatcaacagacgcatcaacagcacctgatattgactggcctgagatgccaatatag

SEQ ID NO: 35547 - DNA, 582 bp, Escherichia coli
atgcttattggatatgtgcgcgtatcaacaaatgaccagaacacggctttgcaacgtgatgcgcttgagcggtcaggatgtgagctaatttttgaagataaaatgagcgggagaacagcggaaaggccagggcttaaaaaattactaaagcgcctttctccagaagatacgcttgttgtctggaagctggatcgtcttgggcggagtatgcggaacttggtcattctggtggaggaactaaagcaacgttccgtgaacttccgcagcctgactgacagtattgatacctcaacaccaatggggcgtttcttttttcatgttatgggagcactggcagagatggagagagaattgattgtcgagcgtacgcgtgcaggactggtggccgctcgcgcgcagggaaggatcggcggtagacgtccaaaactaacaccagaacaatgggcgcaggcgggtaggttaatagcggcaggggaatcgcgccggagggttgccataatttatgatgttgggatatctacgctttacaaaaaattcccagcgaccagagataagaattccggcacgcatggccggttataa

SEQ ID NO: 35548 - DNA, 3171 bp, Escherichia coli
atggcagaccgcaatttaaatatcagggtggcattcagcgccctgaataatatgtcccgccctgtcaacgcggcgcgccagagtgccgccgcgctggcgtctcaaatcaaccagaccaaaaccagtattaaagggcttgagcgtcaggcaaccagctttgaccgcctcaccacagccaataaaaaaaccaccgaacaactggcccaggcgaaagaacaggcccggcaaatggcggcggcttatggcccgttacgccagcgcagcgccgaacaagttgccgccctcaatcagcaacgtgcagccattcgccagttaacccagcagcagaaaggcgagcagacgcagcttaaccagttgcgcgccagcttctacagcgaaggcattgcgatcagcagcgccagccgggcgacggaacagatcaaccagcgcaccgcgcaatataaccgccagcttgccgaacagcagcgacggcttgacgctgttaaccaggcgcaggcccgttacagccgtgccaaagaaaccggcgaaaagatgatgagcggggggatgaaaaccgccgcagtaggggcggcaaccctcgcacctatcgccgctgcggtgaaatcctacagcaaccttgaagacgcgatgaagggcgtagccaaacaggtaaatggcttgcgtgacgacagcggcaaccgcaccccgcagtatgaagaaatgcagcgggcgatcatggatgccagcgaaaagcttccaatggcaaacggtgctgttgactatgccgcactggtcgaaggcggcgcacgtatgggcgtagcaaacagcgatgatccgtgggaaaaacaaaaagccgatctgctgtctttcgccagcatggcggcaaaggcttctgttgcctttgaacttcccgccgaccagctttctgaaagtctcggcaagattgccgggctgtataaaatccctacccaaaacattgaacagttaggcgacgccataaactacctggacgataacgcgaagtcgaaaggctccgatattatcgacgtgctccagcgcgttggcggacttgccagccaactggattacaagcaagccgccgcgctgggttccacctttctgacgcttggatcacctgccgaagttgccgctagcgcaaccaatgcaatggtgcgcgaactatcgatcgccacagtacaaagcgataaatttttgggtgcgctggatgaaatcggcgtcaatgctgaaaaagtccagaaaagcatgtcagtggacgcgatgggcacgatcatttcagtgctggaagcgtccaaaaaacttgcaccagataagcaggtagccaaccttactcagattttcggtaaagagttcggcgatgatgcgcagaaacttgcgaacaacctgcccgaactacgccgccagatagaactgacgcagggcgcagccgctaaaggttccatgaatcgggaatctgatatcaataaagcttccctttctgctcaatggcaactgaccaaaaccggcgcggttaacgcattcagttcagcaggggaaacgctccgcgaaccgctgatggatatcatgcttaccgtcagtaaggtggttggcagcgtccgccgttgggttgaggcaaacccggcgctggttggttcaatcatgaaagtcaccgcagccataggcgcgttgctggttgtcgtgggtggcctgatgctgtccatcggcgcagtgctcggcccgatggcacttgttcgcctcagcttcaccacgctggctggctccggtggggtaactcccctcataggttcgctgggaaaattatccaacacattacgcgggctgatcccctcactatctggcgtgggccgaagtattaaagactggcctgccctcttccgatctgctgcatctggcattacccaatttagcaaacaagctattggcgggttaaacacagcgttaatggcactttcacgcggtgctgttgctgccggacaggggctatttaccctattcacaaggcctatgacggctataacctggcttggtaatggcctcagaactctggcaacctccggtttcggcgctttgctgaacgttggacgcaccgtaatgatggcgttgggtggcgggttatcattacttcttagccctattggaatactggtaatcgctttatcagcagcagcgattgccgttattaaattctgggaacctataaaagcctttttcactggcttttacaccgggttaatgagtggcttacagcctttaaccgcagcatttagtacagcctttgcaccactagccccactctttgactctatcggtaatgctgtcggtggcgtctgggagtggttcacaaaactattcgaacctatccagttctccagcgaagcgctggcctcctgcaccagtgccggggaaacattcggtaaggttgtcggtaacgctctatctgcattaacaccaataatcgaaggaatagcgcgcggtataggatgggtactggaaaaactcggcgccatccccgacgcaacaaaagcagcgcagcaagctgcggaaagtatgcacaaagaccctgttgtctgggagtgggatccgcagcaaaagaaaatggttaaaaagggttggaactggtcgccgaaggacgatcagcagaagaaaaccaaccagaagcaacagcaggccattgaccagcagaaaaagcaggaaagcttaattaattcgctcaagggcccggccaacatcgtgccgaagatgagcagcagcctggacaagatcgccaccaataccacggagaagaaagacggccccggcgaaatcgtcttcaagaataagcagccctatatcccgatccggggcggatattcggaaccgcttaagcaggcgcagcgccagctaccatcccttacggattgggtgacgcagcaggccggatctctgatcgcttccgttacgccgtggcaggttgagaagcccgccgcacgggtgcccgtttcggcgtcgccgtctgcggccaccgtcgctgcgcttatgcctgcgccgggtggcgatgtatataaccttaacttcgactttagcggccagaaactgaatgaagaaaccattatcaggcgcgtgcgcgaagaacttgcgttagcgaagcagcaggccgaccggcgcaagcgctcccaactgaccgatcacgtctaa

SEQ ID NO: 35549 - DNA, 333 bp, Escherichia coli
atggcattagtaaactgcccggaatgcagtaaagaaattagtgattcagcgtttaaatgcccgtcttgcggccatcaggtcagaaagccgaagcgctcattttttggcaagatcgttaagtggatatttatcctgtttaacatctttatgatctattgcatttttgccggggctggcggcagtagtgacgttatcaataacgcagcctcagacgcagaacgggccggagccgcaattggtacggggctggggatgatgatgctgggaaccatctgggttattggcgatatcattatcggaatgtttgttttctttactcgcccgaaatcatga

SEQ ID NO: 35550 - DNA, 633 bp, Escherichia coli
atgaaaaagataatcattgctatggcgctttgctcttctgctttatcaacagcgtatgcagtagaaccagttaaaaccgatattaacaatgacgcattaatgaaatgccaatccgaggcaaaaagtgatgcgcgtttagcttgttacgataaggttcttccaccgaaagtagccgaagaggctaagccagtagtaggtgttggaaaatggcaggtatccacgaaaacttcacccgtggatgattcagagaacgtttatgttagcctttctgctaatgattctttccggtcgcagtttggggagtcgatcactccaagtctttacatcacttgccgcgagaaaaaaacagaacttttcctcaattgggatacctatcttgggttgaacgaaacacagatgttatctcgcttggataaacagaaggcaaaaacgaaaacatgggacatatctagcgataccaaatcggtattttatcgtggcaatgtcatcgagttcgtcaaggcgctgagccaggctaactcaatgtttactcagatcacgccttacaatgaaagtcccgtgagtgcgacatttgatattgctggtctgtcagaggcattgaagccacttcaaaaagcgtgtggatggaagtaa

SEQ ID NO: 35551 - DNA, 240 bp, Escherichia coli
atgatgtccgcattagtaactgacagatgcctttatcaacaagatgttgtcgattacctgataaagacaggtaatgagcagcacctgaaagaaaatgcagatggcaaccaagtactttcaaccaaagttataaatgcatttagagttgatagtggcaatgatgtcgtttgggttaagccagacaagtactggcgtttccgtgtgcctgaagacgaaaacggtcgtgaagctcgcggttaa

SEQ ID NO: 35552 - DNA, 213 bp, Escherichia coli
atgagcaaatcttcaactgtaagaaaagcgttatttaaaattggcgattccgtatatttgaaatcaggcggtcctgagatgtctgtatacgaaatccacgaatacggaggttcttttactggaacatacacatgccaatggtttgcagggaaaaaacttgagaaaggacactttgctgaagagtctttaacggacacaaacccaaagccataa

SEQ ID NO: 35553 - DNA, 237 bp, Escherichia coli
gtgataaaacgtaatttgccactgatgatcaccatcggcgtctttgtgttgggttatatctactgtctgacccagtttcccggttttgcttccacaagagtgatctgcaatatcctgaccgataatgcctttcttgggataatcgccgttggcatgacctttgtgatcctctccggtgggatcgatctctccgtcggttcggtgatcgcctttaccggcgtgtttctggcaaagtga

SEQ ID NO: 35554 - DNA, 537 bp, Escherichia coli
ttggcgggcttcaccaaccgcaaggacaagcacaccacccgcgccggttatcagccgtgggtgctgctgcgtgaatccaagggcaagaccgccaccgctggcccggcgctggtgcagcaggctggccagcagatcgagcaggcccagcggcagcaggagaaggcccgcaggctggccagcctcgaactgcccgagcggcagcttagccgccaccggcgcacggcgctggacgagtaccgcagcgagatggccgggctggtcaagcgcttcggtgatgacctcagcaagtgcgactttatcgccgcgcagaagctggccagccggggccgcagtgccgaggaaatcggcaaggccatggccgaggccagcccagcgctggcagagcgcaagcccggccacgaagcggattacatcgagcgcaccgtcagcaaggtcatgggtctgcccagcgtccagcttgcgcgggccgagctggcacgggcaccggcaccccgccagcgaggcatggacaggggcgggccagatttcagcatgtag

SEQ ID NO: 35555 - DNA, 1227 bp, Escherichia coli
atgattgataatgaagttaaaatttttgcaaaagaaaaagaaaaaatgctgtgcagcaaactttctttttacagggagcatgctcaatcgagtgaagatacaagaaaaagaaacgaatttgaacgagactatgcgcgtattctttattcctcttcgttccgccggttacagggaaaaatgcagctctttgaagtcgatcctcaaaaatttaaccgtaatagactgactcatagcctagaagttgcccagatagcccgaagcatcgcatccgaactagaacttgaacatcctgttgtagcagaactggctgcacttgctcacgatattggcaaccctccgtttggtcattccggtgaaaaaaagctaaacgatattgctaatgatttcggcggctacgaaggcaatgcgcaggcacttagaatactcagaagtctcgagataaagcatccaaattgccccggtctcaaccttacccaccgtgccattctctccgtcgttaaatatccttataaaaaggaaaacggcagaaaaaaatatctttataatgatgactataaatactacacagaattggtaaatagatatgaattagatttgcagactggcgagaagaccattgatgcacagataatggatctgtcagacgaaattgcatatgccgcgcatgaccttgaagatgcactaagccgtagcatggtcagtattgaagatattttttatgagtttgggatatccaagtacaaagactcaattgatttattaaatacaatcattgaaaaatctaaatatacagcttcgagagcatcaagactcaattcatctgaagagttcgccataatattcagaaaggaattgacatccaatattgttaatgcgcttgttaatgatattactgttattcaaagtgaaaatggattcaagcaacttggatttagcactacaaaaaatctgtctgcaggccttaaagatatcgtatttaaagtcatcatgcgaaaaagagatattaaaagttatgagcacaaaggaaacattatcatcgaagatttatttaatttttataatgatagagataacatagaattcatatcccctcaattgtatagaacgctcccaaataaaatagagcctatttatcaagaacttaaaaaacgtgcaattgtcgactacatctctggaatgatggatacatttgccatccgcgagtgggaaacgcatcacaaaaaataa

SEQ ID NO: 35556 - DNA, 261 bp, Escherichia coli
atgggatacaccagaaatcagcacatgctctcacagtggtttctcaggaacttccgcagtgatgatacggcacagagtccgaaggagaagcaacgggtctgggcccacgttgtggttcctacggcagaaggcaaaaatgacataaaggacatcccgctaccgatatccagcgtggccgtctgtaaggactgctttcgtcttaccgacggtgacacaggcgaggtttttgatatcgagcatgagctcagtgattatgaatag

SEQ ID NO: 35557 - DNA, 633 bp, Escherichia coli
gtgcaaaaaaatgaagacagcccgtcagctatagcggttgggcagcgtaaagaaggggaaatctacacagcggatctcaaaagtaaggcgcttgcattcgcgatggcacacgcacttaagctcggtgataaaatgatttcaatcaatctattacctatgaccctggttaacgagcctgacgcagtctcttttttacttgatgaaataaaggccaatgctctggtgcctgaacaaatcatcgttgaatttactgaaagtgaagtcatatctcggtttgatgagtttgccgaagcggttaaatcgctaaaggctgccggtatcagtgtagcaattgatcattttggcgcaggttttgctggtttgttactcctgtcacgcttccagcctgacagaattaaaatcagtcaggaattgattaccaatgttcataagagcggaccacggcaggcaattattcaggcgatcatgaaatgctgtacatcacttgaaattcaagtctctgctatgggcgtggcaacaccagaagagtggatgtggcttgaatctgcaggaattgagatgtttcagggagatctgttttccaaagctaaattgaatggtatcccttcagttgcgtggccggagaaaaaatag

SEQ ID NO: 35558 - DNA, 918 bp, Escherichia coli
atgggttaccgttatataggttcaaaagtaaaagttattgataacgttattggaaaaatttctgaattatgcccctcaaaaggtcgggttgctgatcttatgtcaggcacaggtgtgatttcaacagaattgagaaaacgcgattacaaagtaaccgccaatgatctaatgacttattcatatcatcattctatcgttaacctaaaattctctagcgcacctaattttgagaagttaatagcttattttagtccagaaaacgctagaaaactagatggcattagagaagtcataaacaatttatcttgtgataatattctgactgatttggaaagaagtttattgctacatgatttaataatggcggctaatgatatcgctaatattgctggtacatatggacattacatgtccaggctaaatggcagggctttgactcagttaaatcttaaatgcacagatttattacttaaatctgatgttgaaaatcacatcgtaatgcaaggttatgcagaggagaatgcaagcaagattcaatgcgacctatgttatattgatcctccatatatgaaaagacaatatgcagccaattatcatatattagaaacgttagcccgtggagatgaaccagaggctataggtattagtggattaagaccttggcgagaccagtattctaatttttgtacgaaaactaaaattagagattcatttaaggaaattattacaaacatgggatgtaatgaatttcttataagttatagtgaagatggattacttacaatagaagattttaataaattactagctgattttggtgatgttaaaatagaggcgttcacccataaaagatttagaagtaataaaagtgaattacaaaatgaacttacagagtacttaatacatcttcaccgttga

SEQ ID NO: 35559 - DNA, 1290 bp, Escherichia coli
atggcaatagggcctcttgttgttggctttactcagtggttgtatcggcgggttaataaattaggtatcaaaaaattatatttcttatcccgcgatggatggattcttaaaaaaacattcgattatttttatcctgaatcatcatctggcatcaagaccgaatacctgtacagctctcgtcgaactgcaatggtagcatcgttaagaaaggatgtggatactgttaaaaaatctgttcttgaaaaatataattacaagcatgacactattgtttctccttattttgaatttggaaagctgattggttttttaaaagatattcatcatacaatattgtctaatgcaaaaaatgaacgtgaaagctatatcgattatttacgagaaactggatttgaaaatgattgcttaaatggcggtgctactgttgttgatattggttacagtggttccatgcaatattatttaaaaaaaatactgcaatgcccttgtgtgaacggattttattttttaacacatcaccatagtcgtgattatttttcaaatgatcattttgaaggtttcttgcaaaatcttgatgatcataagatcgcttatagacatggattaaatgatcatgtgtttatttttgaagcagcattaagttcccctgaaggaagtctgattaaaatggaagggaaaggtcaagaaagagaaatgatttttctcgaggcagaagaagagattgtaagaaaaaatgctctattaggaacacatcgtggcgtaatggactttgttcatgatatcaaaactcgttttggttcttactttaaatacattgaattttctcctattctttcttctcaacttattttgaattttgcgaataatcccaacggtatagatgcagggatgtttgcttctcatgaagtcgaaaatgtttttggtggggggtctgtatgcttaatttcgcctttactagattgctataaggactctaatggcaccattaaccctaaaattatcgatgagttattaaaagcatctaaatggaagagaggtgccagtgcttattataacttagtcaatggaactcaaccgcgagttaatcctgctaaaatgccagcgccatctgttaacccagttgttgtgaagcaaacgccacaaactacttatgcacatcctttaaagacaactacgcagcgtaaacttgctaagttaaaaaaagacccatatttattctttaatgattcccaaaaacctcttttaaaaagtttacgattgttcttcaaaaatacatcaaagcttaattaa

SEQ ID NO: 35560 - DNA, 342 bp, Escherichia coli
atgagtgaagctcttaaggcactgaacaatattcgtacacttcgcgcacaggctcgtgaaacagatctggcaactctggaagagatgctggaaaaactcaccacaatcgttgaagatcgccgtgaggaagaaaattcagcccgtaaagaacaagaagaacgtcaggctaaacttgaagcctcccagcctaaaaccaaatcaactcgtgctcctcgtcctgctaaatacaaatatacagatgagaacggtaatgagcagacttggacgggtcagggccgtactcctaaagcaatcgccgctgctatcgaagctggtaagacactggaagactttgctatctaa

SEQ ID NO: 35561 - DNA, 396 bp, Escherichia coli
atgaagctgatcctgccttttccgcccagcgtgaacacgtactggcgacaccccaacaaaggggcgtttgctggtaagagcctgataagcgcggcggggcgaaaattccagagcgcggcgtgtgcagcaatagttgagcagttacgtcgtctgccgaaaccaacgtcggcacctgcttcagtggagatcgtgttgtttcctccggataaccggatccgcgatctggacaactataacaaggcgctgtttgacgccctgacccacgcgggggtgtgggaagacgacagtcaggtgaaaagaatgctggtggagtggggaccggttatcccggaggggaaggtcgagatcactatcagtaagtacgaaaaagcgagttgcaaattagcaactcggtaa

SEQ ID NO: 35562 - DNA, 654 bp, Escherichia coli
atgagtaataaatattgccgggcgctggtggaactgcggaacaaaccagcccatgaactgaaggacgtgggcgatcagtggcgcacgccggataacattttctggggaattaacaccctgtttggtccgtttgttctggatctgttcactgacggtgataacgccaaatgtgccgcgtattacacggcggaagataacgcgctggcgcatgactggtcagaacgtcttgcggagcttaaaggtgctgcctttggtaatcccccatacagccgcgccagtcagcatgaggggcaatacatcaccggcatgcgttacatcatgaaacatgccagtgccatgcgtgataagggcgggcgctatgttttcctgatcaaagctgccaccagcgaagtgtggtggccggaagatgcggaccatattgcttttattcgcgggcgtattggttttgaactgcctgcctggtttatcccgaaggatgagaagcaggtgccgacaggcgctttcttcgctggtgctattgctgttttcgacaagacctggaagggaccggcaatcagctacatcgggcgcgatgaacttgaggcatgtggtgaggtgtttctggcgcaggttcgccagcaggcggaaaaactggtcagggagatggcggcatga

SEQ ID NO: 35563 - DNA, 423 bp, Escherichia coli
atgttcctgaaaaccgaatcatttgaacataacggtgtgaccgtcacgctttctgaactgtcagccctgcagcgtattgagcatctcgccctgatgaaacagcaggcagaacaggcggagtcagacagcaaccggcaggttactgtggaagacgccatcagaaccggtgcttttgtggtggcgatgtccctgtggcataaccatccgcagaagacaaagcagccttccatgaatgaagccgttaaacagattgagcaggaagtgcttaccacctggcccgcggaggcaatttctcatgctgaaaacgtggtgtaccggctgtccggtatgtatgggtttgtggtgaatgatgcccctgaccaggcagaggactccgggcctgcagagcctgtttctgcgggaaagtgttcgacggtgagctga

SEQ ID NO: 35564 - DNA, 315 bp, Escherichia coli
gtgaagctgtctgatatatcgtctaatctgaacaggttcagtcgcggactgggatatgcaggaaaaattacaaattttgctgactggatcactgagtttggtaaggctgcccggacagataactggcgtcctttttttgttaaaacagaaaccatcatagcaggtaatgccgcaacggctcttgttgctctggtcttcagtattcttaccggaagcgcgttaggcattatcgggtatggtttactgatggctgtcaccggtgctctgattgatgaaacgcttgtggaaaaagcgaataagctctggggcatttaa

SEQ ID NO: 35565 - DNA, 720 bp, Escherichia coli; identical to SEQ ID NO: 29951

SEQ ID NO: 35566 - DNA, 915 bp, Escherichia coli
atgtacaaacaagctgttattctcctgctgatgctgtttaccgcaagtgtcagtgccgcgttacctgcccgttatatgcaaaccatcgaaaatgctgcggtctgggcgcaaattggcgacaagatggtgaccgtggggaatattcgggccgggcaaatcattgccgtggagcccactgccgcaagttattacgcatttaattttggctttggtaaagggtttatcgataaagggcatcttgagccggttcaggggcgacaaaaagttgaagatggtttgggtgacctcaacaagccgctgagtaatcagaacttaataacctggaaagatacgccggtctacaacgcgccgagtgcgggcagtgcgccgtttggggtactggcggacaatttgcgctacccaattttgcataaactgaaagacaggttaaatcaaacctggtatcagatccgtattggcgatcgactggcctatatcagcgcgctggatgcccaacccgataatggcctgccggtgctaacctatcaccatattctgcgcgacgaagaaaacacccgttttcgccatacttcgacgaccacctcggtacgcgctttcaataaccagatggcctggctgcgcgacaggggatacgcgacactgagcatggcgcagctggaaggttacgtgaagaataagatcaatctccctgcgcgagcagtggtgattacctttgatgatggcctcaagtcggtgagccgctatgcgtatcctgtgaaccgccccgggtttcctggagagtgttttatctgtgaactcaggctgccagatcatcgtttccgatggaagcataataagctttttctgcttctgccggaggagtatggcccagcctttccagcaatcgtcgattgttataccagtccacccacgtga

SEQ ID NO: 35567 - DNA, 372 bp, Escherichia coli; identical to SEQ ID NO: 11381

SEQ ID NO: 35568 - DNA, 519 bp, Escherichia coli
gtggcagaacgacctgaccagctgtgggtggctgattttacttacgtcagcacatggcggggcttcgtctatgtggcgttcatcattgatgtgtttgccggatacatcgtggggtggcgggtctcatcgtccatggaaacgacattcgtgctggatgcactggagcaggcgttatgggcccgtcgaccgtccggcacggtccatcacagtgataaaggttctcagtatgtatcgctggcctacacacagcggcttaaggaagccggattactggcatcagcaggaagtacaggcgactcgtatgacaacgcgatggcggagagcatcaatggtctttacaaagcggaggtaatacaccgtaagagctggaaaaaccgtgcagaagtggaactggccacactcacgtgggtggactggtataacaatcgacgattgctggaaaggctgggccatactcctccggcagaagcagaaaaagcttattatgcttccatcggaaacgatgatctggcagcctga

SEQ ID NO: 35569 - DNA, 585 bp, Escherichia coli
atgttacgtcctgtagaaaccccaacccgtgaaatcaaaaaactcgacggcctgtgggcattcagtctggatcgcgaaaactgtggaattgatcagcgttggtgggaaagcgcgttacaagaaagccgggcaattgctgtgccgggcagttttaacgatcagttcgccgatgcagatattcgtaattatgtgggcaacgtctggtatcagcgcgaagtctttataccgaaaggttgggcaggccagcgtatcgtgctgcgtttcgatgcggtcactcattacggcaaagtgtgggtaaataatcaggaagtgatggagcatcagggcggctatacgccatttgaagccgatgtcacgccgtatgttattgccgggaaaagtgtacgtatcaccgtttgtgtgaacaacgaactgaactggcagactatcccgccgggaatggtgattaccgacgaaaacggcaaaaaaaagcagtcttacttccatgatttctttaactatgccgggatccatcgcagcgtaatgctctacaccacgccgaacacctgggtggacgatatcaccgtggtgacgcatgtcgcgtaa

SEQ ID NO: 35570 - DNA, 201 bp, Escherichia coli
atgctgatggaaaaccagagttatctggatttcgtccagcctgtcgccgacgaactgcaggccaggcttacccccgatgcgggcatgctccgcataatcgacgccgaacgtggcctcgaagccgtcccagtaggtaatcagctcaaactcaatatcacccagtacggcaaacatcagcggtactccttacgttgtttctga

SEQ ID NO: 35571 - DNA, 390 bp, Escherichia coli
gtgctggtggcttcaccacaaattgcagatgtctattttactgagccgggaagacataacgcctgtagttttattatcaatgaaccgcaatgtgtcttccgccagatatttgagagcacgctgcgccagcgacggatcacggtggaaaacaccattgagcttataagtatcgaaagcatcaagcgttgtgtcgcggcaaatatcggggtcagttacctgccgcgctttacagtggcaaatgaacttgcgagtggcgaattaatcgaattgccttttggcgaacagtcgcagaccattacggcaatgtgcgctcaccatgccagaaaagcggttagcccggcgatgcacatttttattcagtgtgttgaagagtgttttttgccgggataa

SEQ ID NO: 35572 - DNA, 957 bp, Escherichia coli
atgtatcttatcgaagaagcgctaacgtcttggttgttgaatgaatataaaaaaccagtcataaccaaagaagaaatctctttgcagatttaccttttttatttaaaaaaagaatataatggtgagaggatatatcaaattagaaagaacaaagcaggacctaatgaatttgaaaaaaatatattaaaattattaaagtcaggggttttatcaagagttgaaagtaacgataagcatcatgcttacccccatttaattggcggtttctatgaggtcttttttgttaaaggtaacgatggttctccggaaaatgatatagtgtgctctacgtatccatatggatacttatcctatttatccgctatggattggcataacatcacagataaaatacccaagataatccactttacgacatgtcgttccgaacagtggaagaataagttctatcatgattttcaaaaggataatcctgatatagacgaagccaaacaattcatgcctagatttccaagaaattctgaggtcaatggaataaaaattatcgttacacaagaaacaaattatgttgagccaatgaaggctcgtaattcccctgtcagggtatcatctatcggtaagacctttatggatatgaccaggcggcctgattactgtggtggtgaggagcatgtattggaatcatttattgagcacggtaaaaaatatgcacctctgattataaaggaagtcgataagcttggccgtcatattgacaaggtaagggttggattcattttggatagaattattggggttaataataaaaaaataagcgaatggaaacaagaggcgggtaaatacagaggtagttcgaaagtgctatctccaaagagtccattctcaccttactttgatgaagaatggtttatttctattaatgttgatatggttaagtcttatggaaaaagaaattaa

SEQ ID NO: 35573 - DNA, 753 bp, Escherichia coli
atgatggttatgaagggagggactcttcttggtgttaagcatggtagtgatagatacacaaaggatattgatttttctaccgaaaaaaaactttctgaaattgacttgggggattttttcaataggtttaatgactcaatggatgttgctgaggctgaattgggatatggtattaaatgtaaagttcaatctcataaaattcaacctaatgcacaaggaacatttccaactgtacagataaatatagccttttgcgatcgttctaatgcgtctgcaatgaaaaggcttgaatctaatcaatcaccttcagtgataaatatcgattttagctttaacgaaaaaacgtatgattttgactttttatcattagatggtgatgatgacaatgatagcgtaaagacctacagcttaactgatttgatggctgaaaaatatcgatccgttttgcaacaaaaagttagagagagaaatcgagagcaagatatatatgatatcaattatcttttaggtaaatatgagttttctcggcaagataagtataaaatactggagtctcttttaaaaaagagtgaaggtaaacaattggataatctcttaaacgttaaaggtataagggatgtagaaattatcgagcgttccagtcagcgatatcaggatttatcatccaccgttaaatcattacctctttttgaagatgcttatgaaaaagttgcctgtttctatgaaagtcttccgtgggatatattcaaatga

SEQ ID NO: 35574 - DNA, 654 bp, Escherichia coli
atgatagcgttcagttttagtgatattggtaacagatgtgaaaacttagacttattatctacgataaattgtcaaaatgatgtgtttggaatggttattatggatgggtattcctgctctgagtggaatatgaaaattctctctggtaggttagataagtgcgtgttttctggtgatctgaataaagatattattgaaccatgcaagtcagttcctgttaaggctgcagtatgtttcctttttaaaaataatacgcacctccatatatataacgcaggagattgccgtgtatataacaaaagtggagtccttctaacagaggataactcggttgcctggaaaagattaaaggaaaatggaatcgataataaaaaaatacctcacctcgtttgttattgcccagacagaaattatctaacatcatttgttgatttctgctctgatgagataattttcaatcattcagtttttgatttaaatgatgaaaacaaagaggttattttatgtactgatgggttttgggagcattttaatgatggtactgttattgacctcatgaaagataacccagaatctaacttggctaaatttactaaaaatatcccgggtaacgcagagaatcatacggtttgctacgttagattcccttcttga

SEQ ID NO: 35575 - DNA, 558 bp, Escherichia coli
atgaaattcatcgtaaaagcacttatctgttttgctgcgttgtgcgtgactacagcttatgcattcgataataaagaattttcacgtggtgaaataaaatatagcgattatcttcctggtaatggctggacgttaccggagggttacacgcaagagcggtttattagctctatttataaatcgcataagcttaacgatttcccctggacgatgacctttcaggtccgtggccggggtgtggttttcatggctaacaagatttataaaacctggcatgttcttcccctggattacgaaaatctaaatttcggtagtatactaacagactaccatatgttcgataaaggcgaaggttgcttcgtttacattatcgacggttacggtaatggtgaaatgggggccggcggaaagccgatttacaagatccttgaaaagtgtgctgatatgaaaatgctgaataaaatgattgctgagaaaaaggaacgtgaacggaaagcaaatcagtggttgcagcagcagattcttgcagaacattgccgtcgccacggtaactgctaa

SEQ ID NO: 35576 - DNA, 222 bp, Escherichia coli; identical to SEQ ID NO: 17691

SEQ ID NO: 35577 - DNA, 405 bp, Escherichia coli
atgagcagaaatctcgcagagtgtttcagtattcataatgataatttcagtgagctggaatgggagtgtaaccggtcatcctttgttgtatccggtgatgctgggaaaataaccatctcagaaaatgggaaagtaacacctccatcgcaccagcacagtgaggagctcattgaatttgccattgattacctgaagaacaataaaaagcaggggctgatgaagcgcgttggccgttgcatgggatatctgcaggtagctgctgagattgaagcgctggccagtggtgctgataaggatgcaattgtgcgggaggctcttcttcgtgattttaatactccaccctttaaaaaagtgccggcttactggcttcatccggggctgacttatcttaaagtgcgtatttag

SEQ ID NO: 35578 - DNA, 216 bp, Escherichia coli
atgtaccagatggaaaaaatcacaacaggtgtgtcatacaccacgtcagcggtgggaacgggctactggttcctgcagttgctggacagggtttccccgtctcagtgggcggcaataggcgtgctggggagtctgctgtttgggctgctgacgtacctgactaacctgtatttcaaaatcagagaggaccggcgtaaggcggcgcggggagagtaa

SEQ ID NO: 35579 - DNA, 405 bp, Escherichia coli
atgagcagaaatctcgcagagtgtttcagtattcataatgataatttcagtgagctggaatgggagtgtaaccggccatcctttgttgtatccggtgatgctgggaaaataaccatctcagaaaatgggaaagtaacacctccatcgcaccagcacagtgaggagctcattgaatttgccattgattacctgaagaacaataaaaagcaggggctgatgaagcgcgttggccgttgcatgggatatctgcaggtagctgctgagattgaagcgctggccagtggtgctgataaggatgcaattgtgcgggaggctcttcttcgtgattttaatactccaccctttaaaaaagtgccggcttactggcttcatccggggctgacttatcttaaagtgcgtatttag

SEQ ID NO: 35580 - DNA, 552 bp, Escherichia coli
atggcagggaaagcgcatgggaatggcgatcgtcggggcgataacaccatatgtggattgggggatcgtttacgtcgtctgaccgcaggtatttgcctgataacacaaactattttccctgttatggctgctgccccgacgcatattaatcctgcgcactcggatactgccgcgtcactgatcctgccgaacgttaaaactattccatataccctgggtgcgttggaatcgccaccaacggtcgcggcacgctttggtatcaccgttgatgaattacgtcgcctgaatcagttccgtacctttgcgcggggctttgaccatgtgcgtcagggcgatgaaatagatgtgcccctcattaacagtaacagccctgaagcgcgcaacctgaaagcaatgcagatggagcgcgatggcaaagatccgcaaatgcaggtcgcggaagtggcgcagcaaagcggaacacttttagcacgcgatatggacagcgaacaggcggcgagtatggcgcgtggctgggtggcttcttctgcatctgcgcaggcaacggactga

SEQ ID NO: 35581 - DNA, 468 bp, Escherichia coli; identical to SEQ ID NO: 28815

SEQ ID NO: 35582 - DNA, 381 bp, Escherichia coli
atgctgggagcggtggaacgccgcttcggcaacgagcttccggcgtctccagtagagtggctgacggataatggttcatgctaccgggctaatgaaacacggcagtttgcccggatgttggggcttgaaccgaagagcacggcggtgcggagtccggagagtaacggcatagcagagagcttcgtgaaaacgataaagcgtgactacatcagtgtcatgcccaaaccagacgggttaacggcagcaaagaaccttgcagaggcgttcgagcattataacgaatggcatccgcatagtgcactgggttatcgctcgccacgggaatatctacggcagcaagccagtaatgggttaagtgataacaggtgtctggaaatatag

SEQ ID NO: 35583 - DNA, 660 bp, Escherichia coli
atgaacaagctccaacgcgaggccgtgatccgaaccgcgctcgaactgcttaacgacgtgggcatggaaggtctaacgacgcgccgactggctgagcgcctcggggtgcaacagccagcgctctactggcatttcaagaacaagcgtgcgttgctcgacgcacttgccgaagccatgctgacgataaatcacacgcattcgacgccaagggatgacgacgactggcgttcgttcctgaagggcaatgcatgcagttttcgacgggcgttgctcgcttatcgcgatggcgcgcgtattcatgccgggacgcggccagccgcgccgcagatggaaaaagccgacgcgcagcttcgcttcctttgcgatgctggcttttcggcaggtgacgcgacctatgcgttgatggcaatcagctacttcaccgtcggcgctgttcttgagcagcaagctagcgaggcagacgccgaggagcggggcgaagatcagttgaccacctcagcgtctacgatgccggcgcgcctacagagcgcgatgaaaatcgtctacgaaggcggtccggacgcggcattcgagcgaggcctggctctcatcatcggcggtcttgaaaaaatgaggctcactacgaacgacattgaggtgctgaagaatgttgacgaatga

SEQ ID NO: 35584 - DNA, 315 bp, Escherichia coli
atgttgacgaatgacagggggcggcaggtgcggagggcgcggttgcttcgtcatatgaagcaaagtcacctagctgaattaatgggtgtggatcaggcaaccgtgtcgcgctgggagcggggcacccttgcattgtcggatgggaggtggtcagcggttcttcaattgcttaccgggccttccgattcatcgtacgacgctgcgctgaagcgtctggtgcaatcctccgcccacaaagtccatctggtagcgaccggacacattgtttgctcgcggcatctccggccaggcaaagggaattgcggattgacctag

SEQ ID NO: 35585 - DNA, 192 bp, Escherichia coli
atgaatatcaacacagaaacccgcgaaattctgcgtaattacagggccgtgattaatgcgcggcgtcgtgaaatggggcagaaaccgctcaccaccgcgcagattgttgatgaaatctgcgattttgtggcgaatcagcaggcggttttcctgggcggtcactacatcttacagggcagcagaaacaggtga

SEQ ID NO: 35586 - DNA, 207 bp, Escherichia coli; identical to SEQ ID NO: 28945

SEQ ID NO: 35587 - DNA, 528 bp, Escherichia coli; identical to SEQ ID NO: 15509

SEQ ID NO: 35588 - DNA, 234 bp, Escherichia coli
atgacagcgcttcccggacatgccgccagtcccctgatgacccgcctgcaggacgggctgcgcacggagtctgtccgctctcaggcccgtgaacagtttaccggtgcggtggaccggatatttgacacagcggagagcgtctgtgttgcctctgttgttcgtacggccctgcgcgctgttcgtgacaccgtggtctctgttgcccgcgcggtatggaactggattttcttctga

SEQ ID NO: 35589 - DNA, 678 bp, Escherichia coli
atgtatgaatcagtgtcaccatcggcatcatttttaaatccaatcttcacccagtcagtatttcgaatccaggcaaggattgagtcattttcaaaagtaagcccaccggacaaagtatcgccatttttttgcacggcgttaccagccctgtttaccgtttcctgtaaaccgaggtattcgataacggcagcaacggtcgatttcgcaagaatatcccgcccgacttttgtcagggttgccaggctggcgacatcattccccgtaaaatacggaaacctgtctgccgcagtagcaagcccggccagcgccgtcagggtggcatctttcggttgcttacccgcaagcgcgttagtcatggtggtcgcaaaattcgggtcgtttcccagcgccgccgctaactcgttcagcgtattcagtgcgtcaggtgacgaatctacaagggcggcaatcgcagccataacgaaagccgtgcttgcgatttgggtattattcgttccctgtcgcgcagttggcgttgttggcgttccggtcagcgcaggactgtttaagggcgctttcttgttcgtttcatccattaccgccttaaccgctttcgatgtcgcggccagtgtttcagacgtgctgttggtggcactactgagctggactatccctttttgtgccgtcgtggcgtcctga

SEQ ID NO: 35590 - DNA, 318 bp, Escherichia coli
atgccactccagcctgctgatgattttttcccgcagtgcggcaatctgttccggcgtgaaatgatttttgagttttttcgcccggcctttctttcctgcggccatcacatccggctggccatcatgcagctttttaagctgccgggtcagcaggtctatttccttaaagtcaccgcctgttttattctgtttttcagtaagctggatgaggcgcgcatcaatggattgcgtgacacgctgcacgggtggcgtttcatcccactggtcgcgttttttccacgcataaatcgtgttcgggtttattcccatcagacgtga

SEQ ID NO: 35591 - DNA, 1761 bp, Escherichia coli
  misc_feature (383)..(392): n is a, c, g, or t
  misc_feature (1747)..(1756): n is a, c, g, or t
atgttagaaattaacacttctaaaattaagaacacagttacatttagtgtagataaagacagcttgaaaaaagcgaaagactctattacaggcttaaaggaattcgcagaaaatatcaagccagctaaattgagatttgatagcgtcactaaaggctataagaaagcacaaagtgaagtagacaagattgctcaacagaaagcgaaaaacgaaaaacagaatcaaagagcacaagctgccgcagcaagagcacaggcaaggcaacaggcacaaatagcagcacgtaaggagaaagcagaattaaagctcctcgatgtgtcaagctctatcagtgcaatgcaccgcctctctgtagctgaacaatataaagctattgcacaggnnnnnnnnnnggctagagagatagcaaaacaatatgagcaaggggctatctcgcttgcacgtatgaatagccagatgaaacgcctacaacagcaacaacgtaagattaatggcaacagaaaagctcaattagcccccgttaagggaggatcagggaattccgccactatgggcgctctgttatttggaggcgctacggctgctgctggcgtgatggctgttagtaaaacctctgaatttatggctaacagcttcgctaatgctgaaacacaaggagaattaatccaacgtgcaaggcttggcggtgtagacgttaaccagatgtataatattacagaatgggcgtatagaaacggcgttgactctatgatgggtgatcaaggggctaggaaatacctggatcagatgaaagatgttagggaacgtgccgcaaaatcctatagtgaagctgaatatgtagtcgataaaaaaactggtaaaggcggcgaatggaaaggcggtgataacgctattaatgaacttctaaacatcggtgttattaacaaaagcgaccttaaaaaatttgctgataatccggctggattaatttctaaggctgttaatggaatgatgaaaaaagggttttcagattctcaaattggacaacgtttagaagacctgggcgatgatttgatgcttacatcaaaatattggcaacgttccgttaaagatgtacaagaaagtattaatcagcaaaaagcctctggaaaatggctaacagaaacacagcaagaatctatcgttaaattcagagaactaaacagacagctttcacagctttctgatgcaagacaagtagcattcgtagacggctttatgaaatctcttgatccaaaagtaacggaagagtttatgaaaaacctttctaatctcactccgtattttacgaagctgggagaagctacaggaagtctctttgaagctattatgaagattgtaaactggtttaatcgtaatgatgataagacagatgctattcagaaaaatatgggtgatgcacctcctttgagtaatgaaggaatgaaacagaatctttctaatctcgttcctgatcaatataaaggcgctggcaccggaacaactaagccagataacagcaattccctgtttaacactattaagggattgcttttcgatgataattcttctgtgtcagatgtaaaaatgtcagtcaatgaagcaccgataaccaatctcaaacagggtgctttaaataatcttgcaatgacaactccggcttataatttatctcctgtgtttaatataaaccctacatttgaagtggtaacggaggttccgcttactattaattctgacacatccagannnnnnnnnnggtaa

SEQ ID NO: 35592 - DNA, 258 bp, Escherichia coli
atggctagagatgatccgcactttaacttccgcatgcctttggaagtgagagaaaaattgaaattcagagcagaggcgaatgggagatccatgaactccgagctgttgcaaatcgtccaagatgctctatcaaaaccatctcctgtagttggttatcgcaacgaagctgagaaaattgctgatgagcagtctgaaattgtaaaaaaaatggtattcgatacactgaaaagaatttatggcaagaacaatgaaggttag

SEQ ID NO: 35593 - DNA, 252 bp, Escherichia coli
atgaatgagttaataaatggcaatgccatcaaaatgacaagcattgaaatcgctgagttggtgggtaagcgtcatgacaatgtgaaacgtaccatcgaaacgctggataaaaatggtgttatccggcttcctcaaattgaggtttccgaaagaatcaataacttagggttcaatgttcagtacgagcattacgtcttcgaaggcgaacaaggaaagcgagacagtattgtcgttgaaggaggtgttgcatga

SEQ ID NO: 35594 - DNA, 390 bp, Escherichia coli
atggattattcacagttaagtgattttgaaattaacgtggcggtattcgaagccattcataacggatcaccggattacaaagaaggtgagaatggcgatatggtgtttgtctcatttgagggagacattgtaaacggagacgcagttgaagtagaagttgagcgcggatcctttaacccatgcgcaaacccagcagacgcatggccaattatcactgaaaacaaaatcagcataatgtttgatagtaccgatacgagatatgaaggcgaatatcacgagtggtgtgatgcgatttcatcttgtcaaaagttcggaattcagcatcagtctaatccactacgcgccgccatgattgtctttctcatgatgcaggacgccaataatgcttag

SEQ ID NO: 35595 - DNA, 1254 bp, Escherichia coli
gtgagtagcctgaaaataactaacgtgaagacgattctgacggcaccgggcggcattgatttagcggtcgtgaaagtcgagaccaacgagccaggactatacgggttgggatgtgcaacatttactcagcgtatctttgcagtaaaaagcgcaattgatgaatacatggcaccttttctgattgggaaagatcctactcgtattgaggatatctggcagtcgggtgctgtgagtggctactggcgtagtggtccaattatgaacaatgcgttgtctggtgtggacatggctctgtgggatatcaaaggtaaactggcggggatgccggtttatgaattgctgggtggcaaatgccgtgatggtatcccactgtactgccataccgacggtagcgatgaagttgaagtagaagataacatccgcgccagaatggaagagggttaccagtatgttcgctgccagatgggcatgtacggcggcgcggggactgatgaccttaaactgattgctacgcagttggcgcgagcgaagaacattcagccgaagcgttcgccccgcagcaaaacgcccggtatctactttgatccggatgcctacgccaaaagcgttccacgtttgtttgatcacctgcgtaacaagctgggatttggcattgaatttattcatgatgtgcacgagcgtgtcacccctgtgaccgctgttaacctggccaaaacgctcgaacagtatcagctgttttatcttgaagatccggtggcacctgaaaacatcgactggttgaaaatgctgcgtcagcagtcttccactccgatatccatgggtgaactgtttgtaaatgtgaatgagtggaaaccgctcatcgacaataaactcatcgattacattcgctgccacgtgagtactattggtggtattacaccggcgaaaaaacttgcggtctacagcgagttgaacggtgtgcgaaccgcatggcatgggccgggcgatatttctccggtcggggtctgcgctaatatgcatctggacttgagttcaccgaactttggcattcaggaatacacgccaatgaacgacgcgctgcgtgatgtctttccgggctgccctgagattgaccgcggttatgcctatctgaacgagaagccgggtctggggattgagattgatgaagctaaagcggcaaaatacccgtgtgaaggtgggataccgtcgtggacgatggcgcgtacacctgacggtactgcctcaagaccataa

SEQ ID NO: 35596 - DNA, 768 bp, Escherichia coli
atgaacgctttatttgatttaacggggaaaacggcgttggtaacaggcgcagcacgtggactgggctttgcctatgcagaaggccttgccgttgcgggtgcacgggtcatcctgaatgatattcgcgacacgttgctggcagaatcagtaaaggctctgacaagcaagggctacgatgcgcacggcgtggcttttgacgtcaccaatgaacacgcgattgaagcagcttttagccaacttgatgcgcaagggatcagtattgatatcctgatcaataacgccggtattcagtaccgtaaaccgatggttgaactggagttggaaaactggcagaaggtgctcgacacaaacttaactagcgcattcctcgtgtcccgcgcggcggcaaagcggatgattgaccataaacgcggtggcaaaatcattaatatcggttcactcactagccaggccgcacgcccaacagttgctccatacacagcagcaaaaggcggcatcaaaatgctcacccgttcaatggccgcagaatgggcacagtttaatattcagaccaatgccattggaccgggctacattctcaccgacatgaacactgcgcttatcgaagacaaacacttcgattcttgggtgaaaaacagcaacccgtcccaacgttggggacatccagaggaactcatcggaactgccatcttcttatcatccagagcatcagattatatcaatggacaaattatttacgttgatggtgggtggctcgcggtgctgtaa

SEQ ID NO: 35597 - DNA, 1287 bp, Escherichia coli
atggttcagaatatacataaaaaattagcgccgattcgctggcgtaagttgatcccgctggcatttattacgtatagccttgcctatcttgatcgcgctaattatggctttggtgctgcctccggtctggctgaggatctcaatattacaccagggatttcctcactactgggtgcactgttcttccttggatattttttctttcaggtacctggagggatttatgctgaaaaaagaagtgccaagaagcttattttttggagcttaattctgtggggaatactagcgacagcaaccggcatggtccacgacgttaaggtcctagcggtcattcgcttcttactcggcgtggctgaaagcgttgtaatgcctgccatgcttgttttcctgagccattggttcactaagaaagaaaggtcgaaagctaacaccttcctttttcttggcaaccccataaccgtactctggatgtcagtactatcaggctatctcgtggactcctttggctggcgaggtatgtttattatcgaaggcatccccgccatcacttgggcagttatctggtggtttgtctttgttgatcgccccacagatgcaacctggttaacagagcacgaaaaaaaagatatagaagcaacactggcagcagagcaaaccaatattaaagaaattaaaaactacagcgaagcatttcgttcaggcaaagtcttatcactctcatttatccacttcttctggaatattgggatgtatggatttattatgtggttaccgtctattttgaaatcagcatctgaattaagtatcgtagcaataggttggttatccgcagcaccctacttattagctgtatcactcatgctaggcgcgtcttggttttcagataaatatatgaaccgtaaaatcattgttcttctgtttttaggattgggcgcgttctgctttattgggtcgtttaccgttggagaatccaacttttggctctcgtatatcctgttgatggttgcaggcggcgctatgtatacaccttacggaccattctttgccgcaataccagaaattatcccacgtaatgtgatggctggtgcgatggcatttatcgtaagtttcggtgctctgggctcattcgttggctcatggattgtcggttatctgaatggcttaacgggcagtccaggtgcttcttatgtctttatgagtgcttcgctggttgtggcggtgttgctcacctcactcacctcgtttagcactaaaaaatccactgaagcaaaagcacaaacttgttaa

SEQ ID NO: 35598 - DNA, 777 bp, Escherichia coli
ttgagcataaaatccattcagaaacagaatgttgtaaatgaagtttatgatcaaataagtggaaaactgctggacggcagctggccaccaggtagccgtttgccctcagaattagaactggccaactcatttaatgtaagccgggtcagtgtacgtagtgcggttcagcgctttcgcaccttagggattgttgtgacacgtcagggctgcggcagctacgtgagcacaaacttcaccccgcaaatgttgagtaacaatccacgccctatcatgcaccttagccgcgaagagtttcacgatatgatgattttccgtcagaccgtggaatttaaatgcgtggaacttgctgtcactcacgccaccgacgacgacattcgccagcttgaagaagctctgaataatatgttgatcaataaaggtgactacaaaaagtattcagaagcggattacgagttccatctggcaattgtcagagcatcgcacaacagcgtgttctacaacgtgatgaactcaattaaagacatctattactattatcttgaagagcttaaccgtgcgctcggtatcactctcgagagcgtggaggctcatatcaaggtctacatgtcgatcaaggatcgtgatgcccgtagggcggtagaagtgctcaatgaagcaatgtcaggcaatatagctgctatcgaaaaaattaaatcaacagatatagcaacgataaaagaactgctagttacaaactcaactgacgaagcgaatcagcagacaagccccaacgaataa

SEQ ID NO: 35599 - DNA, 822 bp, Escherichia coli
gtgataacttgtgtttttatttttactgctatccttctggcagtcataacttttatccctgtttccggtaatacatcatgggttgtcgggggatgggattttccccgactacagatacttttgctgtgtactttgaatgtttttctgtctgttgtttttcttgacttatttacagagttgtttgttgggataataagtttaatttgtgtcgcttaccagttggtatggataattccttatacagtaattggcaagaagcaggtaaaggaaataaaggactctgatggatttctgggtttaagtatactggtattcaatgttcttatgaccaataaaaaatatatacccattcttgaacttataaataaagaaaaacctgatatacttgttcttcttgaaacaaacttatggtgggaacagaaactatcacctctggatgaagtgtttccatactccctgaaatgcccgaaagaaaatttatatggcatgcatgtatattcctggatgattttaagtgatgcagaaatacagtatttagtggacaaggaaattccctccatgaatatgatagttcatatgccagaaggtttgagaataagattacattgtcttcatcctgttccaccgagcccgactgaaagtgatgagtcaactgatcgtgactcagaacttttaatggtcgggaaaagtattgctgattctgaattacctgtaatattagcgggggatctgaatgatgttgcatgttgcgtggtctgcgaccactcgtttattcatggcacgggggctgcagcattactggccaaagagttaagtcaatag

SEQ ID NO: 35600 - DNA, 405 bp, Escherichia coli
atgaaaaatattatctggccggagcgctgcactgcaggacaggttaaagtcagccatgtgggcggcaaccgcaaaaattcggtgctgttcatcagtctgctgaagcggcttaaagcgacatactgtcgagcgaaaaccagcacgctgatcgtgggcaacaacattatccacaaaagccgggaaacacagcgctggctgaaggagaacccgaagttcaggggcatttatcagccggtttactcgccatgggtgaaccatgttgaacggctatggcagacacttctcgacacaataatgtgtaatcatcagtaccgctcaatgtggcaactggtgaaaaaagttcgccattttatggaaaccgtcagcccattccccgtaggggaacatgggctggcaaaagtgtag

SEQ ID NO: 35601 - DNA, 732 bp, Escherichia coli
atgtttgaccaaagaaacggaggtagtctgaattcgctaaactcacgtcatatccaggatgaggatttaccgaaatggcttaagaacaaagttgccgcactctggttttgtctggcgataaggaagataaatgtatcagggtatcattaccttgaacttgtttcgcctcgtcaaatttcaggagattctgtttgtgtcaatggttcagcctcctcatcccatgagattcggctgaagatcatcaggcgatggattaattccgtggtacggatacaatcggaagcctgcgctaaacagttcattgatgtcatctataaaaactggaaggaaatcaggaacaaaaatcgtgcaaaatggcttaaaaataattcagaacaaatagaatgggcatgggaatatgtgaccaagcgtattcctgatttacacgtaaccgggttttgccctgacaatactgaagagaagcacattgcccttttagtgttacttaacatactgaattcggaagataagcagagccagctagtgagtgtctgtgctgaagaggatttttgcaaaaaaatgcatgacgctttcaggaaacggtttattgatggaaaaaaagataagcgtgtacaaatcaacgtaaagatatcgccatccgcaaaaggtgctctggacagactgaccagagagcggaaaacaacacagcaggctattctggaacaactgattctgaaccgtagactggattaa

SEQ ID NO: 35602 - DNA, 405 bp, Escherichia coli
gtggcacaagagcaaaaaacgctgcgtatccgtcagattcaggaagcgttgcagtatgcgaatcaggcgcaggtctcaacacctcaaattcagcaggctcaagatgtgacgcaagatactctgttcttgctggggagcgaagcgctggagtcaatgattaagcacgaagcgacccgtccgcttgaattctcatcaaactactatcagacccgtcaaaatctgttggatattgaaggcttaaaagttgatgatcttgatattcatgcctaccgctatgttatgaaaccgacgttacctattcgtcgcgatagtccaaagaaagaaatcaccttgattctgactgtgctactgggtggtatagttggtgctgggattgtgctggggcgtaattacaacgcgaagtaa

SEQ ID NO: 35603 - DNA, 1743 bp, Escherichia coli
atgaaaataaaactttccagtgaaatatcaaaattaatttttttatatgcagcggtgtccatgcctgctttttccgcagatgatggcattgctgttgtcacggatggtgacggtacaaatatagccattggtgataaagcggatagcagaaagatgaacggtgacaactcgatatcaataggtaaatcttcctctatcggctatggcaataacagcattgctgtcgggacctcttcctatgtaaccagtagtgatgccatagccattggtacgaacagtcttgccagggcaaacggaacgattgttattggtaaaaatgccaaatccggcggtggtcggggagtggttatcggtgagaatgcatctcagggagactggcgtaaacatttccccacagaatccactgtttcggtatccagtacagtcgcagttggtgataacagcagtgctgccggcgtggcatccgtcgctgtcggctccggagcttctgcaacgagggatggatatggtactgcactgggagatgatgctgaagccagaggaaaatcttccactgcggtgggggcacaggccacttcagtctcgtggggttcagttgcactgggcctttcttcagcttccgatcgtgtagccggagtgtctgcatatatgccggagaccagaagtaataacgcagaagaggtggtaatatcccggatggatgaagcgcagcgaaacaggcttgctgagatagataaacaaattgcgcactataaagaaatcgtggacccgctggctgatgcgtatttttctctcagtaatgagcttgataaaagatatagtgagctggaagattctaaattaagtggcgtggagtatgctgaaaagagagcagaaattgataaataccggactgagagcaaactgacagataaatcccgggcatattatggatcccctgaatatgctgcgctgaataaactgcaggcagaacgctcaagaatcttttctgcatatgtttccactcatggtgctgtatctgtggggaatgggaagagcatcacaaggcagatcacaagtgttgccgcgggttcggaggacactgatgccgttaacgttgcacagctcagggatttgcagactgtgacagaaaaggcggatgcagcgcttgataaacgcataacaaacaacaccagtgcgataactaaaaatctgcaggtggttaacagtaataaagaggaaatcagtaacattaataaaacgacaaaaattctggatgaaagagtgacagccaatacacagacagcagaagaacataagctgcttatttcggagaacagcaaacaaatcagtaccaacgctcttggtatcagagagaatacacaacggatccgggatgaggggcaggcacgaatccggggagacagggaaaccctgcgtgcagcgaccggttataccgacatgcgggtaaacgggctggagcgtaatacgaataaacgttttgcgcagcttaaagaggatatagacaaaaacagaaaacgtgcagatgcaggtattgctggtgcgatggcaatgacggggataccgtccgtacccgggaaaaaggtctcatttggtatggccatggccggataccggagtgaaggtgctgttgcagccggtttccattttaatacaagtgaaaacagtgctgttaaagtgaatgccgcctgggacagtgaaagtggagtgggcgtttcagccgggatggctctgggatggtaa

SEQ ID NO: 35604 - DNA, 1359 bp, Escherichia coli
atgtattcagaatcatttgtgatgataagtgggcttgttgcaatagttatacttatcattttgatcacccgatttaagctccatccttttttttcattgcttatatcgtctgtatttttgggaattgtgaacaatattggagtggcgaaaagtgtagatatatttacgcacgggtttggtagtcaactgtctgtcacgggggtagttatcggcttaggcgcaatgctgggggggctattggtacagtctggaggaggggacaaaatagccgatattattattgggtccagaaaaattgtttggatgcctctgtgtattggtatagtttcgttaatcatcggtctacctaacttgtttgaagttacttttgtactgatggtaccccttgtgttctctattaccaaacgcttggagttacctgttctcagagttgcactcccaatgtctgcaggattaatgacagctcatgcgttattaccgcctggtccggcaacaattatcgctgctacggcttatggtgccagcattggagaaactacgctttatggggtgattattagtatacctgttctactctcaggagcttatcttttcccaaaaataatgcacaaacatcttaacgtgggagaacctttggcactgaatgaaactgaacatagacggggaaataacgaacgtcaattatatcgccaaccatcgctgactgtcgctttgataacagttatgatcgccccttgtctgatgattgttgggactattgggcttgactttttaccaaaaacaggtgtggtcacagaggtattccaggcactaggcaatccagtaataactcttggacttgctctggtttatgccatgatatttctgggacgggcagtgggttttagtaatgaagaaatcttgtctatcagtaagaaaagtattgtgcctattgttggtttgttgctaattatcggtggaggcggtggattaaaaaatatactaacagcaattggtctaagtgatattatcagtaaccttgctacggattggtctattcctccgctattatttgcatggctggtggcagctattttccgcattgcgcttggctctggaacggtggcggtctcagcttcaggcggaatcgttgccgcgttacttacagcacatccagaaactaacgcagctctattggtactttcaactacgactggggcaatgattttttcacatgtcagtgatggggcattttggttattcaaagaatactttggacttagcgtaccacaaactattcgcacatggagttatttagtcacgatacagtctattgtcgggcttataggagtattggttctgggagctattctcagttag

SEQ ID NO: 35605 - DNA, 870 bp, Escherichia coli
atggaatcctgtggcggctctcaatactgggcgcgtgagctggaaaaactggggcataaagtcaggctactccatggcaaattcgtcaaggccttcgtgatgggcaacaaaaatgacgttatggatgcccgtgctatctggatggcggttcagcagccggctaaagccgtcgctgttaaaaccgaggagctgcaggcggtgctgtcactgcacaagatgcggcggcagttggtgaagttccgcaccgcgcagatcaatgcgctgcacggcttactgctggagttcggcgaaacggtgcgtaagggccgggtgtcattggacaaggcaatgccagaggtacttgagcgcctgaaggaaaagctgccgcctttcctgatttaccagattgaagaccagtaccggcggctcagtgaccttgatatgcagatagatggcatcgaaaagcagcttgtagcctgggcgaaacaaaatgaggcctgccagcggatcatggatattccgggcgtcggcccgttggttgccacagcagcggtcgccattatgggcgatgcaggaaccttccgctcagggcgagagttcgcggcctacattggtctggtgccaaagcaaacaggcactggcggtaaagtacggcttctgggtatcagtaagcgcggcgatatctatatgcggacgctgtttatccatggagccagagccgcgtcgttactggctaaagagccaaatccctgggctacggagctgatgaaaaggcggccgaccagcgtcgcagtggtgggtatggctaacaagatagcgcgaacggtgtgggccttggtagcccatagccgaacctacgacaaaaaatacgtcagtgtcagaccgtcctaa

SEQ ID NO: 35606 - DNA, 564 bp, Escherichia coli
atgtttaccgaagaacaaaaaatccgtgccattgagctttatttcaaatatggcaagaagctggttcccgtcgtacgcgagctgagctacccttcgaaaagaaatctgcagcgttggatccgctcatgggaagcaagtggcggagcaaaagaatccattcgtcataagcaccgttactcaggtgtgcaaaaacaggttgccgttgaacattctcttaaccacggcagttgcctggcgtttgcctgcagaactctgggttatccccgcagtgatgtgctcgctcgctgggttaatgaactttatcccgacagacgacgtatatttgccagtaaggccaatccggttgcgccctttgaaccagaagtcaaacgtcaggctgccatggcactctgcatacgacaagtatcagccagtgaaatcacctggcatattggtgtcagtcgtgcagtattgtataaatggaaagatgaaattatcggcaacagtgcttaccagactatgcgtaaacataacgccccttccctggaggcagagcgcgatgcattgcgagaagaagtcgcctga

SEQ ID NO: 35607 - DNA, 516 bp, Escherichia coli
atgcgttttatttgtgataacagttattttctggagggaataaaggagtatattaatcccggtaaattcattatcagcggcatgcagacagataatgtggtgataatatcttcttcccggatatctgaaattgtcggctttctgtataagaataatataagtgatgcgaacaccctttatttttcttctccggaagcgctccgttttctctggggagtggttgacagtccggtttatgatatcagacatcttactgagcgatgttcagtaaacgatatcagtcatctgtaccgcgcattcatgtcggtggagaagctgaccctgtccggccggcaggtaaatgtactgatgatgctgctttatggcagtaacggaacagagggggcacgacatcttggcatgtcagagaaaacattctccactcataagcagaatctgataaagaggttacgggtacataatgaagttgagttgttgtacaaggggatgcttctggtcagaaaagggaggttgtga

SEQ ID NO: 35608 - DNA, 222 bp, Escherichia coli
gtgcagccccactccaccaccatcccggataacgccattatgctgtctgataagctcttttacagcgcaaacctggtgcagagaagccgtaaggatgagctgccggagcaggaaatgtggggcatgttgcgggcttacaacctgatacggcatgaggcactaaaagcagcatcagaaatcagcctgagttcgcgttcaggtttatccccgcagaaaggatag

SEQ ID NO: 35609 - DNA, 282 bp, Escherichia coli
gtgcgcatcggcttttctcggggaccggcaagcagtggttgcgatggaaaacccgtggcaaaccgcagatgtgccgggggcattgcggaacggctgacggggagtgtcgttggtaccgcgttttcatacttttcagtctcattcccggtaactgcgtttccggggacagcgttcgtcgaactggtggtttctgaagttgtggcaaaaacagacatctgcctgtccatcttcgggctgatcactgaaccgaatttattatttggggatatcacttcattctga

SEQ ID NO: 35610 - DNA, 732 bp, Escherichia coli
ttgactggtgttcgtgctgatgaatcgctcaatcgctttatgggactggtgtctcagcgcaaactgagatatgcagatgataaaccctggaccacagcgtcacctgaagggttttattacaccttgtatccgttgtatgactggaaagcccgtgatatatggatatataacgccagaacccgagctatctacaatcccctgtatgacctgatgtaccgtgccggcgtgccgttacgcaacatgcgggtctgtgagccttttggcccggaacagcgtaagggactgtggctttaccatgttctggagccggaaacttgggccaggatgtgtgagcgggtgtcgggtgctgccagcggggcgctttatgccaatgagagcggtgcctattttgccctgcgtaagcgtatcacgaagccgcctcatcatacctggcgtagctatgcgatgttcctgctggatgtgatgccggaaagaacggcagaacattaccgtaataaaattgctgtctacctgcgctggtatcagacgcggggcttcccggatgacatcccggatgaacaggagaatgacctggggagccgggatatcccgtcttggcgacgtatctgtaagacactcataaagaatgatttctggtgccggaccctctccttcagtccgaacaaaccccggcactatgaacgttatctgcagcgtatgaaagaaaggaggaaggaatgggggattctgtga

SEQ ID NO: 35611 - DNA, 477 bp, Escherichia coli
atgcatcagtttttactgaatgaaggtgcagatccctcgcgttttctgtttgttctcagccatgccgatcgcgtgtttcctgctgaagaatggaacgacacagaaaaatgcccgtcccgtcaccaggaactctcactggcaacagtaacagcccgggtggccaccctgttcccttcatcatttccggtactctccgttgccgcgcctgtcggctggaaccttccggcgtttgtgtcgctgatgatccacgcactgccaccacaggcaatcagcgccgtttattcgcatatacgtggcgaaaaacggtcaacccgggataagaatcatgcacagcaggcttttggtgacgccatcggccagagttttgacgctgccgttgccaggttcagctttccggtctggatgttacatcttctgcgtaaagcccgggatcgcattatccacctgctgagcgcactgtgggagcgtctgttctga

SEQ ID NO: 35612 - DNA, 312 bp, Escherichia coli
atgagagttgagcagaataatttcagggacatgttctccgtttatctctccggcccgccgcagacgcagcatgtgttttgtgtatccccggcggcccgggtcgcgcacacgggtctggcaggcgaagaatggctgaaagccttcccgctgcaggctttccagtacggtgatggtggggatgtacgcatatcgtttactgcgggaagtatgccggtcttccccgaaaatccccggcacatagtgcatcagttcttcgtgtgtcagcggacggtcacggcgtatctggttcgcataaccaaaacgactggctag

SEQ ID NO: 35613 - DNA, 312 bp, Escherichia coli
atgggagttgagcagaatgatttcagggacatgttgtccggttatctctccggcccgccgcagacgcagcatgtgtttggtgtattcccggcggtccgggtcacgtacgcgggtctggcaggcgaagaatggctgaaagccttcccgctgcaggctttccattacggtgatggtgggaatgtacgcatatcgtttactgcgggaagtatgccggtcttccccgaaaatccccggcacatggtgcatcagctcttcatgtgtcagtggacggtcacgacgtatctggttcgtataaccaaaacgactggctag

SEQ ID NO: 35614 - DNA, 192 bp, Escherichia coli
atgaacaaacatccacaaatgtcagagcgttttgcgcttttctcactcttcaggccacaaatcattcgcgtggtgctgaacccggtaaaactgacctggccggaccaggatggcggcagtcgcatgctgccgaattaccttgagaatctgcaaaatccgctgtggctggtaactcaggaatatgaatcatga

SEQ ID NO: 35615 - DNA, 192 bp, Escherichia coli
atgaaaaaacatccacaaatgtcagagcgttttgcgcttttctcacttttcaggccacaaatcattcgcgtggtgctgaacccggtaaaactgacctggcctgatctggatggcggcagccgcatgctgccgaattaccttgaggatctgcaaaatccgctgtggctggtaactcaggaatatgaatcatga

SEQ ID NO: 35616 - DNA, 246 bp, Escherichia coli; identical to SEQ ID NO: 14155

SEQ ID NO: 35617 - DNA, 1017 bp, Escherichia coli
atgtccacattacgcctgctcatctctgactcttacgacccgtggtttaacctggcggtggaagagtgtatttttcgccaaatgcccgccacgcagcgcgttctgtttctctggcgcaatgccgacacggtagtaattggtcgcgcgcagaacccgtggaaagagtgtaatacccggcggatggaagaagataacgtccgcctggcgcggcgcagtagcggtggcggcgcggtgttccacgatctcggcaatacctgctttacctttatggctggcaagccggagtacgataaaaccatctccacgtcgattgtgctcaatgcactgaacgcgctcggcgtcagcgccgaagcgtccggacgtaacgatctggtggtgaaaaccgccgaaggcgaccgcaaagtctcaggatcggcctatcgcgaaaccaaagatcgtggcttccaccacggcaccttgctgctcaatgccgaccttagccgcctggcaaactatctcaatccggataaaaagaaactggcggcgaaaggcattacctcagtgcgttcccgcgtgaccaacctcaccgagctgttgccggggatcacccatgagcaggtttgcgaggccataaccaaggcctttttcgcccattatggcgagcgtgtagaagcggaaatcatctccccagacaaaacgccagacttgccaaacttcgccgaaacctttgcccgtcagagtagctgggagtggaacttcggtcaggctccggcattctcgcatctgctggatgaacgctttagctggggcggcgtggaactgcatttcgacgttgaaaaaggccatatcacccgcgcccaggtgtttaccgacagcctcaaccccgcgccgctggaagccctcgccgggcgactgcaaggctgcctgtaccgcgcggatatgctgcaacaagagtgcgaagcgctgttggttgacttcccggaccaggaaaaagagctacgggagttgtcgacgtggatagcgggggcggtaaggtaa

SEQ ID NO: 35618 - DNA, 441 bp, Escherichia coli
  misc_feature (415)..(424): n is a, c, g, or t
atgcgaaaaataattactcatttcaaagttgttttaacgttacttctaccagtaaccgtatctgcccagcagatacagtggcaatcctgtatggccagtcaattcaaccactggtttggtgaggaaaaaccgtctcctgacttactatgtggttatttgtctgttccattaaaatatacagacacaggcggagatgcttcttatgaaaaaaaatcacaagtcaaactagcgttgacaaaattgccggcaaaaagcaagcataaaggaagtatcctgataataagtggtggtcccgggttaccaggcataaatccttatattaactttgactggccagtcacaaatcttcgtgagtcatgggatattattggatttgatcctcgaggcgtcggacagtccactccgacaataaacnnnnnnnnnngtccactccaacaataa

SEQ ID NO: 35619 - DNA, 786 bp, Escherichia coli
atgtcaatcgaatctctcaatgcgttctcaatggattttttctccctgaaaggtaaaaccgcaattgttaccggcgggaatagcggtttaggccaggcatttgccatggcgctggccaaagcaggcgcaaatatctttattccaagcttcgttaaagataacggcgaaacaaaggaaatgattgaaaaacagggtgttgaggtggacttcatgcaggtggatatcaccgcagaaggcgcgccgcagaagataatcgccgcctgttgcgaacgtttcggtaccgtcgatattctgattaacaatgccggtatttgtaagctgaataaggtgctggacttcggtcgtgccgactgggacccgatgattgatgtgaacctgaccgccgcattcgagttaagctatgaagctgcaaaaattatgatcccgcagaaaagcggtaaaatcattaatatctgttcattattctcttacttaggtggacaatggtcacctgcatattctgccactaaacatgctcttgccggattcaccaaagcttactgtgatgaactaggtcaatataatattcaggtaaatggtattgcccctggctattatgcaacagatattacgctggcgacacgcagtaatccagaaaccaatcagcgcgttcttgatcatattccggcaaaccgttggggcgatactcaggatttaatggacgcagccgtattcctcgcaagtccggcatcgaattatgtcaacggacatttattagtggttgatggtggttatttagtgcgctaa

SEQ ID NO: 35620 - DNA, 138 bp, Escherichia coli
atgtcagaggttttcactgtcatccccgaagcgcgcgaggcagctgcggtaaagctcatcggcgtggtcgtgaagcgattcacagatatctgcctgttcatccgcgtccagttcgttgagcttctccagcagcgttaa

SEQ ID NO: 35621 - DNA, 474 bp, Escherichia coli
atggccctgatggctctgtttgttttatggaaggacaacaccacgccggggaaattactggttaaggagattaacttcgtaagacaaacagcacctgccggacagttcccggtcagtgaatgctggttttcttcctctgattcttcaggcagatcagaaatacaggatatctgccattaccgcgcggctgatgctgcagattatgtcagggagactgaccggtcactgatgcaactggtcaccgcattctgggcaacgctggcactgatgtatatgtcgtttgcggcaggcaccgggaaatatccgatgtggcccggaaaaatgaaatgtgtccgggtgggaaccgcagatgaacatctgaaggaagtttatacggaagacgcttccctgccggaaaaaatcaggaaatgccctgtttatttccatgatgaccgaacaaacagaagcaacggagataaaaatgaacatgcgtaa

SEQ ID NO: 35622 - DNA, 321 bp, Escherichia coli
atgaacatgcgtaatattaatgttattacagcccgcgttgtgccggataaaaacgtatcagatgattttatgcatgctgttctcagtaactgcaccacaaaaatagttcttcctgctccgaaggtgttcagttctgaatcattgccacacaattttaatatggctgctgtcggtgtgatgaagaagggaatgtcgatgagcttattttcttctccggggcatattgtggttgccggacaatccggtggcggaaaatctgttccggtgaaagaactaatcgacagaattattcagaaatataaggaacccttcgatgaataa

SEQ ID NO: 35623 - DNA, 477 bp, Escherichia coli
atgcataaatcagaaaatgaaaaaatagattttattctggatgagcatgagcggatattcagaaaacagggttctttgtgtatggcactgggtaagggctttttagttatagctattctttgtggtgttgccacattctgtgtttctggcctgtatctgaaatccctgtgcctgtccgttgcctgctgttgtggggtattcagtcgtatttttaattattacagcgtaccggaggaatcacgcatggtactcagtcgtcaggaattactccggcttatgcgtctgactgaagacgtaccagatgtgagacaggaactgcttaaccgtttgttgtccggtaaaaaactgactggtcgggatgaacaggatatccggcgtctctggcaggagaaagtggatgcaatgcaggagtctgccacccgtcagcgtgaacaggatactattcggaagtttactgaagggaataaatccgaatga

SEQ ID NO: 35624 - DNA, 219 bp, Escherichia coli; identical to SEQ ID NO: 19526

SEQ ID NO: 35625 - DNA, 504 bp, Escherichia coli; identical to SEQ ID NO: 30930

SEQ ID NO: 35626 - DNA, 285 bp, Escherichia coli
atgttctccgtttatctctccgttacggcgcaggcgcagcatgtgttttgtgtatccccgacggcccgggtcgcgcacacgggtctggcaggcgaagaatggctggaagccttcccgctgcagactttccagtacggtgatggtggggatgtacgtatagttctggcttcgggacgtgtgtttatcttccccgaaaatccccggcacatggtgcatcagctcttcatgtgtcagcggacggtcacggcgtatctggtttgcagcataaccaaaacgactggctaa

SEQ ID NO: 35627 - DNA, 510 bp, Escherichia coli
atgggtagtaagattgcgaatgtgatttttgaaaaattatacagtcgtattgactttaacaaagagcaatatatatcctttataaaggatgcgtttattcatttttatgattatagcaggcgatatgcaattagtgagaatatcgcaaaagacgctgtaacaaacaatatcgcattgatgagcactttttatgacagtgataatacgtcaggtgaggttttaaataatgattttacagaagaagagtcatttgaaactgcgttagatgtagagcatgcaatagtgcttggatttgctgatgataattttgaaacaaaacctgttcattatcaggatttattaacacgatttagtgcctttcaagataccgtgtttaatttgtttcctgaaatgcactcttcgcattacaacgatatttgtagcgtaagtgtggatatgacaaagggaacgcaatgcatgatccctgtctcttatacacatctgacgctgccgacgatatgcagtgtgtag

SEQ ID NO: 35628 - DNA, 324 bp, Escherichia coli
atggccgttactttcttcagttgctttaatgatttcggttgtggcgacattttccacgcactccgtttccagaaatgcgtctgtggttcgcgtggcattactgtcaccaaaggcttccgtttccatttttctggtcaccagcgtctgaccatatttgtctttgagttgcagagtgatggtgagggggccaaatccttcatcgtttccgccattatccagccggaactggtaagcacaaatatttcccgggagccatatcgtatctgtattgcgtatactgatgtaacgttgatcctgtgcccggagtggggcagaccacgttaa

SEQ ID NO: 35629 - DNA, 495 bp, Escherichia coli
atgacgcataatgtctctgaatctattatcgattccctgactgacgtgaaaatgccccattacgcaccgctggctcaagtcagcggtagtatcgaccttaacggtaccattttacctgagtaccgctgcaacacgctggttctgggcagtggcgcggcaggatggcgagctgccgtcgagctgaaacggcaaaatgtcgatgtaatggtagcctccagcaaagccttctggggaacttccgcctgttctggttctgataaacaaacgcttcacaccgcgaatacgcgtgcaaatggtgaccattttctgacattaagtaacaccctggcggcaggtggtgcgatggatcatgacaccgcatatgttgaggcgctcggatcggtgaacacctgtgaagtactgaaatatctgggtctggatttgcctgaagatctctttggcgcaacgttgcgttatcaaaccgatcacgatgaatttggccgtgccactagctga

SEQ ID NO: 35630 - DNA, 534 bp, Escherichia coli
atgttcaatctttacatcacacactcagattcatcaccaccagattgtgtaagcactgaaaacaaccgacttacctctgtaatatctacgcttatttcatcacacgataacaatattctttccgttactgactttcttaaaagaaatgacatctcgcattgtttttacttcctgtcgacagggaatatacggtttactacacataaccagagtatgatcacggtgcagacccagaaaaaaactgtttatataaaccacaggttaaacaatatctggacaaaactggttatcaaaaaacatttatccggaagaataccatttttccggagccactttactctttcccgggcaggaatatttaaatatgttctggatgtaaacaggaaacaatgccagtattattcaataaaaaatcatatcttacattcacaattcatcattccggtttcttccaccattgcaccggacaggcgatcatgtgggtgcagtccacgttctgttcacgcggaaaaacccggtgtgcatcgtttttga

SEQ ID NO: 35631 - DNA, 204 bp, Escherichia coli
atgcgtaatgttccatcatctgcatggtgccagatgcctcccgatgagtccgtcatcagcatccggacccgcaatattgcccaaataaagctaaaggatgattgtgacctgctgatttgcacctccgcacaggtggattcaccatgcaaactttttttacaaacgctcagcctgtcaggcaacagtcaactgactgaattgtga

SEQ ID NO: 35632 - DNA, 264 bp, Escherichia coli
atgaagaagatgtttattgtagctttattttcgttagtttctgttaatgcaatggcagcggattgtgctaaaggtaaaattgagttctctaaatataatggaaataatacattcacagtaaaagtagccgggaaagaatactggactaaccgctggaacctgcaaccgttactgcaaagtgcacagttgacaggaatgactgtaacaatcaaatctattacctgtgattcaggctccggatttgctgaagtacagtttaattaa

SEQ ID NO: 35633 - DNA, 1026 bp, Escherichia coli
atggatacttttcataatattttgcttgagcacatagacagccttttaaaagagaggcttgatttatctggtgacggtgatatcgaaaaagaaattaataacctaattcccaaaatagccattgtcgttaaaaaatctcttattggctcggccaatgcaatgcttagagaacatcgttctctttgtgatgaatttgttgagagaaatatttcaagatgggcagaggcttttgatttgctcgaaacacttatagtgatatgcacggagtccggtgaagagttcaatcgttcttatagaccacaagctgcctctgaagaggatgtggtttttgatttagtcgttcggcatcacgcaagagcttgccacatcgccaacgaaattttgtgtctcttaaagaatggatttgcagatgctgcccaagcgagatggcgagcacttcatgaggtagcggccacagctatgtttatagcaaagcatggaaaagagtgtgctgagcgcttttactaccatgaagtggttgattcatatactggaatgttggaacacaaaaagtacgagcaccggttagaagcaaaaggtccaactattgaagaaatagctgagtgtaaagttcaatttgatctattaataaaaaaatatggcaaaaaatatgcagataattatgggtgggcatcttatattttccctaaccataataaagtggggtttggcgctattgagaaatatgttcagttagaacacatgcgcccttattataagtgggcgagtcagaatgtacacaccggttccaaggcaatgagaaataggcttggtctctgtgaaactggtgatgatatattattggtcgggcaaagtgattcaggaatggctgatccagcccatgctactgctattagtttgatgcagattactgtgacacttttatttttaaaaccaaccattgatcatgccgtcatttcaaaaataatacaggattattctgatgagattggaaatgtatttcttaaaattgataagggtaattaa

SEQ ID NO: 35634 - DNA, 783 bp, Escherichia coli
atgacaaatattaatgaaacaatatggcaaaaaaaacaattacctccattagaattctgctctttagatagagcagctcaaattttagaatgtgaaatagatgatttatggcattggcaggatattaacagaattaattttgccacaaaaataaaaaatgcttactgtgaggggtattttggttatcgtgattttacatggccaaaggatgaagactatattgattttatttcttttctcatcaaaaaagaaatttcctctcttggcataattattcatgaatatagtgatgaaataaaagaaaatggtgttatttttgaggcaaaggtttctggagtttttgatattcaagagactatagtaagaaacaaaactatctctatgaatacatccataccgctttcacgtcgcactgcgaatcccacatttattttttcatgccatgcaaaaacaagcggcaacattaagattacacctgattcattattaataaccagagagcacattgacaacctttataaatcaataacaaatggatttccaatttactccataaacaacactataaaaaaagaaaatcacaagttaccaagattaacaatacatcaatttaaaatgatatatggattattaagaattgccgggttaacagacaatgagataatatctttgccgcctaacaagttaaataaaaaaattgcacaaataggtgctcaaaaaggcattgtaatcccacaaccagataagaacacttggaaaagctggcgagagcgttttagatag

SEQ ID NO: 35635 - DNA, 219 bp, Escherichia coli
atgaaaaaccaaccaatacttcaaaccgcaatccctgcaactggctatatccgccgctatcgcctggctgaattgctgggtaccagcttatcaacgctcgatcgttgggtacgtagcgggaagatgcctaagcccatcaaactgggtgagaaaagcactgcattcgatgcggtagagattaatcgctggctggaagaacgccgaaacacatcagcctga

SEQ ID NO: 35636 - DNA, 234 bp, Escherichia coli; identical to SEQ ID NO: 21142

SEQ ID NO: 35637 - DNA, 243 bp, Escherichia coli
atgaaaaagaaaaattctggctttactgccagcggtctctctcggcctgaaatcagactcggagatatttaccgcgacaccagacgtgggggacgagtggttattcgtcacgttacgccaggcaatatcacctaccgccgtgattttacgctggtggaccattataaagccgtaaatcaaaaacgtgcagcaagctatatccgcaaaatccgtgaaatgctggttgcaggggggaaaaaatga

SEQ ID NO: 35638 - DNA, 219 bp, Escherichia coli
atgacggtacaaatatccgcttacgggcggcaggtggctgatctgcactcaaaaaccaccagcaagggaacaccaatggcaatggcgagtatggcagttccccttccgcgcagccaggcagatgacggaacggcgaaacgtggctggtctggttatcgcagacagcgtaatcagtgcgcgaacggtgcggccgggcggcaaaaaaggccagcagagtga

SEQ ID NO: 35639 - DNA, 327 bp, Escherichia coli
atgatttactttgtgaagaaatttagtgaaatagtggaaaagtcttctggtgctttgtctttcgggattatacagagtctcgttatgataggtataattgcaaatttatcttctcaaacaggtgtaagatatttcatcttgcttactattgcatttattgcaactataagtattgcattatgtatgttgagtataatatctgttattaacgaagtgacaggaaaacataagtacatgaagtttttgtttgggattctgctgtacccttcttttattggtgttattctttctgcgtacctgagtattaaagcactaatagtcagttaa

SEQ ID NO: 35640 - DNA, 1989 bp, Escherichia coli
gtgttcctaatatctgaccttagcgacttgcgtgcactttcggaatccgcagagctagagttcaagctagctcaagggaaagacggacaaggtaaattacctgatgatttctggccaacctatagtgctatggcaaactgccgtggtgggtatgtggttttaggtattagagagaaaaaaggggaattttccgttgcgggtatctcagatataaataccgttaaaaagcagcttttcgacctcgtgagcaacaagaaaaaagttaacgttaatcttcttaccaataactctgtccaaacagtatccttacagggaaaggatattcttgtcattgaaataccaatcgcacgacgagaacagaaacctgtttatttgaataatcaacccatgtcagaaacatggtttcgtatgcacgacggtgatcatcgttgttcagaagaacaagttcgtcgcatgatggccgaacaggttgaagaaagccgcgacaaccgtatcgtacaaaacttcgacatgaacgatattaacctagaaagcttgttggcttacagaaatctactatctgcttcaaacccgacacatccagctctcgaactagataactttgctttcctacgaagtattgggggatatagaaaagaccggcaaacaggtttggaaggcatgaccttagctggcattctcatgtttggaacatgggaagcgatacaagatgtagccccaaattattttgtggattaccaagaacgccctgaagcaagaactgaaagaagatgggtagatagactatgtcccgatgggacttggtcaggtaacgtgtttgacttttacagacgaacctatcgaaaactaattgctgacttaaaagtcccttttgagcttaaagaaggtatccgacaggacgatactcagatacacacagcattgcgtgaagcgctggtaaataccttagttcatgccgattatactggacgaatctccatcatggttgtgaaacgaccagatctatttggcttccgtaatccaggtttgatgcgcgtgccaccagaacaagcaatcaaaggatatgaaagcgattgtcgaaaccgactgatgcatcaaatgtttttaattattggtgctggtgaacgatcaggctcagggatccctaaaatatttagtggctggaaatgggctaactggcgtatgccaaggctatatgaaaaaacagaaccagaacaaacacttttggagctatctattggcaacctcgtatcagaagaaattgccaatcttctccatacaaaatttggcgacaaagtagaccatctcagtgagcttgagcgcagtattgttataactgcagccgtagaaaagtggattgaccatgaacgggcttgtcaactaactagccttcactctcgtgaggtaactttagccttaccccgccttgtaagcggcggattcttagtccctcatggtgagaagaggaataaatcatatacattaccggggcaggatcttccatctccagaggaagtttttggtgtaaatccgttatcaacagacaactcattcgcaaacgaagctcaaatcatcacggatagcgataatttgatcacggataacgaagaattgatcacggataacgaaaaagaacgagatgctttaggtcgttttataaccgagaaactaccttttccttatgtggataaccttgagtgcctttcaccaaccttaaggcaacggttagaagacatatctgcattagccagagaaaagaaacgactttccaacgaaaccatggacgaaatcatacttaagctttgctcaggccattatatgccgcttagtgttattgcaaagttaatggcccgaacaccacagaacctacgagaaaaacagctcgttccattagtaagatccggaaaaataagactggcatttcctcatgcgagaagacacaaacgacagggatatatttcttgtgaacaagtacaagttaacaactaa

SEQ ID NO: 35641 - DNA, 477 bp, Escherichia coli
atggaaacggcacccgtaaagtacgctattgtggatggtgctgtggaggaaggattgctggattttctgaacgaagtgaatcccccacactgctgtctgtatgcagaacccatacagccggatctggtcgcgctggccccctatctcgtggaagttgttccggaggttgaagcatggctgagagataaggcgtcgccatggggaatatatctgacttctgagtcatccatgcgtgagctacagcaacacttcagacgttatctgtgggttaggatccccgaacaggagaaacctgttctcatgcgattttatgatccccggaatatatgggtattagcggaagttcttaccccccgccagcttcttttttttatcaaccccgtcagacagctaagtacccgctatggtgaagaatatcgtgaggataatttttcttccgtccgtcccgcagaaacggacgacggatgtgaaacatga

SEQ ID NO: 35642 - DNA, 1038 bp, Escherichia coli
gtgtcaatacggcgctctgttgacgcttaccgatgtcatcctaaaatcattcaattttgtaataagcagttttatgataatgctctgataccgttaacggttgattccggtgaagcctcattatctctggtcatcacggcaaaaggaaaccatacccgtaatttttcaaatctcagggagcttgaatctctggaaggtcattactgggatgaagaaagtagcaggggatacattgccccatataatgcacaggttaatctggctgaaaaagtgctgcctgctgattttgtgaaatcgacggtgcataaatttcagggacgggagtgcgatgaaattgtgttttccactgtgctggataagaagcgcagcagccagcacagtcggaacatcgcgtttgttgataatcctgaactggtgaatgtcgctgtttcaagggcccgaaataaatttacgctggtgactggtaatgatgtatttgaacaccatgctggacatattgcggcgctgattcgttacatcaaatactacgttgatgacggagagattttcgagagcccggtcatatcagcatttgatttgctgtacagtgagtatgacaaatcactggaacgactgaatagtagattgaattcaaatgattcacactttaagtcagaacagattgtggcctgcctgttgcgggatatcctgtcgcaggatagttatcggagtatgatgtttcattcacaaatagcgctgaatcagttggtgttgctggagcggggagattttacacaccgtgaacagttattcatgcgtaaccgggccagttgtgactttgttgtttactataaggtcgggaaggctccattaggggttattgaagtggatggaggttatcatctaaccagtgttcaggctgaacgtgatgaacttaaaaacagtatactgaagaaatgtggcctgccattgctaagattacgtactatagacagtgatatagaagggaagttgggagtgtttctgtctggtctgtcagtaacgctgaggcgctggtaa

SEQ ID NO: 35643 - DNA, 390 bp, Escherichia coli
atgcttcatactaccaatcccgttatcaaacacaaagccggtttgctcaatctggctgaaaaactcagcaacgtatcaaaagcctgtaaaatcatgggcgtttcgcgtgatacgttttattgttaccgcgaactggccgatgaaggcggtgcggatgcgctaattaattgtagtcgccgcgctcctaaccttaagaactgtaccgatgaggcaactgaacaggctgttgttgattacgccgtcgctttcccgacacacggtcagcaccggaccagcaacgagctgcgtaaacagggcgtttttatctccggcagtggtgtccgttctgtctggttacgccataaccttgagaatttcaaaaaacgtctgaaagcactggaagaaaagtag

SEQ ID NO: 35644 - DNA, 417 bp, Escherichia coli
gtggctcactgtaagctttacgtcaccaaaacaccgattaccgcggcagacttactgaatgatcgtgtactgccgttttatgcgtctcagagcctgccgatgctgagaatactgaccgacagaggcacggagtactgtggcaaagtagagcagcatgattatcagctttatctggcaataaacgacatagaacacacgaaaacgaagtcgatgtccccgcagaccaacggcatctgcgagcgattccataaaacaatactgaacgaattttatcaggtaacgtttcgtaaaaaactgtacggcgatcttgatacattacagtcggagcttgatgaatggctggctcactataataatgaagcgaacccatcagggaaaaatgtgcaatgggcagacgccaatggaaacgttacttga

SEQ ID NO: 35645 - DNA, 168 bp, Escherichia coli
atgggactcggtgtcttttccacactttcacttgctgatacccgagggctaagagtggattatatttccttattagccaacagaatcgacccgcaaattcaagctaaagccgtagacgaagagcaatatttgaaaaggtgggcacctacgttaccaatactggcttaa

SEQ ID NO: 35646 - DNA, 261 bp, Escherichia coli
atgaattacgttatccgcactaccaccgtcgtctttagtctcatgctggcaggttacgcaactgctgcaaatgaacttaatcgtcatgatgtttttggtttgatgcagtcaggctatatttctgttggtaatctgtctacaccagaggagatagcaactgcgcttaaagacaaagcggagcaggcaggagcttcccacttccgaatcacttctctgggaggaaacaataaactttatggaactgccattatctatcgataa

SEQ ID NO: 35647 - DNA, 561 bp, Escherichia coli
atgtctacttatgacaaaatacttcgcatggcggatacattgatccagcaacgaggatttttggggttcagttacgcagatctggaaaaagaaattggtatcagaaaagcaagtattcatcaccattttccgaggaaaactgatttggggttagcttactgccaatataaaactgaagcattcagtcggcttaataccacaattcataatgttcctttgggtgtacaacgtctcaggacatatcttgacgcatttgccggttgtgctgaaagaggggaaatgtgcggtgtttatgccatgctatccgacagtcatcagttttctcctgaattacaggaggctgttagtcgactggtacacgaagagatacagatacttaaagacattatctcctccgggcagaatagtggagaattcaaaattgttcttccttcggatgagctcgccgttatagtctgctctgcactaaagggggcactgatgctaaatcggttttcaccacatgatatatattcaagaactgttaacgttttaattaaaatgcttgatgcccgtacctga

SEQ ID NO: 35648 - DNA, 678 bp, Escherichia coli
atggtttcaccggaagggcgactgcttgtggaggccgcccctccgggtcatctcaaacgccggtatatcaatattgcaccgttgaaaaaatttctctccggcagtgtctggcccgtatatggtgatgatccccgaagtgtaaataagcaaaaagttttcagtaccgcaccgctttaccagagtgatgaaccgaaaggatatctgtatattattttacagggagaggaacttaatgctcttactgatacagcctggacaaaggcactatggaatgcactgtactggtcgctgtttctggtagtgatatgcggtctcttgtcaggtatgctggtctggttttgggtaacccatcccatacagcagctgactgaaaatgtcagcggaatagagcaggacagtattagtgctattaaacaactggcaattcagatccctgcaagcccccccgacaacgaggttgagatattacacaatgccttcattgaactggtccgtaaaatatcctgtcagtgggatcaactttcagaaagtgatcaacagcgccgtgaatttattgccaatatatcccatgatttacggacaccattaacatcacttctggggtatctggaaaccgatgattttctgttcagacatggtatccctcttacttttgtcgttaaagtttatccatcatga

SEQ ID NO: 35649 - DNA, 273 bp, Escherichia coli
atgaaaaaaacattatgtctgttaagtattgctttatatttaaactccgggcaaacatatgcaggtttcagcagttatcccggatatacatcaggagaaattggagcagcaattggatgcgccattaatgcctggttagggatccccgcatgtgggcacgcaaatggctcagaatatgatcgaccttcaccagataaaccaaatctgagcgaaccatttatcccaagacccacgtatgacgcttcacttcattcctggcatggcggatactga

SEQ ID NO: 35650 - DNA, 741 bp, Escherichia coli
atgtcaggggcagttaacagtatactggaggtgaaatcaggcagaacagaatatatcctctcaccggtttttgagcctgtatggaaccggaccgggaaaatatttgcttttgaaatgctctcggatatccgttcagcaaaagacgggaggaaaatctgcgcatctgtttttttcagaagtgcgcctccggatattcagtacaaaatactcatcagtcaactggagattgctgaaacgcttcataaatggtgtctgcagaagaaaataatgctgagtgtcaatatttcccggggggtagccctgtatctgagaaaacatggcatcccggggcggccgggaacacatatcaggcttgaggtcagtgaggactttccggctgtggcgttaaaacccggtgatgaccccctgttacgttttttgtcagagcgtttcactctctggctggatgatttcggctcgggaaatgcaggcttaatgtggggactgtcggggatgtttgaacgggtaaaaataagtcatgagttttttcattatgtcctgaaaaacgggtgtgcaatgccacttctccgtgctgtggcagacactgttgcctgtcacaacagaggcgtgatactcgaaggtgttgaaaatgaagcgttgttccgtattgccagagacatgaatgtccagggctgtcagggatggctctacaggcgtgtgggggttgatgaattatccgcgcttattcagcagtatgaataa

SEQ ID NO: 35651 - DNA, 1008 bp, Escherichia coli
atgaaaaaatggttccctgcttttttatttttatccctgtcaggcggtaatgatgctttagctggatggcacaatgtcatgttttatgcttttaacgactatttaactacaaatgctggtaatgttaaggttattgaccaacctcagctatatataccctggaatacaggctctgctacagcaacttattattcgtgctcaggtccggaatttgcgagtggagtgtattttcaggagtatctggcctggatggttgttcctaaacatgtctatactaatgaggggtttaatatatttcttgatgttcagagcaaatatggttggtctatggagaatgaaaatgacaaagatttttacttctttgttaatggttatgaatgggatacatggacaaataatggtgcccgtatatgtttctatcctggaaatatgaagcagttgaacaataaatttaatgatttagtattcagggttcttttgccagtagatctccccaagggacattataattttcctgtgagatatatacgtggaatacagcaccattactatgatctctggcaggatcattataaaatgccttacgatcagattaagcagctacctgccactaatacattgatgttatcattcgataatgttgggggatgccagccgtcaacacaagtacttaatatagaccatgggagtattgtgattgatcgtgctaacggaaatattgcaagtcagacgctttcaatttattgcgatgtaccagttagtgtaaaaatatctctgctcagaaatacaccaccaatatacaataataataaattttcggttgggttaggtaatggctgggattcgataatatctcttgatggggttgaacagagtgaggaaatattacgctggtacacagccggctcaaaaacagtaaagattgagagcaggttgtatggtgaagagggaaagagaaaacccggggagctatctggttctatgactatggttctgagtttcccctga

SEQ ID NO: 35652 - DNA, 1320 bp, Escherichia coli
atgtccatattttcagagtctcctgacaaagaaataacaatgagtcaagctgatattgataaaacatataaatattggcgacttcatttaatgattgtaagctatataggatatgctgtattttattttacacgaaagagctttaacttcgtaatgcctgagatgctatctgatttaggtattacaaaatcagatattggtatggtcggaacagcattttatctaacttatggggcatcaaaatttatttctggtgttataggggatcgttctaatccaagatggtttatggggattggattgataatgacaggatgtgtcaatatattgtttggtttaacatcatctatacctttgtttatatttttatggatggttaatgctttttttcagggatggggatggcctccgtgttcaaaaattttaaatacttggtattcccgaaatgaacgtggattctggtggtccatatggaacacatctcataacattggtggagcaattatccctattttatcaggtagtgttgccttatggctcggttggcgttatggcatgattattccggggaccattgctgttgttattggtattttattatgtttcttattgcgtgatcgaccaagatcaatgggattaccaacagttggagagtggcgtaatgatgtagctgagattaatcatgaagaacaaggtatagggttatcacaatggaatattttaaaagattatatatttaaaaataatattatttgggtattggcaatatcatatgcggttatttatgttattcgtacaggaatcaatgactggggaaatttgtatttgattgagactcataaatatgacttgctaacagcaaatgcaacagtaatgatgtttgaggttggaggcttttttggtgctatcgtagctggatggggatcagatattctgtttaagggcaatcgctctcaaatgaatgttatttatacaattggtataatcattgcttctgcatgtctatggttggtttctattgatagtaaatatgttttttcgttattatttttcatcactggcttctttatctttgggccacaatttctgatcgcaatggcagctgctgaaaactcacataaatatgcatctggtgcttctactggttttgttagtttattcgcatatcttggtgcgtccgcggctggctatccattgtctaaaataatagaaatataccactggaatggtttctatgctcttctcttaacgttatcacttattcttgttgtccttttactcattgcgatgaaactacaaacgctaagagctaagagctaa

SEQ ID NO: 35653 - DNA, 474 bp, Escherichia coli
gtgcgtacagaactggagttttacgcccgtggaaaagctgacacaacatacaacctctataaggaccacgcgggacatagtgacttgaagaatgaggtgtcagtcaacagcctgatgctgaatgcgtactatgatttcagaaacgacagtgcatttacgccatgggtgtctgccggaattggttacgccagaattcatcaggaatcaacaggtagcggtagttgggattatggctacggtgagcgagtgcgttattctatatcacgctcaggctctgctgacaacttcgcatggagcattggggccggtgttcgctatgacgtaaccccggatatcgctcttgacctcagctatcgctatctggatgctggtaaatcctccctgtattacaaggatacagaaggggataaatataaatcagaggttgatgttaaaagtcatgacatcctgcttggtgtgacttataacttctga

SEQ ID NO: 35654 - DNA, 126 bp, Escherichia coli
atgtcgctcgtttgttctgttatatttattcatcatgccttcaacgctaacattttagataaagattacgccttctctgacggcgagatcctgatggtagataacgctgttcgtacgcatttttaa

SEQ ID NO: 35655 - DNA, 420 bp, Escherichia coli
gtgtatgctgcagaattggtaaccggggccctgcagtctttaactccgagtcttgtgctgctcatttgccacaaaatcctggtacgccagctcaatcatttcattcaacagttttttggggggcaccacgacttcgggcaatactttcaggctgtttgtggatttttccggacagtttcagcggaacggaaccatcagcacgttcatcacgccttttttgttgctcccgggcacttttcagttcatccacaatatagctgctcttctcgcatttttgccgattttaaaaatgcgaacaaaacatccgtacatgatgtacagattaaactgccagggactggtgtcagaaagcctccggttagcctgctctttccggaatgtgccggttatgaaaaaccggaaattcagtctctgttgtaa

SEQ ID NO: 35656 - DNA, 192 bp, Escherichia coli; identical to SEQ ID NO: 12354

SEQ ID NO: 35657 - DNA, 261 bp, Escherichia coli
atggaaataaaaaatagtatcagtgattatacagaggccgagtttttacagttggttactgcaatttataatgcagataccgctagtgaagaagaacaagtgaaattggttagtgagtttgaacgattaactgagcacccagatggttcagacctgatttattatcctcgagatgacagggaagatagtcctgaagggattgttaaagagattaaagaatggcgagctgctaacggtaagccaggatttaaacagggctga

SEQ ID NO: 35658 - DNA, 783 bp, Escherichia coli
atgggtatagagtgcgatggtgcggcttatcattcagctaaatctgcccgtgatcgtttgcgtcaagaggttttggagcgtttggggtggagaattagccgtatttggtccactgattggttcagtaatcctgatgaggttctatccccgattatccgtcaactccatgagcttaaaacattggctccagatgttgttgtaccttcctacgagtatgtagaaacaattgaatcaagcgctgcagtggcgtctggctcaattgattctcttatgcctaatttggggcttaaggagcaacttaagtattttgccacatatgccattgaggttaagtttcccaatgttgatgctgagcgtcgtttgttgcggcccgcaatgcttgaggttttgctggagcatcagcctttatcacgttccgagtttgttgaacgaataccttattacctgcgacaagcaacagatgtaaacgaagcgcaacgctttcttgaccaagtcctggcattaattaatggcgcagaggctgaagcgaatgatgccgtgtttgggtctgaattggcattattagttaaaggtaataagaataatggcggctctttggtggtccgtcagcgggcgctccgtattgttctggaaagtcgtatgactcgtagtgggcgtcaatttgttccattgccccaaagattggctgtacgctggaacccctgcatgtctgggtataccagcatgagcgggataccgggagcggtgatggtgggttcactaccgttgaacggtatcgtctga

SEQ ID NO: 35659 - DNA, 240 bp, Escherichia coli
gtgtttagttcaatgcgttctgaagatgtattgacgagtgaaaccagtaaatttggtgttatttcgttgaaaggttttttacagtttgccgaaagtggcaaattagattccctcacgacgtatacgggcagggctccggatagtgactttgaggttgctataatggaagcactcaatcacgctgggtttgagtgtgaacctcaggtggggttgcaggattctttattgatctgtcggtag

SEQ ID NO: 35660 - DNA, 465 bp, Escherichia coli
atgagacgtttgcattggcactatcgttcacgacacgaaaagttaattgcatactctaaccgccatttttataacagtgatttggtgatattcccttctccaaatgctgagtctccagagtatggaatcaaatttacttatgtatcaaaaggtcgttgctctaatcaacacaatattgaagaagcccaagcagttgctgaggctgtacttcatcatgcgcaacaccggctggatgaatctcttggggtagtggccatgagttccaggcaacgcgatcagattgagcgcgctattgatgaattgcgccgaaatcgcactgaatttaacgatgcaattgatggcttatatgccatggaagagccactttttgtgaaaaaacttgagaacgttcaaggtgatgagcgtgatgtaatctttatttcctttacctgtggaccttctgagcatggtggaaaggtttattaa

SEQ ID NO: 35661 - DNA, 1266 bp, Escherichia coli
atggcactgactgacgcaaaaatccgggctgcaaagcacactgacaaggcttataaactcactgacggggctggcatgttcctgctggtacatcctaatggttcccgttactggcgtctccgttatcgcattctgggtaaggagaaaactctggcacttggtgtatacccggaggtttctctctccgaagctcgtacaaaacgggatgaggcccgaaaactgatttcggaggggattgacccttgcgaacagaaaagagctaaaaaagtagtccctgatttacaactctcttttgaacatatcgcacgacgctggcatgccagtaataaacaatgggcacaatcacacagcgataaggtactcaaaagcctcgaaacacacgttttcccctttatcggcaaccggaacatcacaacactcaataccccggacctgcttatccctgttcgtgctgcagaagctaaacaaatttatgaaatcgccagtcgtctgcagcaaagaatatctgctgtaatgcgttatgccgtacagtctggcatcatcagatataatcctgctctggatatggctggcgcattgacctctgtaaaacgacagcatcgccccgctcttgatctttcacgtctgcctgaacttctgtcgcgtattaacagttataaaggtcagcctgtcacccggcttgctgttatgctgaatttactggtttttattcgctccagtgaactcagatatgcccgctgggctgaaattgatattgacaattcaatgtggactattccagccgaacgcaaacctctgccaggggtaaaattctcacaccggggctccaagatgcgaacaccacatcttgtgccactcagcaaacaggctgtagccatactgacagaacttcagacatgggctggtgaaaatggtctgatctttacgggagcacatgacccgcgtaaaccaatcagtgaaaataccgtaaataaggccctcagagtgatggggtatgacacaaccaaggaagtctgtggccatggattccgggcgatggcgtgcagtgcattgattgaatccggcttatggtcaagagatgcggttgaacgtcagatgagtcatcaggagcgcaacggagtacgtgccgcgtatattcataaagcagaacatctggaagaacgtcggcttatgctgcaatggtgggcagattttctggatgcaaacagggaggagtgtatcagtccgtttgaatatgcaaaagttaacaatccactgaaaaggtga

SEQ ID NO: 35662 - DNA, 159 bp, Escherichia coli; identical to SEQ ID NO: 8964

SEQ ID NO: 35663 - DNA, 411 bp, Escherichia coli; identical to SEQ ID NO: 14176

SEQ ID NO: 35664 - DNA, 297 bp, Escherichia coli
gtgctgtatctgaacaaccagaatcagctgattgccggtgaaaccctcttcaccggcaccatcaaccgcacggaagtccatccccgggaagtgattaaacgcgccctgcaccacaatgccgctgccgtggtgctggcacacaatcacccgtccggtgaagtcacccccagtaaggcagaccgccttatcacggaacgtctggtacaggcactgggcctggtggatatccgggtgccggaccatctgatagtcggtggcagtcaggttttctcctttgcggaacacggtctgctttaa

SEQ ID NO: 35665 - DNA, 294 bp, Escherichia coli; identical to SEQ ID NO: 32087

SEQ ID NO: 35666 - DNA, 429 bp, Escherichia coli
atgagaatactcgttgctggcgcaacaggaagtattggtattcatgttgtgaatactgctattgcaatgggccatcagcccgtgactctggtcaggaatcggcggaaaatcaagttactccctcgtggaacagatattttctatggcgatgtttcaatacctgaaacacttaccgatttaccgaaagatattgatgccatcatttttacactcggctctgatggtcagggacgtattggcgccagagcaatagattacggcggtgtacgtaacattttgcgaatattcatggatacacctgttcgcatcgccctgatgacaacgattggcgtaactgagcggctcagtagctggaatcaacgtactgaagttcatgactggaagagacgctctgaacgcctggtcagagccagtgggcatacaggatag

SEQ ID NO: 35667 - DNA, 621 bp, Escherichia coli
atgccgttctcacaaaaaaaccgcttgccatgccgcaatcagtcaggttacatttccgctgcacctcataaaacgggtgccgggatttccaccccgctgactatgcacgcgcacaaccgcgccagcggtttttttgtgcgtaccgtatcgccacgtctttttcgcgtcagaattatggtggggcgtacagggccgacttcggtcgggccggattcgtgcgtagccggttgtggaaaccctgtacgtctcaccaccccgagttttccacctctggatggtgagtttttaaaacttactacgtacgaggccacaccatggcaaaccgcaaacagcaccgcgctatcgcggagcgtcgtcacatccagactgaaatcaaccgcagacttttccgcgcatcacgcgtcgcgcagatcatgcacatcaatatgctgcatgagcgcagccacgcgctatcgaacatctattcagcctctgttttcagctatctggcggatgatctgcgcgagcttcagcggctcatccagcagcaaaacaaactccattaattcctgttccgggcctttcctgcaccttgcggcgggaggccttcgcacatctgtaacaagaggattgccgcaatga

SEQ ID NO: 35668 - DNA, 264 bp, Escherichia coli
atgctcaggacaaatcaaaaaatactgaaggatgcgtattttgatagagggcgagatctcgcaaagctttgcgccgcactaaaagagatcagtcagtatttcactgatattgaagatgatatagctaacaaaggcgccagcatttcattagcgaacagagcacattttatgggctttaatgttttcacagccataaaaacattaaaagaccaaaaagaagaaatagaaaagctcaaatacggacataaagccaagagagtgtaa

SEQ ID NO: 35669 - DNA, 348 bp, Escherichia coli
atgaattcgacactgtcaacgtgtatcggcgaaaaaattttattgattcgaaaaagtgaagggctgacaagaaagcaattctttgaacttacagggattccggttaatacccaaagatactacgaaaccggaagacaggaagggatagggagtgaaattttgttaaagattacaaagaattcacgactcaaaaaatatgcgctttggttaacgacagatgaaacatttgaagccggagggcaaatcgccccggctctctctcttgatggctctattcagtcggaggacgatcaggtttcaatcggcattacccaaaaatcaccccgatcaggccgcaatgttggctga

SEQ ID NO: 35670 - DNA, 249 bp, Escherichia coli
atgtgtttaggttgtatgcatccatatccggctggtcactggttttattctttacaggacttactcgacaattctgtgtttatggtttgtttctttgccttttggggggtaacggtttatctcttatcaggagtcatatacagaaaatttaatatatctgaaacagttgagatggttatcatcgctttattaatgatactaatgactctgtctttttatctttgtgcaatattaaaggcttctttttaa

SEQ ID NO: 35671 - DNA, 315 bp, Escherichia coli
atgatggaacaactacagagtgattttttattctggatatttatttacttcctgatagtaggtttaattatcaggaagatagtaggtttaattatcaggaatattcatcttaccagaaaaattaaatccatcgaaaaaaacaaaatatttccagcagaggaatatgctgtcctagtcattgagcagcatatgtccaataaatatattggtcggctagtaacccgttttatgaagagaactaatggtgcacctttattaattgtgtttccagaatacgataatggagacgagaacagagattgtgacagttattaa

SEQ ID NO: 35672 - DNA, 249 bp, Escherichia coli
atgagcgaaatccgatttgtaactctggcatccgacattagcaatattaaagaaatttattctgatgatgagttaaaccgtttgctggaagctgttaatcagaattgcccagccagaattgtgttaagtagtgtggataaggggaaagatgtaccattcaagtggtgttttagaacaatgccagagcgtatttcagttgaagaaatcgatgaaataaaatttatccagaatccttctgaacagagataa

SEQ ID NO: 35673 - DNA, 234 bp, Escherichia coli
atggcatcaaagggaaaaccggacgcccacccttttcaacgtcatttattgctgataatatgcgttccgacattttattcctcgcaacagaatcaagtgtcacggtatcaggttgccccacaacctgataccatctttatctttactttattaacttctcaattgcttcttttttggctttctcctgttctgatggtgggtatgcaaggtcataccagttatcaatacaactaa

SEQ ID NO: 35674 - DNA, 435 bp, Escherichia coli
atggataaacctacagactggcgctctgggacccgccggatattttctaatgaatttaagtttcatatggttgaactggcttcgaaaccaaatgccaatgttgcacaactggcccgggaacatggcgttgataacaacctgatttttaaatggctacgcctctggcaaagagaaggacgtatttctcgtagaatgcctccaactattgtaggccctacagtaccacaatcttttccggcctctccgactctggttccagtggaacttatcgacaccccgcgctgtgctacagatgctcctgctccggaggcattatcagttgcttgtgcggcttcctgccatgtggaattccattacggtaaaatgacactggaaaatccttcaccagagctgctcacggtgttgatccatgaactgatcgggaggggaagatga

SEQ ID NO: 35675 - DNA, 201 bp, Escherichia coli
atggtaatccatattctggaggtgtcgcgtgcgcaactggcacaacggatgaaaatatctggtaataagccggataaacgtcgtcgcagatgtgatgaggctgcggatgcggaagtgttagcacgcatccttgatatcatcagcgatatgccgacatatggctatcgtcgtgtccgggctattctcagacagcagtcttaa

SEQ ID NO: 35676 - DNA, 456 bp, Escherichia coli
atgaatgacgaatttagccgtgcaagtgagcatatctggaaatatttcgaattgcatgcacaacaaagaatgactgttttcaatttttacattgcgataacaggacttcttgctgctggcattggggttactctccaacaaggagggaagtatgtattatttacttcacttatgggggtgtttgtagcatttatttcatttattttctggaaattggatcagcgagtgtcgattttaataaaaaatgctgaaattgctctacaagatcttgaatgtcaattttccaatgaaaagctgaggataatcactaaagataatagcagtaatttgctaaacttaggcattagttcttcttggacttatggaaaatgcttccgcatttcatttgttatagtaggttttactgggatattacttgcgattacaccttttctgatgaaagtctcgacttcttaa

SEQ ID NO: 35677 - DNA, 564 bp, Escherichia coli
atgagaactgataaagaaattttcgtttcagttgatgtggaaacatcaggtcctattccgggaaaatacagtatgttatcgataggtgcttgtgtggcatttgaaccatcaaagcaattttcatgttaccttaaaccaatatctgaagattttatccctgcggctatggaagtgactgggttatcgctggagaagttgcacgtcgatggtttggatcctgttgatgcaatggttcaatttaaagagtggattaattctgtcgtaaaggaagatgagactgtagtttttgttggtttcaatgcttcatttgactggagctttattaattattatttccatgtatatttaggtgataatcctttcggcatcgcagcactcgatataaaatcaatgtattttggcgtttctcacgcctcatggagattaacacgttctagtgaaatagcgaaagttgtcaaacctgagacatatggtgatcatgatgcattacatgatgcccgatatcaggctgaactattccggttgatcgataaattgagcgagaagaaaaaattagatcgatga

SEQ ID NO: 35678 - DNA, 897 bp, Escherichia coli
atgagcaagagtagtgttttcgactcagtgattgatttaccgcagcgcgaactgacagagcgagagaacattttacttggctttgaaagtcgttatgagagtgtccacaaccaactcaacctgctgcttaaccaagggcaactccttgactggagcaagaagtaccataagagcgttttaccgctctgcaagctcgttgctgagcagtatccgcttgttatttttcatggtgatgtaggaacaggtaaaacagcaactgctgagtgcatcgcgaatcgtattgtccgcgagtctcgcactgaagattcggccctctttaaacttagcaatcgggtccgtggttccggaaaagtgggggagatggggacgctactaactcaggcatgggcagaagtgtgcgaggctgcgggtaaaaatcgcagagcaatactgattattgatgaaggggattcaattgcagcttcccgttctcaaaaccacagccatcatgaagataaagtagcagtaaatactttaattcaaggagtggatgagctacgaaaatttggcggccgggttgtggtaattttatgtactaatagactatccgtccttgaccctgcacttcgtaggcgagcagcgattgtcgaagaatttactcgccccgggctcacagaacgagaatcgctttttcgcatggatcttggaggtatgggattgtcagatagtcaatatcgtcaactagcgctggcaactggtgagaaagaacatctgccagcatggacatactctgatatccgtacgcgcctctatcccgcagcaatgtcaagagcgtttcctgaacgggctttaagttttaatgatttgatggaattattgaaaataatgaggccttcccccgtcatgggagatatataa

SEQ ID NO: 35679 - DNA, 489 bp, Escherichia coli
atgagttactcctcaactgaaacatcgacttataccacaatagacgttgaagcagtcatgcgacgcatcacagctgacttagtgatgattgccgccagtaccggtgcgataactgaatcaaaagcacgtgagtatgctcacgatatagaactcttagcaaaaaatggatatctggattacgtcgatgtgacccttataagcaatggcgttgaacagaaagcaacccggtttcatgtgaatgagtccggagaattggcaaatgacagacctggagacgctcgttggccgagaattcagggggcttatctgcggattgttgtgaacaaccggagtacctacgatcaggctgcgaggcaaaagctttcaggtaagatgaaaatatcgtggtcgccatgtagtgatgacatcagtcattcaggtttgacccaaagtggtggtcgtgaatattccagcaatggttatggtatgcaacgtaaggattacaattaa

SEQ ID NO: 35680 - DNA, 945 bp, Escherichia coli
atgccactcactaatactcagatccgatactacgacagcaatgtactgcgtttgcctaaggataagcgtgaaacctacaatgcccaagtagatcggcttattacagcgttacgtaagaaactgaaagatcaggataaaataacaataaaacgtgtcgtcaaagctggttcgtttgctaaacacactattctacgcaaaacctcagacagtcaggtcgatgtagatgttgtgttttacgttagtggagagaaagttgctgaggaaaccttcgcaagcctgagcgaaaaaatttacgaagccttacttaaaatgtatcccaacaaagctgtagaagatttcgagattcaacgtaaggctgctactgtttcttttgtcgggactggattagatgttgatattgttcccgtcatcgaaaatccggacaaagaaggctatggatggcagtttgaccgtatcgatggttcgaagacagagacttgtgctccttgccagatcaaatttgtgaaagagcgcaaagaccaagacccggactttcgtactttagtacgcttagctaaacgttggcgtaccaacatggaatgcccacttaagtcatttcatatagaactaatcatggctcatgtactagaagtcaatggaaaagatggttcgttggagaagcgatttcgggattttctactgtacattgctgaatcaggattaaaagaagttatcaccttccctgaaaatagcactataccagcattttcccatccagttgtcatactggatcctgtttgcgatacgaacaacgttaccagccgtattaccgaggatgagcgaaaagagatcgtccggattgctgagaaaagttgggcgacggcaaattttgcgtcggtagaaggagactatgatatctggaaggagctgtttggtcgttcatttaaagtggaggatgcagcatga

SEQ ID NO: 35681 - DNA, 900 bp, Escherichia coli
atgccagataactttagagaaggggataagcaagacagccaaaaaggacggcaaggtgcgagatggggccaagagcgtcgccttgaatttattgattatcgacttcgatgggatgggcaaatcaatcgtagcagcctcactgattttttcggcatatcagtacctcaagcttcgctggatcttagtgaatatactaagttagcccccgataatcttgagtacgatatgagttcccgagtttaccgttcaacgaaattgtttcagccagtttatatgaccagctctctggaatgttatctgaatgatttgctgcaagtggcaatacaacctgaaattcattttggaagctttctgggctggcgctcacccgttgcagcggttccacgactgttacgtagactggacactgatgtcgtaagtcaaatattacgagctatacgtgaaaatgaggctgttcatgttatttatcaatccatgagtgaccctcaaggcagtaaacgaaccttgactcctcattcattagtccatgatggttatcgctggcacacaagagcatggtgtcataaacgtggtgaatatagggactttttattgtcgcgaatagtgcaggcacaaaacgccggacccgatgaagagagagctaatggtgatttagcgtggaatacattcatcaaaattattcttatagcgcatcctggactatgccttgctcaacgaaaccttattgagagagattatgcaatgatcgacggagaaatccatctggaatgccgacaagctttgctgcactaccttcttttccagttaaatcttacagagactcagtcacatcaggcgccggaagcattacagttagcattaaaaaacaaggatgaaatctatgccttacttaaacagtaa

SEQ ID NO: 35682 - DNA, 1518 bp, Escherichia coli
atgacaaatactaataatgagtatgttctgatcgctggaagtatctccaaaaatacagaaaaactttatattgatcgagcacatagtttcgttcgagcattgacgaagagcatccttgatgcaaatgtgggactagttgtctatttggcaggagaacctgttaatgaaaatggggctctcctgaccttcgactggacgatagtaaaagaagctgtagatttaatggagaattatacgccagcccaccaactcaagatcgtcacgtcgcgttctgcaatgcgggagaaaatgtctgaagagaatcggatgcttattcgtaaacttcaggtagctagatttgctgatgtcagctatctagatgatgatctcattactggaggaaatattggaagcgagcaggttgatgctgccacagccatgattgcattaggtggaggaaaaggcgtttccgatcgtgcgagtaaaatgcgtaaagccaaccaccccatattaccgtttgacttggagcttgggggaatttgcgatgacggaaaaggtgctttaggcctacatgcacatttttatgcagagccgctgtctatgttcccttgcaccggtgaagccgtaaaaaatcagctcgacactttatcgttacaggaaccttactatggactggaacgactttcagaaatcgcagttgaattgcttaaagctgaatgggctgcacaacagttgctgcatactccaagtgtgttgattttgacagctctacccgttgaacttgctgcagccaagaaagtatttggcatagctgatgatgaatctccgcggctcacatcaaatggaatacatttctggtccacatccatacaacgctcagatggcccagtaactggcatagtggcgtctttcgctagtgctggaaatgtgaatgcttcagctattactaccatgttgttgtcggaattcaaaccccaaaaagtcttgatgatggggattgcggcggggttgagagaaaaaatggtgctaggtgaagtcattatttctgagcgtgtcatttattatgaaagtgcagccgcattagaaggtgggaagtttgctcctcggcctgaaatattatgtctccatatgccaactaaacaaaacctcaatacttaccttgcaacaacgtcactatccgcacgtcttggcgaacgggcacaggctataggactcgaaatgcctgtaaattcgcaggctggagacgtagctgctgggataattgtttcttcagccactatcgcatcaggagagcttcttatccgcgatcctgctttactagaacgtttcaggtcgcttcatgacaaagcctgtgttgccgaaatggaagcctatggggtatttgatgcctgcgaaaagcagggggttcctgcgcttattgtgagagggattagtgattttggcgacagcacaaaagacgacgctttccattcaattgcttcagtagcggctgctattatcacagctgattatctacagcatggatggatacgtgcatga

SEQ ID NO: 35683 - DNA, 516 bp, Escherichia coli
gtggggatcgcaatccagcaccaaccagcacatacaccggaacacactaaggtttatcagactgacaatgccacgctctgtcgtgggaatgcgctggaaatattgccgctgattgagccagaaagtattgatgccttaatcactgacccgccttacagttcgggcgcgacacacaaggccggacgcaccaaccagggcagccacgcaaaatatctgaacggcgagagccttcaccgctttgatgaatttgcgggtgaaaacatggatgcccgttcgtgggcttactggacacaattatggatggcacaggcacaccgcgcagtcaggccgggcggttatgccctggtatttactgactggcggcaactgcctgctttaaccgatgcgtttcaggccagcggttttacatggcgtggaatcattgcgtggaacaagggagggggtcacgaacaccccataccgggtatttccggcatcagtgcgaatacatcgtctgggacagtaaaggccatttag

SEQ ID NO: 35684 - DNA, 957 bp, Escherichia coli
atgacggcacaacaaagtgatgcgctgcgtgagattgctaataaagccagagttaccaccattcttcagagtaaggcctggaaagatacccagcgaatactgcagcgcagcggactcgtgtacagaggagaacagtcagagccgtttgatccggaaaaacattttgactgttatacggtgcgttatctgtaccagcttaacataattgcacttgagctaaggtcagatacacggattaaggttgaggtaggtcaatggtatcgcatgacgggtaaacgtttatcacttaatgtcccgccttttatgctgatccagcgtaatatccgaagaaaagtggatgggttcagacaatcagaaggtaaaacaacaaaaaaaccgactcaaccgttcacgggcagtttgtatgaggttttgagcagggatattgattcggctaagctggacgcatggattgctgaaccaccgctgacaccgcaggaagtgcgggaggggaggcgtgtcacagattttaatccatgggcgctgtcttcgtttatttgccgttcagcatccccgacgtttgaacttttttaccaggaatataagcgactgggattaaaatctctttttgtatcaggggtaatgtttgaacaatttttaacaggactaagtttcagaaaatatgggtacagggttgaatctcagttactggaatcactgggaaatgtgatgtttttcatgctgctttatgacatggaaaatctggataagtttatagaagaactgatgaacataaatgttcaaagtgaagattcgaaggaaaaagggaaatcacgaaaagagagaatgctggagtgtatcaactcatatatccgcgatgtttatggaagcttcctttgtacttcaaaagagaggtacgaacaacataaacgcaaaaacagcagcaaaaagaaaaactgttccggtggaactcattaa

SEQ ID NO: 35685 - DNA, 846 bp, Escherichia coli
gtgcattcaccagatgaatctgctcgtgtttctcgtcggctggaatatgagtatcaccgacataacgataaattacgttctgataatgcaggcagagatgttgttccggaatgggttcaaaaaaaacctgtagccgcattctgggtatggtggttcatattacgtgttcctgacaccttcacacgaattccattgatttgggagcagtctgaaaacaagaataacctgtacgccaggttgtttcatagttctcctctcccgagtgatgataaatcccggattgttacaatcgataaatggctccgggaatacagaaaagttgtcgacgcagtaacagtcctggaattcttgtctaccattcgttttttatggtcgtatgctgaaaaagtgaatcccatgaaatggcttgatcatcaaacgattcatattgactgggcatggagatatttgtgcaggcataattccggaaacgattctctctttcctgtcattcagaattttaaaccctgtaacgacagagaagcccgtctcgccgtaatagtttctgtccgtgatatatttattaacatacgaccttccactattgaacaacagcatttaaaagatctcattcagcgtcagaatgattttatcagacgcatgaaatattcgtatcagaaaacgttccggcatgaaaaaatggagcgacgggtacagataagtgccctgatttctccggaagccaggaatgcactccgggaaatggcaaaaaagaataatctgacgcaggctgaaatactggataaactcatcttatcagctgatcgtctgtttatgcagaaaacagcaggggattattcccgttaa

SEQ ID NO: 35686 - DNA, 1185 bp, Escherichia coli
atgagtgaaactcgttttcatggtgcccgtgtcacggaaagtaccgacctggtaacagcgattaatgatgttgattccagcgttatcggtatcgtggcaacggcggatgatgcggatgcggagctgttcccgctgaacaagcccacactgctgacccgcgtcaatgacgtgctgggaaaatgcggtactacggggacgctttatcgtgcgcttaaggctatcgcagaccaggtgagcacaaaggtgatcgtcgttcgcgtggctgaacacaaaaaagaaggcggtaagacgcaggatcaactggttatcggtggttctgaggatgacggcagctatacggggatgtatgcgctgcttgttgcagagcaggatgaaagcatcggataccgtccgcgcattctggctgcgccggagctggacacggaggcggtgacaaaatctctgtgcgtgattgcaggtaaactgcgcgcgtttgtgtatgcctcatgtcatggctgtggcacgatggccgaggcaattacctaccgccagaaattcaacgaacgtgaggtgatgctcttatggccggactttatcgcctacaacccgaaaagtggcaaaaacgaaacgttccccgcgcctgcctatgcgtgcggccttcgtgcgtacattgaccatgagcagggctggcacaaatcgctgtccaacgttccggttaaaaatgtgctggggatgtccaggcatgtgttctggtcgttgcaggccgaagacagtgatgccaacagcctcaacaacaaagaaatcacgaccattattcgtcgcaacgggttccgcttctggggcaaccgcacaccggaaacgaacgcctacatctttgaggtgtatacccgaaccgcacaggtgttggctgattcaattgcggaagcgcagtttgaaaccatcgacagtccactgacgcctgcgaacgtgaaggatgttatcagtgccatcagggcaaaactggattcactggttactgccgggaaactgattggcgcggagtgctggtatgacgtggtggataacagcaccacggatttacgtcaggggcgtgtgcgtattcgctacaaatatacgcccgttcccccgctggaagacatggagctttaccagacgtttactgatgaattctttggtcccgcatttgcggtgctgggaggtgcctga

SEQ ID NO: 35687 - DNA, 288 bp, Escherichia coli
atgaccgtcaatagtgatagtccctttatttaccacatcaacagtcccggcatcctttgccaggattccgtagttcccctgagcccccctgcccaaaaaaatagtaccttcattaacgactttgtttgcaccattttgtacttcaatcgcaacagaacccacagccgaatgagtcgcagttttatcctccgcaatacctacattgatgctcccgaaggccgagttaataaaagagcctccagctccaacatttacacctcgtgttttgccattattatcattagttga

SEQ ID NO: 35688 - DNA, 198 bp, Escherichia coli
gtgagcaaaattgactatcaggcactgcgtgaggcagcacaaaactatcagtcgacgctggcgtggtatgaggccatcccggatagcccatgctctgaggttgattgtaggacagaacgccccgtgtcacagccagtaccaaccgcacagataaccagtcagatggccggaaatatccgggcgttatttcccgaataa

SEQ ID NO: 35689 - DNA, 741 bp, Escherichia coli
atgtcaggggcagttaacagtatactggaggtgaaatcaggcagaacagaatatatcctctcaccggtttttgagcctgtatggaatcagaccgggaaaatatttgcttttgaaatgctctcggatatccgttcagcaaaagacgggaggaaaatctgcgcgtctgtttttttcagaagtgcacctccggatattcagtacaaaatactcatcagtcagttgaagactgcggaaacgcttcataaatggtgtctgcagaagaaaataatgctgagtgtcaatatttcccgggtggtagccctgtatctgagaaaacatggcatcccggggcggccgggaacacatatcaggcttgaggtcagtgaggactttccggctgtggcgttaaaacccggtgatgaccccctgttacgttttttgtcagaacgtttcaccctctggctggatgatttcggctcaggaaatgcaggcttaatgtggggactgtccgggatgtttgaacgggtaaaaataagtcatgagttttttcattatgccctgaaaaacaggtgtgcaatgccgcttctccatgctgtggcagacactgttgcctgtcataaccggggcgtgatacttgaaggtgttgaaaatgaagcgttgttccgtattgccagagacatgaatgtccagggctgtcagggatggctctacaggcgtgtggaagctgatgaattatccgcgattactgagctgcatggataa

SEQ ID NO: 35690 - DNA, 1278 bp, Escherichia coli
gtgacggcactggcgcaggcccatccggtactgacgcgccagctactgatagcaggcggtgcgttgctggcaatgactgcaacgattggctcgttgtcgctggttattggggtgctttacgggaaactggccaccttgcgtcttggtttcgacattcttacccggtcaatgaatgtcgtcagggtgttgcctgcgctgtggggaatggtgacgggttctgtttctttgctgggaggcgctatcggggcgttgttcagtccggttggtcttatcgtggctgcgcttgccggagctgccgttcttatctggaaatactgggatcccatcagggcattttttgccggggtgttcagcgggattatggaaaggctgaccccgttgcgcgaaacctttgaacggtttggtcctgtttttgacgcaatcggaagcgggataagccaggtgtttaactggtttaaatcgctgctgtcaccgatggagtccagcaaggaaacgctggataaatgtaccagtgctggcgagatattcggtaacgttcttggcggtgcgttacaacttgttctgacacctgcaaaaatgttgctggatacgctggcgtggatacttgaaaagctcggtgtgcttccggatgaagcggaaagggcgcgcaagaaaatcgaagacgcacagcgtgcggccattcttcaggacaaggttgctctgtttcagggagacattgcgaaaatcaatccgccgaagcctgtggaaaatggcaatggcaccggaggtgataaccccaaagacaacaaaccgctcacagacagcaataccgggacgctacgcagactcagcaaaattgctgataacacaggtaagctggttgatgagacgaaaaaacgcattggccccggtgatattgtctttaagaacctgccccgcgcacttgccgttcgtggggagtggcaggaacggaagattgcgcaggccagtaagcctgcccccgcaattaatatcacccccgtggtcccggctccgctgcctccggcgctggtccctgttgttgcggccagctcccgcccggtggcggaggccatacgatcgccagtggcatcagttcctgcaacttcccgtaaccgggagcctgttgcctccggatttggtggtgaaattcatgtccatctgcataacgttgttacgcagaatccccgcgaactggcgaaactggtcggtgaaatggtcagggcagagatggaacggcgcgcccgtgccggacgtggcagtttttacgataaagattga

SEQ ID NO: 35691 - DNA, 339 bp, Escherichia coli
atgccggactttcatcgcggggatgactggtggcgtaacggtcagaatctctatcttgataatctggaggccacagggctgtatcaggtgccgttgtcagcggcgcagccgggcgatgtgctgctgtgctgctttggttcatcggtgccgaatcatgccgctatttactgtggtgacggcgagctgctgcaccatattcctgaacaactgagtaaacgagagaggtataccgacaaatggcagcgacgcacacactccctctggcgtcaccgggcatggcgcgcatctgcctttacggggatttacaacgatttggccgccgcatcgaccttcgtgtga

SEQ ID NO: 35692 - DNA, 267 bp, Escherichia coli
atgacccgtgttcaggctacattttctggaactcctgatgtggatgataatgcttattataaaaatacaggcaccgcagggggggtgaaaattgagttggttgataaagctagtccaagtgtaaggtattcaaacaatactcaaaaaactgttaatgtgaataacggaaatgctatttttgaactgcaggcccgggcagtaagcaaagggggggttactcctgggaatataagatcagaaattacggtggcttatacatatttataa

SEQ ID NO: 35693 - DNA, 180 bp, Escherichia coli
atggtttcggctcaggcgttcccagatgcggttcaccttcctgtctgtgcgctgatcgcgacggtgtgtcagtctgccgtctgtgatctccagtacatggccattaaggcgcagcattcccgtcttcatcaggtgctgtatatgttcatcgctcagttttatgcccagttccccggctga

SEQ ID NO: 35694 - DNA, 459 bp, Escherichia coli
atgccggataactttggccgtactgctgccacggtactgaccgaagaaatctgcaacccggtactgacgcaggccgggacggatgccgacgcggatttgtccacctttatcgaaccactggacacactttgggaaattgtcgccaaccaggatatgccggacgaagtgcgcgccaaattatgcaaggcgtgcgcctttgcccgcagtggcctgagcgatgcggacagcatggcctcatcactgaagctgctgcgcgaagcgatgcacctgaatccgaacgcaggtgtgaaacgcgagattgcaaccctttcccgcgccctgaaaaaagccgattccgcagccgcaccagaagatgccagcacaccgcaggcgcaggacgaaagcagcaaaagtaaaaagacaacgcggaagcctgcaacacgaaaaaccaccgcgacgcagaaggcgaagcgcggttaa

SEQ ID NO: 35695 - DNA, 315 bp, Escherichia coli
atgagagttgagcagaataatttcagggacatgttctccgtttatctctccgttacggcgcaggcgcagcatgtgttttgtgtatccccggcggtccgggtcgcgcacacaggtctggcaggcgaagaatggctgaaagccttcccgctgcaggctttccagtacggtgatggtggggatgtatgtatagttccggctccgggaggtgtgcttatcttccccgaaaatcccgggtacatagtgcctcagttcttcatgtgtcagtggacggtcacggcgtatctggtttgcagcataaccaaaacgactggctaa

SEQ ID NO: 35696 - DNA, 201 bp, Escherichia coli
atgaaagtgaaggcactggaaggcgacaccgtggattcgctctgtttccggtactacggcacgacgcagggcgtcaccgaaaaggtgctggatgccaaccccggactctgtcagcaggtatttctggacgccgggcaggaagtggagatgccggagccggagaagaagaaacgagaaatgattcagttgtggggggagtag

SEQ ID NO: 35697 - DNA, 195 bp, Escherichia coli
atgattacatcactatgttgttgtgatataaaaaaccaaatggtgagatatgtatatttaaaatataaagagaattaccatgaaatcagaataattatccaaaaagaacataagctgcagacagttataatgcatgctgctcatcttgacaatgtcagggctattctgttacttattccagtttttcaggggtaa

SEQ ID NO: 35698 - DNA, 141 bp, Escherichia coli; identical to SEQ ID NO: 15375

SEQ ID NO: 35699 - DNA, 195 bp, Escherichia coli; identical to SEQ ID NO: 10303

SEQ ID NO: 35700 - DNA, 309 bp, Escherichia coli
atgggtggagtaaacggcgatgtatacgtagccgcaactgccaagggtatcggcttcgcaggtgaaaccattgtggtacagggtgacacagtgggcatggcgaggattcatttcaccagtagtcagcatcgattccatctggctaataaaatgcgggaatgccacatccagcttaagacattctgcttcgctgaacttaccggtgatactggcccggtcagccagatagtgcagccggtttccctcctgtaccagacgagcgccaaagcaaggtgtcacattacgattcagaccccacttgagaaatga

SEQ ID NO: 35701 - DNA, 162 bp, Escherichia coli; identical to SEQ ID NO: 15457

SEQ ID NO: 35702 - DNA, 819 bp, Escherichia coli
atgcgattagccagtcgttttggtcatgtaaaccagatacgccgtgaccgtccgctgacacatgaagaactgatgcaccatgtgccggggattttcggggaagagaaacacacgtcccgaagccagaactatacgtacatccccaccatcaccgtactggaaagcctgcagcgggaaggcttccagccctttttcgcctgccagacccgcgtacgtgacccgggccgccgggggtataccaaacacatgctgcgtctgcgccgtgacggggagataaacggacaacatgtccctgaaatcattctgctcaactcccatgacggtacctccagctaccagatgctgccgggttacttcaggttcgtctgccagaacgggtgcgtctgtggccagtctctgggggaagtgcgtgttccacaccggggagacgtagtggagaaagttattgaaggggcttacgaggtggtgggcgtgtttgaccggatagaggagaagcgtgatgccatgcagtcgctgattctgccgccaccggcacgccaggcgctggcacaggcggcactgacttaccgttatggtgacgaacatcggcccgtcaccaccgccgacattctgacgccacgacgccgggaggattacggtaaggacctgtggagtacttatcagaccatccaggagaatatgctgaaaggcgggatttccggtcgcagtgcaaaaggaaaacgtatccatacccgtgccattcacagcatcgacaccgacattaagcttaatcgcgcattgtgggtgatggcagaaacgatgctggagagcctgcgctga

SEQ ID NO: 35703 - DNA, 477 bp, Escherichia coli
atgcagcagctttcctttctgcccggagagatgacgcccggcgagcgcagtctcattctgcgggccctgaaaaccctggaccgccatcttcatgaacccggcgtggccttcacctccacccgtgcggcacgggaatggctgattctgaacatggcgggactggagcgtgaagaattccgggtgctgtatctgaataaccagaatcagctgattgccggtgaaaccctcttcaccggcaccatcaaccgcacagaagtccatccccgggaagtgattaaacgcgccctgtatcacaatgccgcagccgtggtgctggcacacaatcacccgtccggtgaagtcactcccagtaaggcagaccgccttatcacggaacgcctggtacaggcactgggcctggtggatatccgggtgccggaccatctgatagtcggtggcagccaggttttctcctttgcggaacacggtctgctttaa

SEQ ID NO: 35704 - DNA, 285 bp, Escherichia coli
atggtgttggcaatgttcccgcttatctgggtcggcgtagtttgtgttattggtgcatttagcgcctggtttcatcgttgctggttgttggtgcctttagcaccgctttccgttgtgtatgtattattagcttatgccatctggattatttatggacttattgccttttttactggacgcgaacctcagcgcgacaaacccacccgctattccgcactggtggaagcgtcaaccgcttattcccaaccttctgtcacaggaactgaaaaactatctgaagcttaa

SEQ ID NO: 35705 - DNA, 312 bp, Escherichia coli
atgtatattatttacgacactgtaggtttaacatacaagaacagctttcctgatgatgaaaaagccgctattctggaatgctataagttgaactacagtaatattcccatttacaaggcagaagtagccaaattcaaagacggctcacccgataaactcaaggacatatccccataccaaaaaattgaagattctaatgaggaatacgacaaccttcacgacgaggaaaaagtgaaattattcgaatatttagagaaagagcatggtgtagaaaatatctctccagttaagctaagaagaccgagaccttaa

SEQ ID NO: 35706 - DNA, 1029 bp, Escherichia coli
atggatttattagctgagagtattactgaagtcgctgtctctggggaaattgctaacaccgatcgtgtgttaaatatcgcttacggtattgaccgcaactttttatttggtgcggcagtatctatgcaatcagttgttatgcataacccggaccttgcggttaagtttcatctctttactgactacattgatgaagattatctacaacgtgttaatgcttttaccagcaaaaatgctaacgttgaagtaagaatttataaagtatccagtgcctttattgatatcttccccagcctgaaacagtggtcttatgcaacattcttccgtttagttgcgttccagtatctgagtgaaactattgaaaatctgttatatatcgatgctgatgtcatctgtaaaggctcattagctggattgcttgatattaattttgatggcgataagttcgcggctgttattaaagatgtgccttttatgcaggaaaaaccagcgaagcgtctggctatagagggacttccagggaattatttcaacgccggtgtagtatatctgcagcttgaagcatgggcgaaaaatgattttatgaataaagccattgctatgctggcaagtgacccgcagcacacgaaatataaatgccttgatcaggatattttaaatattctgttctttagtcattgtatttttattagcggcgattatgattgcttttatggcattgactatgagttaaaaaataaaagcgatgaagattataaaaagaccattaccgatgatactaagctgattcattatgttggcgtaacgaagccctggaacgactggacgaattatccctgccagaagtattttaatgaggcttatcaggtttcttgctggaatgatgtggcgtttattccagccacgaatgaaaagcagtatcaagtgaaataccaacatgcaaagaaaaatggtgatacgtttaacgcttttatttacttcattaaattcaaattaaataagtataaaagaaaactatttgggcaataa

SEQ ID NO: 35707 - DNA, 693 bp, Escherichia coli; identical to SEQ ID NO: 1737

SEQ ID NO: 35708 - DNA, 1374 bp, Escherichia coli
atgcttcgcattaaacctctttttattctttgcgccgccttactgacggccatacccacagcgtcagcggatgtgaacagcgacatgaatcagttctttaacaagctgggcttcgtctccaataccacacagccgggcgtctggcaggggcaggccgccgggtatgcctatggtggctccctgtatgcccgcacccaggtcaaaaatatccagctgatttccatgacgctgccggatatcaatgccggatgtggcggcatcgacgcctatctcggctcgttcagttttattaatggcgatcagttgcagcgttttgttaagcagattatgagcaatgctgccggttacttttttgaccttgccctgcaggcaacggtgccggaaatcaaaaccgcaaaagacttcctgcagaaaatggcaagcgacattaacagtatgaacctcagctcctgtcaggtggcgcaggggattgtcggaggattatttcctcagactcaggtgtcacagcagaaggtctgtcaggacattgccggtgagagcaatatttttgctgactgggccgcgtcccgtcagggctgcacggtcggaggacagtcatcgtctgttcgtgacaaggccagtgacaaagataaggaacgggtgctgaagaacatcaatatcatctgggactcgctgtccaaaaacaggatgcttgatggtaacaaagaactgaaagaatttattatgacgctcaccggtacgctgatttttggggaagacagcgagattacccccctgccggcgcgtaccactgaccgcgatatcctccgggcgattatggaggggggaacggcaaaagtttatcactgcaacgattcggacaagtgtctgaaggtggtggcggatgcaaatgtgaccatcgcccgggataaagccctgaaatcacagattacaaaactgctcaccagtattcagaataaagcggtgagtgatactccactggatgacagggaaaaaggcttcatttccagcaccaccgtccccgtctttaaatatcttattgacccgcagatgctcggtgtgtccagcagcgtggtttaccagctgacggactatatcggctacgacatcatgctccagtacattcaggaactgcttcagcaggcccgggccatgattgccaccgggaactatccacagaccgtgctggacagtgtgctggagaatctgaatcaggcacagcaacagattgcggttttccaggggcaggtaaaggtccagcaggatgcattgctggttgttgaccgtcagatgagctatatgcgccagcagctgtccgcccgcatgctcagccgttaccagaacaactatcacttcggagggagcacgctgtga

SEQ ID NO: 35709 - DNA, 234 bp, Escherichia coli; identical to SEQ ID NO: 10186

SEQ ID NO: 35710 - DNA, 222 bp, Escherichia coli
atgaactatgccggacatgaaaaacttcgcgccgaagtggcggaggtggccaatgccatgtgcgacctgcgtacaaccatgaatgagatggagcggcggtacagctttaatgctgacaccctgccggaacgtctggtgcgtcagacgttgtttcgcgcaaaccgcctcctgatggaggcatataccgaaattctggaactggattcctgcttcaaagattga

SEQ ID NO: 35711 - DNA, 858 bp, Escherichia coli
gtgactgatcttcaacaaacgtattaccgccaggtaaagaacccgaatccggtgtttacaccccgtaaaggtgccggaacgctgaagttctgcgaaaaactgatggaaaaggcggtgggcttcacctcccgttttgatttcgccattcatgtggcgcatgcccgttcgcgtggtctgcgccggcgcatgccaccggtgctgcgtcgacgtgccattgatgcgctgctgcaggggctgtgtttccactatgacccgctggccaaccgcgtccagtgctccatcaccacgctggccattgagtgcggactggcgacagagtccggtgccggaaaactctccatcacccgtgccacccgtgccctgacgttcctggctgagctggggttgattacctaccagacggaatatgacccgcttatcggctgctacattccgaccgacatcacgttcacaccggcactgtttgccgctctcgatgtgtctgaggatgcggtggcagctgcgcgccgcagtcgtgttgaatgggaaaacagacagcgcaaaaagcaggggctggataccctgggtatggatgagctgatagcgaaagcctggcgttttgtgcgtgagcgtttccgcagttaccagacagagcttaagtcccgtggaataaaacgtgcccgtgcgcgtcgtgatgcgaacagggaacgtcaggatatcgtcaccctggtgaaacggcagctgacgcgtgaaatctcggaagggcgcttcactgctaatggtgaggcggtaaaacgcgaagtggagcgtcgtgtgaaggagcgcatgattctgtcacgtaaccgtaattacagccggctggccacagcttccccctga

SEQ ID NO: 35712 - DNA, 858 bp, Escherichia coli; identical to SEQ ID NO: 6882

SEQ ID NO: 35713 - DNA, 327 bp, Escherichia coli
atgactaaaaatactcgtttttcccccgaagtccgtcaacgggcagtccgtatggttctggaaagtcagggcgaatatgactcacagtgggcggcaatttgttccattgccccaaagattggctgtacaccggagactctgcgtgtctgggtacgccagcatgagcgggataccggaggcggtgatggcgggctcaccaccgctgaacgtcagcgtctgaaagagctggaacgtgaaaatcgtgaactgcgccgcagtaacgatatccttcgccaggcttccgcttattttgcgaaggcggagttcgaccgcctctggaaaaagtga

SEQ ID NO: 35714 - DNA, 261 bp, Escherichia coli; identical to SEQ ID NO: 17248

SEQ ID NO: 35715 - DNA, 258 bp, Escherichia coli; identical to SEQ ID NO: 25290

SEQ ID NO: 35716 - DNA, 261 bp, Escherichia coli
atggatgctggatttattttacctcaagaaaaacaacaggttcttgatgaaataaacagatggcttaacacagtctatccctacaaaaaaccacctgcacatctttgtgatccgattgatagggccagtaaatttttccgtattgatgttcacaggaaaaaattcagtatttatcttagacttggaaaaacatgggcatcatctcagaggttatggctcagcgttgctgaaatgccttgcgaaaatagcagaaaaatataa

SEQ ID NO: 35717 - DNA, 276 bp, Escherichia coli
atgagttatccctggagcgtgagcgccagctggaaatacaggaacggacacaggatggcccttcgctgggatggtaatcagagacaggctaaaatgttgtcagcgcgtttccggtgcattttttgggataatggttggttcggggcaccgggaacgcgcttcagtcagaccttgctgaaaacacaggaacgcgttaaaacgcatacgggcgcgattctggtgtgtcttttgttgctgtgttttgcctctattgccagatcgcgctcattcccctga

SEQ ID NO: 35718 - DNA, 519 bp, Escherichia coli
atgagcaatcttttacagacgggcgcggagttcgagaaaaagctgaaagagagagccgaatctacagagacaatgctgaacgacgagttcagcaagctcgaaaaatctgtaagcaaggctgtgacatcaaacgagacgaaaatcaaagacgctatagccctgttcacagcttcgacagaggaatcactgaaaaaacaccgggaaggggtgaaagaggcgatgatgcagcacaggaaggacgtgttaaagctggcagggaatacgggcatgatgttactggggatggtccttttcctgtttaccgtgagtggcgggacgctctggtatcttggcgggatgatacaggcgaacctggaagaaatcaggatacaggaagaaacattgcagaaactgaacgcgaagacatggggcgtggagtttgtgcaggacgggagaaggaaatttctggttatcccgcaggggaaatcggcaacggtgattccctatcaggggaaggactgggtacaactgacggagtga

SEQ ID NO: 35719 - DNA, 519 bp, Escherichia coli; identical to SEQ ID NO: 35718

SEQ ID NO: 35720 - DNA, 162 bp, Escherichia coli
atggaaaaagcgcctccggcgcggccttttgttggcctttgcctttttgctcacatgttctttccggccttatcccctgattctgtggataaccgtattacgcctttgggtgcgctgataccgctcgccgcagccgaacgaccgagcgtagcgagtcagtga

SEQ ID NO: 35721 - DNA, 222 bp, Escherichia coli
atggcccttcgctgggatggtaatcagagacaggctaaaatgttgtcagcgcgtttccggtgcattttttgggataatggttggttcggggcaccgggaacgcgcttcagtcagaccttgctgaaaacacaggaacgcgttaaaacgcatacgggcgcgattctggtgtgtcttttgttgctgtgttttgcctctattgccagatcgcgctcattcccctga

SEQ ID NO: 35722 - DNA, 1764 bp, Escherichia coli
atgatttacacaacaggcacgatagccgttagcggaaaaacagttactggagctggcactgaattcaatgccgcattatctatgattagagtgggttgcacccttattgccattagcaatccggtgcagattttctcaatcacagaggtaaaaagcgcgacaagtttgtcagtaactccggcggcaagcccggcaattccggctggaactaaatatagcatcctgctttcagattcgatctctgtggatggccttgctcaggatgttgccgaaacactgcgttactatcagggcaaagaatcagaaatagctgacgccgttgaattttttagcgacaacaaagatgttatttcagcctcgaaattagcatcagaatcagctaccactgcaaccaacgcggcaacaacagcgacaagcgccgctgattcagccaagacatacagagacgaggcccgcgaatacgccaatcagacagcgcagccttacgcgtatgttttgcagccgctgccggacgtatggataccgtttaacgactctctcgacatgattaccgggttttccccttcctataaaaagattgttattggtgaagaagaaacaacagtaccaggtgacaagatcgttaaatttaaacgcgcgtcaaaagcaacttatataaacaaatccggtatgtttaaggaagcagccattgacgaaccacgttttgaacgagaagggctgctgattgaagggaccagaactaactacattataaacggtaacactccatcaagctgggggtgctcgccgtcagttacgacaactgcaagcacggatgccttcggcttcctgtacggtaagtgcgtgatcggggccgatgatgtaggaaaaactacggcgttaaatatggcttccgtaattgcggctaacagtcttgatacgtctggtgacgagaaatatgtaacggcatcatgccgattccggtccgacaaggatgtacgtctgcgcgtgcgttttgcagagggtgcggatcatggtagtatgactttctccggcgacacatacattaaacttagcgacttgtcagtgtctaaaactggtgacgctgcggaacgtatcacggtagaagttgagagagacgaggtcaccggatggaatcgcgcggtggtgatgctgcaatccaccacggcattggttaacgcacagttccagatctcgccagtgagtagttatgctgccggggattatatcgaactaaccacaccgcaagttgagctaggaataggggcgtcctcatatatcatctccggcacatcaccgacaacgcgcgccagcgatatggtcaatatcttcgcagaaaacaatctatcatcccgaccgttcacatcactggtcgaggtgcacgtaaactggggtacgccgccaaaccaagcgcctcgaatttttgatgttggaggtcatgggagtgatgataattacttatcgcttgggtttgttagcacgggtaagattgcggctaacgtaggaatggtgcaaccgttaattcagcccgaaagccgtcactttattgctggtgttcgcgcgcagcagaatctttcggtcgatgccgtgtgcaacggtaaatatacaaccaacccaagcggcaatgtattcgcagtcagtgctacgtcaatccgttttggcgggcaaaccacgtcgggggtgcgacatctttttggacacattagaaatttcagggtatggcacaaagcattgaccgatgcgcaattgagcgagattgtttaa

SEQ ID NO: 35723 - DNA, 438 bp, Escherichia coli
atgtggaaggtatacagatctcccaacgcaaaaccaggcgacattatcagggggactaaatctagaaacaagcacttgagagtaaatttaaacagaaaatattatcaagttcattgcattatatgggaaatgcacaacggcccgataccggaaggaatggaggtagaccatattgaccatgacaaatggaataataggttgccaaacttaagactcgttgacgatgagggtaatgcgcataatatgagcttgtttaaaactaacacaagcggcgtttccggtgtcggatggcatagccagcgtaaaaaatggcgagcaacaatatggcataaatgcaagcaaatatctcttgggttgtttgataattttgatgatgctgtaatggcgcggcgtgaagctgaaattaaatatggctatcacccaaatcatggtcattga

SEQ ID NO: 35724 - DNA, 525 bp, Escherichia coli
atgatggaaagtgataatgaactaaaacgaaaactacactacgacccggcaacaggtatttttacctataaagttagcccacacgggaggatcaaggcgggtagtgtagccgggtataaacataaaagcgggtatatatacataggaagatataaagcgcatcgcctcgcgtggtttttccattatggggtgtggcccgaaaaggacattgatcatattaatgggataaaaacagacaacaggatagtaaaccttagagaaacagatgatgcgcataattgcagaaacaagaaacatattaccactcatacattgtctgcattcaggggcgttagctaccacaaaacggatcgtggtaatcctaagtggcgggtaagaattactgacaataacggtaaacgtatatctattggtttatttgactcactagacgaagcaatcgccgctcgcattttggcagaaaactttttctatggtgaatatgcaccttcgatgggttgcgagggggaaacgtggacaagataa

SEQ ID NO: 35725 - DNA, 492 bp, Escherichia coli
atgattaaccaatcgctgaaaaaccgattaactaaggcggcggctggtggagtattagccattgcatccgttttgcttgtatgggttgagggtacggcttacgagccttattacgataccggaggcgtgctaactgtatgcaatggcataactggacctgatgttgtcccaggtaagagatacacaccggatgaatgcgagagacttttacaaaaacacttagccgtttataaaaaggcggtagatcgttatgtaaaagttgacatgaatgactaccaacgcgccgcgctaattagcttttcatacaatatcggggttgacgctttcaaaaaatcaaccttgttaaaaaaaataaacaaaggcgactttaaaggggcgtgtaaggagttagatcgctgggtatatgataacgggcgatacatacagggcttaaaaaatcgtcgcgatattgagcgcaccgtttgtgagtggggcgtaaatgatggaaagtga

SEQ ID NO: 35726 - DNA, 183 bp, Escherichia coli
atgattgaagatggtatatacgccgtaacactaatcgacaagatgttttatcgcgtagagggtggtgatattcgcgtttgcgttagcgatggtgagtgggtagcgccaatcatcaagacgacgcgagaaacaattaagatctggcttgataatggcgatttggtgaaagttagtgatttgtag

SEQ ID NO: 35727 - DNA, 195 bp, Escherichia coli
atgattgaatgtcttatcattgctgtgtttctcctttatattgctggcgctatcctgatgtcttgttttatcaaatctaatgatctcgatcgtggtggtcttgagattcctttctggcctgtagcggtgtttattgctctcgtagatgccgcgcgcgcgcagatcaaaagggttattaaggagcgcaagaaatga

SEQ ID NO: 35728 - DNA, 300 bp, Escherichia coli
atgaaaagcgctaaatttattgcttgctgttttgttgaagttcctaacgatgatgttttctgtaattatgaatttaaagacagcttaggcagatctcacattgttgttggcaaacgcggcgactggttatatataaccgatgacgatatgatttttaccagaaatcaactttttcacatccactcagtaaataattatgcgccagttgccgctatatccgtaatggatatgcacgctaagaaatggattgaaaaggacgatattaacgaagcgcgtagcttacctggtgcggagttttaa

SEQ ID NO: 35729 - DNA, 225 bp, Escherichia coli
atgatcgaagataaagaagttgacaatgaaattcctgacggcgctgatgaacttatcactttcggtggcgggctgtacgagtttgaaacgtcggctgggtggacggataagtggcctttcccaacgcgccaggaattaagcgttcgtaaatcatttggcgaagatgccgaacggctggctaataacaagtggcttaataagtttattgcggagggtggcaaatga

SEQ ID NO: 35730 - DNA, 459 bp, Escherichia coli
atgggggacgaaaagagcttagcgcacacccgctggaactgtaaatatcacatagtttttgcgccgaaataccgaagactggcgttttacggagagaagcgtagggcgataggcagtattttgagaaagctgtgtgagtggaaaagcgtacggattctggaagcagagtgccgcgcagatcatatccatatgcttgtggaaatcccacccaaaatgagcgtatccggctttatgggatatctgaaagggaaaagcagtctgatgctttacgagcagtttggggatttgaaattcaaatacagaaacagggagttctggtgccgagggtactatgtcgatacggtgggtaagaacacggcgaagatacaggactacataaagcaccagcttgaagaggataaaatgggggagcagttatcgattccatatccgggcagcccgtttacgggccgtaagtaa

SEQ ID NO: 35731 - DNA, 162 bp, Escherichia coli
atgggtacaaaagcgcatgacctttttgtgttgcctttgtgcagaaaacaccatgacggactgcatgcggataccgtggcatttgaagagaagtatggttcccaactggagctgatatttcgttttatcgatcgcgcgctggcgattggtgtgctgtcctga

SEQ ID NO: 35732 - DNA, 216 bp, Escherichia coli; identical to SEQ ID NO: 5123

SEQ ID NO: 35733 - DNA, 216 bp, Escherichia coli; identical to SEQ ID NO: 5123

SEQ ID NO: 35734 - DNA, 459 bp, Escherichia coli
gtggctcactgtaagctttacgtcaccaaaacaccgattaccgcggctgacttactgaatgatcgtgtactgccgttttatgcgtctcagggcctgccgatgctgagaatactgaccgacagaggcacggagtactgtggcaaagtagagcagcatgattatcagctttatctggcaataaacgatatagaacacacgaaaacaaaggcgatgtccccgcagaccaacggcatctgcgagcggttccataaaacaatcctgaacgaattttatcaggtaacgttccgtaaaaaactgtacggcgatcttgatacattacagtcggatcttgatgaatggctggctcactataataatgagcgaacccatcagggaaaaatgtgcaatgggcggacgccaatggaaacgttacttgatggaaagcgcatctgggccgagaaaaatttaagccagatgtaa

SEQ ID NO: 35735 - DNA, 516 bp, Escherichia coli
atgcttcatactaccaatcccgttatcaaacacaaagccggtttgctcaatctggctgaagaactcagcaacgtatcaaaagcctgtaaaatcatgggcgtttcgcgtgatacgttttatcgttaccgcgaactggtcgatgaaggcggtgtggatgcgctgattaattgtagtcgccgcgctcctaaccttaagaaccgtaccgatgaggcaactgaacaggctgttgttgattacgccgtcgctttcccggcacacggtcagcaccggactagcaacgagctgcgtaaacagggcgtttttatctccggcagtggtgtccgttctgtctggttacgccataaccttgagaatttcaaaaaacgtctgaaagcactggaagaaaaagtagcccgtgatggcattgagccagccagatcgcagcactggagcgtaaagcaagtgatgacgaggcctgtggcgaaatcgaaacggctcatccgggatatctggggtcgcaggacacgttctatgtag

SEQ ID NO: 35736 - DNA, 183 bp, Escherichia coli; identical to SEQ ID NO: 15999

SEQ ID NO: 35737 - DNA, 1233 bp, Escherichia coli
atgaacagtgatttttccgcgaaaaaaatcctgacgggtgaggatgtcctgtgtgcggccgttcaccgtattgagtggttgtttgagacattttcttctgtctgtttgtctttttccggaggaaaagactctactgtgctgctccatcttacggccgatgtggctcgcaggaagaaacgtcgtttctctgtattattcattgactgggaagctcagtaccagtgcacaattgcacacattctgaagatgagggagatgtatcgggatgtgacggagactttttactgggtggcactccccctgactacggtaaacggtgtctctcagtttcagccggaatggatatgctgggaaccaggtgtggagtgggttcgtcagccaccagatgacgctattacagatatgtcgtacttcccattttatcggtatgccatgacgtttgaagaatttgttccggcattttcttcctggtttgccggtaaccggtgtggagtggcaatactgactggtgttcgtgctgatgaatcgctcaatcgctttgtgggactggtgtctcagcgcaaactgagatatgcagatgataaaccctggaccacagcgtcacctgaagggttttattacaccttgtatccgttgtatgactggaaagctcgtgatatatggatatataacgccagaacccgagctatctacaatcccctgtatgacctgatgtaccgtgccggcgtgccgttacgcaacatgcgggtctgtgagccttttggcccggaacagcgtaagggactgtggctttaccatgttctggagccggaaacctgggccaggatgtgtgagcgggtgtcgggtgctgccagcggggcgctttatgccaatgagagcggtgcctattttgccctgcgtaagcgtatcacgaagccacctcatcatacctggcgtagctatgcgatgttcctgctggatgtgatgccggaaagaacggcagaacattaccgtaataaaattgctgtctacctgcgctggtatcagacgcggggcttcccggatgacatcccggatgaacaggagaatgacctggggagccgggatatcccgtcctggcgacgtatctgtaagacactcataaagaatgatttctggtgtcggaccctctccttcagtccgaacaaaccccggcactatgaacgttatctgcagcgtatgaaagaaaggaggaaggaatgggggattctgtga

SEQ ID NO: 35738 - DNA, 354 bp, Escherichia coli; identical to SEQ ID NO: 24141

SEQ ID NO: 35739 - DNA, 213 bp, Escherichia coli
atggtgctgggtaacactcatgcacgcggtctgcgcacctatggctgtattcaggatgcggatgcattgagtgagggtattaatgcgtctccccgttatccgaaaaactggaagacatccggcgatccggcgcgagagttcaccatgattcagtcagcaccgctgatgctgctggctgatcctgatgagttcgtgtccgttcaactggcgtaa

SEQ ID NO: 35740 - DNA, 261 bp, Escherichia coli
gtggggaatctctaccggctgatgcgcggctatgccaccggtggttatgtcggtacaccgggcagtctggctgacagccggtcgcaggcgtccgggacgtttgagcagaataaccatgtggtgattaacaacgacggcacgaacgggcagataggtccggctgctctgaaggcggtgtatgacatggcccgtaaggcggcaatggatgttgtgaccgggcagatgcgtgatggtggtctgttctccggaggtggacgatga

SEQ ID NO: 35741 - DNA, 291 bp, Escherichia coli
ttgcttcttgtatggcgtgatggctggttggcatcacgcatcgaatcccgaacctttttgccgaagggggtaaaagcgatggcaactgccagaaacggtgtggcgaagcagagtaatgttgtgagtactccccagcttccgctgaaacctgctataggtaaaacaaaggccagtacaatggctgcgaatcaaattactcccaacgttttgatatatcctctggcagaaataaacgtcagtattatcgcccagactaataaagcccaccaaccgctaaagggcaaagggtga

SEQ ID NO: 35742 - DNA, 156 bp, Escherichia coli
atgcaaaaacagcataacgtcgtagcgggcgtggatatgggggcaacgcatatccgcttttgtctgcggacagcagaaggtgaaacgctacactgcgaaaaaagcggaccgcagaagttattgctcccgacctggtgtcgggtatcggcgaaatga

SEQ ID NO: 35743 - DNA, 1113 bp, Escherichia coli
atgatgaacacggaaggtaataacggtaacaaacccctcggtctatggaacgtcgtttccatcggcattggggcaatggtgggggcggggatcttcgcgctgctggggcaggctgcgttgctaatggaagcctcgacctgggtcgcctttgcttttggcggtattgtggcgatgttttccggttatgcctatgcgcgtctgggggcgagctatcccagcaatggcggtattatcgacttctttcgtcgcggattaggcaacggcgttttttcgctggcgctctcgttattgtacctgttgacgctggcggtgagtatcgccatggtcgcccgtgcttttggcgcttatgccgtgcagtttttgcatgaaggcagccaggaggagcaccttattttgctctacgcattggggatcattgcggtgatgacgcttttcaactccttaagcaaccatgcggtagggcggctggaagtgatcctcgtcggcattaaaatgatgatcctgttattgctgattattgccggtgtctggtcgctgcaaccggcgcatatttccgtttctgcgccccccagctccggggcgttcttctcctgtatcgggataaccttccttgcctatgcgggctttggcatgatggcgaacgcggcggataaagtgaaagatccggaggtcataatgccacgggcgtttctggtggcgattggcgttaccacgttgctttatatctcgctggcgctggttttgcttagcgatgtatcggcattagagttagaaaaatatgccgataccgccgtagcgcaggctgcttctccgctcctcgggcatgtggggtatgtgatcgccgtcatcggcgctttactggcgacggcttcagccatcaacgcaaacctgttcgccgtgtttaacatcatggacaacatgggcagcgaacgcgaactgccgaagctaatgaataaacctctgtggcggcagagtacctggggcaacatcatcgtcgtggtgttgattatgctgatgacggcggcgctgaatttaggctcactcgccagcgtcatgatattcacgcctcgttgccgattcttatcgttggtacgttggttatgttgttggtga

SEQ ID NO: 35744 - DNA, 2121 bp, Escherichia coli
gtggggcaggaaattctgcctaaccgtaaccgccccatgacctctgtaccgacgctcatccgccacgttcccggaaaaactgagccggttctccatctggaacatattcagcctgtccgcaatttattaatcacactgcaggaaaaactcgccaccccggcaggacagcaggtcgcacagaccctgcagcaaaccggggatacccgcgaactgctggatattctgacggatgatggctggctcaaaaatgaataccacggggaggaggaaatctttaccggactggcatcgttaaacgatctggttcgtcttgctgcggcaatggagactgaatttccttttgatgaatacgcagaagtgcagaaactgccggtgatcgacgtggaattcagccatctggtggggatggatgcatgccagggaacactcacactgctggatacccccggccctaatgaggccggacaaccgcagatggaagtgatgatgcgggatcaactgcagaaagcctctgcggttctggctgtgatggattacacccagatgaactcaaaagcggatgaagacgtccgtaaagagcttaatgccattgctgacgtatcagccggccgcctgtttgtactggtcaataaatttgatgagaaagaccgcaatggcgatggggcagatgccgtacgccagaaagttccggcaatgctgaacagcgatgtgctgcccgcctcccgcgtttatcccggatcctcacgccaggcatacctggctaaccgtgcgcttcatgagttacggaaaaacggaacccttcctgttgatgaagcctgggtcgatgattttgtcagggaagccttcggtcgcatgaaaaaagattacgtctgtaaagacagcgaactggcaactgaaggggcgacagacctgtgggaatgctcacttatcgatcaactgataacggaagtcatactgagttcacactccagagctgcggcactggcggttgattctgccgccgcaaaactgatgcagaatgcagaaaatatcagtgaatacctgtcgttacgccatcaggggctgatgcaaagtattcagtcactgcaggcgcatatcaccagcctgcttgaggatatccgggaaatagcagactgtcaggagcaggtgaccgctgatgtcagaatggccatggaggagatcgatgccagaacccgggaattactgacgggggtctgcacctcactggaagaggagctgaatgactatttcagaagcggtaaacgcaaagaacagcaaatgctggaggaagaaaattcagcgcagccccgggagagaaacgcattcgctttctttcacgatattttcggaaccggaaatcagcatgacaggatgcgggactttgatcccgacagccccgaaataaaattcagtgatcgcagggaagcccttgaactgatgacgcaaatcgaatcgactgtgaccagcctgcaccgtgaggctgaagcacagttccggcctgagctggagaaaatcgtcagcgggattgaaacaggttttcgtggcacggccctgtacgccacagaaaacattgccggtcgcatcaatacccgcctggaggatgagggctttaccgtaaaaatcagttttccggcagtcagtcagttacaaacccggctcgcggtaaaaacaaatctgagtgcgcttatggaggaaagaacggagaccgtcacccgtcgccgtcggcagagtggcgtatggggaaccgtttgtcgatggtttggcaccagtgacctgggctgggaaaactatgacgaggatgtgagtcgcagcgtgatcaatatcaacaaggtcagagaggaagttatgtcactgacccgggcatatttcggggagctgcaggcatccattgagcaggatattaaccagcccgtccgccaggaaatcgatgcctttttctgcgcattcagggagaaagttgaacaactgcgtaacacgctgattcagagctctgaagatcataaacgcgatcagcaggcacaggaacggcttaccaggcgacttcaggcattaaatgaaagggttcctgagctcattactgacagtaaggcgctgagggaagagctggagacaatgctgtga

SEQ ID NO: 35745 - DNA, 192 bp, Escherichia coli; identical to SEQ ID NO: 33632

SEQ ID NO: 35746 - DNA, 141 bp, Escherichia coli; identical to SEQ ID NO: 14405

SEQ ID NO: 35747 - DNA, 147 bp, Escherichia coli; identical to SEQ ID NO: 8534

SEQ ID NO: 35748 - DNA, 423 bp, Escherichia coli
gtggcaaaagtttttacacaagaagagcgagaaaaaattaaagggcaggttgttgaactcgtacgccagagtgggcgtgagacgttacggcaactggaagtcaagacaggtgcgacaagatatctgatgagcgttctcgcaagagagctggttgccagcggcgatgtatacaactccggctacgggttattcccctctgaacaggcgcgtaaggactggcaaaacgcccgcaaaaaactctcgagggcaaaggtgaagaaacctgctgtggttgatccggaccttatctggtcatcacctgacggagaaatacgtcgctacgacagtcgcctaaacataatctgtcgcgagtgccggaagagtgaagctatgcagcgtgtactggctttctatcagggtaattttcaggaggcggtactgtga

SEQ ID NO: 35749 - DNA, 264 bp, Escherichia coli
atggcacaggagagtggtggtagcgcaacagtacggctgaactcactggactggcttggtggtcagagccgggagcaggcagataacgaatggtatgaagcgattaactggctgggggactggtgcagtgaagagcggcatcctgtgatctggtcaaccacacaggctgcagaacacttaccggctcgcatgccccgtctctgctcagcagagcgtctctctgaaagtatggtcgatgaaatatttctgaagggggctacatga

SEQ ID NO: 35750 - DNA, 249 bp, Escherichia coli
atgaagccttattttgctgctttgatgttatcagtctctgttcttcctgcttatgctggtccgctcggtactgctgataaagccgacctaccgcaaagcaatgtctccagcccaatgatggcccagtcgctcaggcaaccagacctgcaaccgatatcgacggacaggaagacagaatgttttcgcctttacacaccagatcgcaaaccgggggtgaactgcgttccggatggctcgacaggccattaa

SEQ ID NO: 35751 - DNA, 984 bp, Escherichia coli
gtgaaaagaaaattcatacacgaatttgcttttggatacttaaatagttttacagcgatgcttactgctcagcaactaacgtctgatgcaaaaattaatttagaacaagaaaaacaactttcaaaatgccatatatactttatatgcgctcgcccaagcttttattttattgataatacaattaatcatgagaaaaacattctctcaggagagatagggtacaaaatagatggtaaagaaagcaagttccattttgaatacaactggatattagaagacgatgcaactaatgtaatatgtaactatccattcagagaagttattagtataaataatgaaggggaggaggtaacttacatctctgcatctttcattgccaccttatattcaagcaaattaggttactattcagatctgtcctcatatgaagttctttatattggacaagccgtaggtaaaaatggtagcaggaatgcagttgaacgtttaaggagtcattcaaaattacaaaaaatattggcgcaaacgctttataacaagccagatcaagagatcatgctttttatgtatgcctttgagcatgaacaagtattctcatctctagatgggaggtctggattaattgatgatacggatagcgatgacaagcgatttaagtttgcattaaaaaatcacccaaacaaaaatcaagccattaatataatcgaagccgctttgataagatattttcaaccggaatataatgaaaagtttaaagagagcaaaatatcaccaaaattgaaagcgttagcaaaatgctatgacttagatatgtctggaatcattgtggaaattaacacagaaaatcttttttactcattgtactctagaaaaatcaaaaaaaaccatcatcacattgtgaagatagatttagtttctcatcagcaaagattatccttttttcgaccaactggatttaatgttctaccagacattattgaatga

SEQ ID NO: 35752 - DNA, 393 bp, Escherichia coli
atgaagttgagctataagctggttatcgctgcttttctcgttactgtcatcggttctttcatctggtctgccaaccactactacagcaaatatcagcacgaaaagaaacgtgctgatgaggctgtacaaaatgccaaatcggcaactgtcattaccaataacgtcctgcaatcactgcaaatcgtcaatacagttctggaggctagccagcatgcaaaacagcagattgcactggagtcacagagaacccagacagatatcaaaacggctgttgcgaatgatgattgcgctgcccgtcctgttcctgctcgtgcagctgaacggctgcgccggtacgcggacagtttacgtaccagttccagcggtaccgctaccggcgaatctgaccactga

SEQ ID NO: 35753 - DNA, 540 bp, Escherichia coli
atgaacgcagattatatagcttacgaatcattggttgccactagaaatacagcagaatgggctttttggtcaatggtaggaacgtggttttcaggcattgcaacctttatggcagtatgcctgactttatatatttctaaccgtcgacctcgaccgaagttaagaggaacagtatcgcttgggggcatcacaggccaaaatgtgagcacgtttggagttacgatcaacattgcaaatgttggcattcaaaccgcaactataacttcagtaacatggacgttcggtacaaaaaactcactacttcagattctggggggtgggtttggtgacgatttaccaaaaaaaattgagcatggcgaatatgcatttttctttattcaaaatgatactaatggcgactgggccagagatatgaaaaataagatatgggaacagggcggcaacgttcgcaaattaatgttgcttgtgcaccttgctaccggcgatacgatgaaaattaagccagccaaaaatgtaataaaaatgatcgaaaaatcataa

SEQ ID NO: 35754 - DNA, 285 bp, Escherichia coli
atgacatctttaaccgttgcggtattagctttaatagttgcaatctggcatgagataaaccgatttccagcaaccgggaagagcttactgtctttacagcaagaagttagggagctgagggatgaaaatgaaagattagcctctgaagtagattctttaaaggatgagttacttgaaatttcaaatcagatagatcgaattaaagaccctgaatattatgcattgcttgatgcaggagatggagtgggtctttatgaaatagaaaagtcaagaggtcaaatttaa

SEQ ID NO: 35755 - DNA, 327 bp, Escherichia coli
atgggcattactattttcagcagtgaaatacaggatgttgatagcgaagcgatgtacaagagttggctagcaacccattccgatggattcgttattaatctgcttaagtcggccagcgggaaaggcagaaaaaatgatgccagatttacgcggattcatcgagcctcatgcaaatcaatcaacccgttaatcagcccaaaaaatcacgccggctttactactggccgataccaaaaagtatgtgttcttacgcttgacgaggccgagtccaccgcaggccaactaacaggactgccaaccatccagagatgtcattggtgtatataa

SEQ ID NO: 35756 - DNA, 1602 bp, Escherichia coli
atgaaaacgcccaccattcccacccttctggggccggacggcatgacatcgctgcgtgaatatgccggttatcatggcggtggcagcggatttggtgggcagttgcgggcgtggaatccaccgagtgaaagtgtggatgcagccctgctgcccaactttacccgtggcaatgcccgcgcagacgatctggtacgcaataacggctatgctgccaacgccatccagctgcatcaggatcatatcgtcgggtcttttttccggctcagtcatcgcccaagctggcgctatctgggcatcggggaggaagaagcccgtgccttttcccgcgaggttgaagcggcatggaaagagtttgccgaggatgactgctgctgcattgacgttgagcgaaaacgcacgtttaccatgatgattcgggaaggtgtggccatgcacgcctttaacggtgaactgttcgttcaggccacctgggataccagttcgtcgcggcttttccggacacagttccggatggtcagcccgaagcgcatcagcaacccgaacaataccggcgatagccggaactgccgtgccggtgtgcagattaatgacagcggtgctgcgctgggatattacgtcagcgaggacgggtatcctggctggatgccgcagaaatggacatggataccccgtgtgttacccggcgggcgcgcctcgttcattcacgtttttgaacccgtggaggacgggcagactcgcggtgcaaatgtgttttacagcgtgatggagcagatgaagatgctcgacacgctgcagaacacgcagctgcagagcgccattgtgaaggcgatgtatgccgccaccattgagagtgagctggatacgcagtcagcgatggattttattctgggcgcgaacagtcaggagcagcgagaaaggctgacgggctggattggtgaaattgccgcgtattacgccgcagcgccggtccggctgggaggcgcaaaagtgccacacctgatgccaggtgactcactgaacctgcagacggctcaggacacggataacggctactccgtgtttgagcagtcactgctgcggtatatcgctgccgggctgggtgtctcgtatgagcagctttcccggaattacgcccagatgagctactccacggcacgggccagtgcgaacgagtcgtgggcgtactttatggggcggcgaaaattcgtcgcatcccgtcaggcgagccagatgtttctgtgctggctggaagaggccatcgttcgccgcgtggtgacgttaccttcaaaagcgcgcttcagttttcaggaagcccgaagtgcctgggggaactgtgactggataggctccggtcgtatggccatcgatggtctgaaagaagtacaggaagcggtgatgctgatagaagccgggctgagtacctacgagaaagagtgtgcaaaacgcggcgatgactatcaggaaatttttgcccagcaggtccgtgaaacgatggagcgccgcgcggctggtcttaaaccgcccgcctgggcggctgcggcatttgaatccggactgcgacaatcaacagaggaggagaagagtgacagcagagctgcgtaa

SEQ ID NO: 35757 - DNA, 600 bp, Escherichia coli
atgtcgccggatgactggctgcaggcaacactgcacggtgagattgtggcgctggtccacagccaccccggtggtctgccctggctgagtgaggccgaccggcggctgcaggtgcagagtgatttgccgtggtggctggtctgccggggggcgattcacaagttccgctgtgtgccgcatcttaccgggcggcgctttgagcacggggtgacggactgttacacgctgttccgggatgcttaccatctggcggggattgagatgccggattttcatcgcgaggatgactggtggcgtcacggtcagaatctctatctggataatctggaggccacagggctgtatcaggtgccgttgtcagcggcgcagccgggcgatgtgctgctgtgctgttttggttcatcggtgccgaatcatgccgccatttactgtggtgacggcgagctgctgcaccatattcctgaacaactgagcaaacgagagaggtataccgacaaatggcagcgacgcacacactccctctggcgtcaccgggcatggcacgcatctgcctttacggggatttgcaacgatttggccgccgcatcgaccttcgtgtga

SEQ ID NO: 35758 - DNA, 309 bp, Escherichia coli
gtgatcagccgctggcgcatcgagcagtgcagcgaactgagtgcggtcagtgcctcctttgtgttgtccacaccgacggaaacggacggcgctgtttttccggggcgcatcatgctggccaacacctgcacctggacctatcgcggcggtgagtgcggttatcacggtccggcggtcgcggatgaatatgaccagccgacgtccgatatcacgaaagataaatgcagcaaatgcctgagtggctgtaagtttcgcaataacgtcggcaactttggcggcttcctttccattaacaaactttcgcagtaa

SEQ ID NO: 35759 - DNA, 1908 bp, Escherichia coli
gtggataacggggcgcactttgacggcgaccagagcggcacggtgaatggtgtcacgccgccagcggtgcagcacctgactgccgaagtcaccgcagacagcggggaatatcaggtgctggcgcgctgggacacgccgaaggtggtgaagggcgtgagcttcctgcttcgtctgaccgtgacagcagaagacggcagtgagcggctggtcagcacagcccggacgacggaaaccacataccgcttcaggcagctggcgctggggcgttacacgctgacagtccgggcggtaaatgcccggggacagcagggcgatccggcgtcggtatcgttccggattgccgcaccggcagcgccgtcacagattgagctgacgccgggctattttcagataaccgccacgccgcatcttgcggtttatgatccgacggtacagtttgagttctggttttctgaaacgaagatttcagatgtctcacaggtggacaaatctgcccgctatcttggtacggcactgtactgggtagcctccggccagaatattaagccgggccatgattattacttttatgttcgcagtgtgaataccgttggtaaatcggcattcgtggaggctgtcggccagccgggtaataatcctgaagagtatctcaatttttttgaagggaaaataaacagcaccctgctggggcaggagctgaatgatcgtattaatgcctctgcattgcgcagtgaagttgagcaactggaggatgaggtcaatcagcgactggagagtgatattgccggggtgacccaaaaaatcggggaaactgaaaacagcctcacgcagctggttgctaaaaaaaatgatgagcagtcactggccatatcccaggtgagtcagaaagtggacaacgtcagtagcgaactcacacaaacggtcagtcagagtaatgaggagaatgcacgccagattgcgcaggttcgtcagtatgtggatgaaaaaagcagtgaaatcatctcgacgacagacaaaaaactgggcgagcaggaagcaacaatccagcagatacaaaaggttcagacagacaccagtaataacctgaacagtatgtgggccgtgaaactgcagcagatgcaggatggtcgcctttacattgcgggtatcggtgccggtattgagaatacccctgacggtatgcagagtcaggtgctgctggcggcagacaggattgcgttcattaatccggagaacggtaacaccactccagcactggtcacgcaggggggacagacgtttatcaatgaagcgctgattaagacccttattgctcccacaattaccagtggtggcaatcctcctgcattttccctgacatcagacggaaagctgaccgctaaaaatgcggatatcagtggcagtgtgaatgcgaactcagggacgctcaacaacgtcacgataaatgagaactgtcagattaaggggaaactgtccgccaaccagattgaaggcgatattgtcaaaacggtcagcaagtctttcccccgcacgagcacttatgccagcggcaccattacggtcacgattagtgatgatcagaagtttgaccgacaggtcatgatcccggctctgctgtttaaaggaagcaggaaggaaaattatggcagtaataatcaacagtcttatgtttattctgtatgccgtttgcaggtaacgaaaaacgggacagaaatttttaaccagtctacaacggatgctccggcggttttttcttccgttattgatatgcctgcggggcagggaacgttgacgttaaagtttacggtctcttcttcaatggtcaataactggacaccgacaaccagtatcagcgatttgcttgttgtggtgatgaagaaatccaccgcaggtatcacgattagctga

SEQ ID NO: 35760 - DNA, 384 bp, Escherichia coli
gtgatccacatcgtgccgcgtcttgcgggagcaaaaagtggcggtgtgtttcaggcggtgctgggtgcggcgttgattgctacggcaatctggatgccggggatcagtatcgctttcagtgacattctcttttcaatgggtgcggcgatgacgcttggcggtgttgcacagatgctggcaccgaaagcgagtaccgcaacaacgaccagcacggataacggtaagcagaacacgtatttctcatcactggataacatggttgcccagggcaatgttctgcctgttctgtacggtgaaatgcgtgtggggtcacgggtaatttcgcaggaaatcagcacggcagacgaaggggatggaggtgaaatcgtggtgattggtcgctga

SEQ ID NO: 35761 - DNA, 183 bp, Escherichia coli
atgacgcatcctcacgataatatccgggtaggcgcgatcactttcgtctactccgttacaaagcgaggctgggtatttcccggcctttctgttatccaaaatccactgaaagcccagcggctggctgaggagataaataataaacgaggggctgtatgcacaaagcatctcccgttgagttaa

SEQ ID NO: 35762 - DNA, 405 bp, Escherichia coli; identical to SEQ ID NO: 13528

SEQ ID NO: 35763 - DNA, 534 bp, Escherichia coli
atgaaactcgtgcacatggccagtggtttagcggttgcgattgcgttggcggcttgcgcagataaaagcgcggatattcagacgccagcaccggctgcaaatacgtctatttcagcaacacaacaacctgctatccagcaaccgaatgtctccggtaccgtttggatccgtcagaaagtcgcactgccgcctgatgccgtgctgaccgtgacactttctgacgcgtcgttagccgatgcgccgtcgaaagtgctggcgcagaaagcggtgcgtaccgaaggtaaacagtcaccattcagctttgttctgccatttaacccggcagatgttcagccgaacgcgcgtattctgttgagtgcggcgattaccgtgaatgacaaactggtatttattaccgataccgttcagccggtgatcaaccagggcggaactaaagccgacctgacattggtgcggtgcagcaaaccgccgtgccggttcaggctagcggtggcgcaacgactaccgtaccttcaacttcaccaacccaggtga

SEQ ID NO: 35764 - DNA, 504 bp, Escherichia coli; identical to SEQ ID NO: 9343

SEQ ID NO: 35765 - DNA, 888 bp, Escherichia coli
atgaatgatgccgttatcacgctgaacggcctggaaaaacgctttccgggcatgaacaagcccgccgtcgcgccgctcgattgcaccattcatgccggttatgtgacggggctggtagggccagacggtgcgggtaaaaccacgctgatgcggatgctggcgggattactgaaacccgacagcggcagtgccacggtgattggctttgatccgatcaaaaatgacggcgcgctgcacgccgtgctcggctatatgccgcagaaatttggtctgtatgaagatctgacggtgatggagaacctcaatctttacgcggatttgcgcagcgtcaccggcgaggcacggaagcagactttttctcgcctgctggagtttacgtctcttggcccgtttaccggacgcctggcgggcaagctctccggtgggatgaaacaaaaactcggcctggcctgtaccctggtgggcgaaccgaaagtgttgctgctcgatgaacccggcgtcggcgttgaccctatctcacggcgcgaactgtggcagatggtgcatgagctggcgggcgaagggatgttaattctctggagcacctcgtatctcgacgaagccgagcagtgccgtgacgtgttacatgaacgaaggcgaattgttgtaccagggagaaccgacggccctgacacaaaccatggccggacgcagctttctgatgaccagcccgcacgagggcaaccgcaaactgttgcaacgggcattgaaactgccgcaagtcagcgacggcatgattcaggggaaatcggtacgtctgatcctcaaaaaagaggccacaccagacgatattcgccatgccgacgggatgccggaaatcaacatcaacgaaactacgccgcgttttga

SEQ ID NO: 35766 - DNA, 285 bp, Escherichia coli
atgattggtcgcggggcgctcaatattcccaacctgagccgggtggtaaaatataacgaaccgcgaatgccgtggccggaggtagttgctttgctgcaaaaatatacccgtctggaaaagcagggcgataccgggttatatcacgttgcgcggattaaacagtggttgagttatttgcgtaaagaatacgatgaagcaacggaattatttcagcatgttcgggtgttgaataattcccctgatattgcaagggctattcaggcaattgatatcgagaaactctaa

SEQ ID NO: 35767 - DNA, 1188 bp, Escherichia coli
atgcaaaatgaattgcagaccgcgctctttcaggcgttcgataccctgaatctgcaacgggtaaaaacatttagcgttccaccggtgacgctttgcggtccgggctcggtgagcagttgcggacagcaagcgcaaacgcgtgggctgaaacatctgttcgtgatggcagacagctttttgcatcaggcagggatgaccgccgggctgacgcgcagcctggccgttaaaggtatcgccatgacgctctggccatgtccggtgggcgaaccgtgcatcaccgacgtgtgtgcagccgtggcacagttgcgtgaatcaggttgtgacggggtgatcgcgtttggcggcggctcggtgctggatgcagcaaaagccgtggcgttgctggtgacgaacccggatagcacgctggcagagatgtcagaaaccagcgttctgcaaccgcgcctgccgttgattgccattccaacgaccgccggaaccggctctgaaaccaccaacgtaacggtgattatcgacgcggtgagcgggcgcaagcaggtgttagcccatgcctcgctgatgccggatgtggcgattctcgacgctgcgctgaccgaaggcgtgccgtcgcatgtcacggcgatgaccggtatcgacgcgttaacccatgctattgaagcgtacagcgcgctgaacgccacaccgtttaccgacagtctggcgattggtgccattgcgatgattggcaaatcgctgccgaaagcggtgggctacggtcacgaccttgccgcccgcgagagcatgttgctggcttcatgtatggcgggaatggcgttttccagtgcggggcttgggttgtgccacgcgatggcgcatcagccaggggcggcgctgcatattccgcacggtctggcgaacgccatgctactgccaacggtgatggagtttaaccggatggtctgtcgtgaacgctttagtcagattggtcgggcgctgcgaactaaaaaatccgacgatcgtgacgctattaacgcggtaagtgagctgattgcggaagtcgggatcaacaagcggctggcagacgtgggcgcaaccaccggacattacggcgcatgggcgcaggccgcgctggaagatatttgtctgcgcagcaacccgcgtaccgccagcctggagcagattgtcggcctgtacgcagcggcacaataa

SEQ ID NO: 35768 - DNA, 837 bp, Escherichia coli
atggcgcacgacgaacaatggctcaccccgcgtctgcaaacggcggcaacgctgtgtaaccagacgcctgccgcaacggaatctccgctgtggctgggggtggatctgggcacctgcgatgtggtgtcgatggttgtcgaccgcgacggtcagccggtggcggtatgcctcgactgggctgatgtggtccgcgacggcatcgtctgggatttcttcggtgcggtcaccattgttcgtcgccatctcgacaccctcgagcagcaattcggtcgccgttttagccatgcggcgacctcttttcctccaggtacggacccgcgtatttccatcaacgtgctggaatctgccggactggaagtgagccatgtactggatgagccaaccgcagtcgcggatctgctgcaactggacaacgccggtgtagtggatatcggcggtggcactactggtattgccatcgtgaaaaagggcaaggtgacgtactcggcggatgaagcgaccggcggacatcacatctctctgactctcgccggaaatcgtcgtatttcgctggaagaggcagagcagtacaagcgcggtcacggtgaagagatttggcccgcggtgaaaccggtgtacgaaaaaatggcggacattgttgcccggcatattgaagggcagggcattactgatttatggctggcgggcggctcttgtatgcaaccgggcgtggcggaactgtttcgcaaacaattcccggcgttacaggtgcatttaccgcagcacagtttgtttatgaccccgctggcgatcgccagtagcgggcgagagaaagcggaggggatctatgcaaaatga

SEQ ID NO: 35769 - DNA, 288 bp, Escherichia coli
atgaaactggcagtcgtcactggacaaattgtttgtaccgtacgccatcacggactggcgcatgacaaattgctgatggtggaaatgattgatccacaaggtaatcctgacgggcaatgcgccgtcgccatcgacaatattggcgcgggaaccggggagtgggtgttgctggtgagtggcagttccgcccgccaggcgcataaaagcgaaacgtcaccggtcgatctgtgcgtgattggcatcatcgatgaggtggtgtctggcggtcaggtaattttccacaaataa

SEQ ID NO: 35770 - DNA, 294 bp, Escherichia coli
atggaagcattaggaatgatcgaaacccggggcctggttgcactgattgaggcttctgacgcgatggtgaaagctgcgcgcgtcaagctggttggtgttaagcagattggcggcggcctgtgtactgccatggttcgtggtgatgttgcagcctgtaaagccgcgaccgacgcaggtgctgcagcggcacagcgtatcggcgagctggtatctgtacacgttatcccgcgtccgcacggcgacctggaagaagtcttcccgatcggcctgaaaggcgatagcagcaacctgtaa

SEQ ID NO: 35771 - DNA, 1017 bp, Escherichia coli
atgattattgaacgttgtcgtgaactggcgttgcgagcgcccgccagagtggtttttccggatgcgttagatcagcgtgtgctgaaagcggcgcaatatttacatcaacaaggtctggcaacgcccattctggtcgctaatccgtttgaacttcgtcagtttgcgctcagtcatggcgtagcgatggacgggctacaggtgattgatccgcatggcaacctcgcaatgcgggaagaatttgctcatcgctggctggcccgcgcgggcgaaaaaacgccgccggatgcgctggaaaaacttaccgacccgctgatgttcgccgcagcaatggtcagcgccggtaaagcggatgtctgtatcgcgggcaacctctcttccacggcgaatgtgctgcgtgccggattacgcattatcggcttgcagccaggctgtaaaacgctctcatccattttcctgatgctgccacagtacagcggtccggcgttgggttttgccgattgcagcgtggtgccacagccgacggcggcgcagttggcggatatcgcgcttgccagcgccgaaacctggcaggccatcaccggagaagaaccgcgcgtggcgatgttgtcgttttccagtaacggcagcgcccgtcacccctgcgttgccaacgtccagcaggcgacagaaatcgtccgtgagcgcgcgccgcagttggtagtcgatggcgagttgcagtttgacgccgccttcgtgccggaagtggcggcgcaaaaagcgcctgccagcccgctacaaggcaaggccaatgtgatggtttttccgtcgctggaagccggaaatattggctacaaaatcgcacaacgactcggcggatatcgtgccgtcgggccattgatacaaggacttgccgcgccgatgcacgatctctctcgtggttgtagcgtgcaggaaattatcgagctggcgctggtggcagctgtgccgcgtcagacagaagtgaaccgcgaaagcagtttacaaacactggttgaatga

SEQ ID NO: 35772 - DNA, 804 bp, Escherichia coli
atgaaagatttcatcaccgaagcatggctaagagcgaaccatacgctcagcgaaggcgcagagatccatctccctgcggacagtcgcctgacgccctctgcccgggagttgctggaaagccgccatctgcgcatcaagtttattgacgagcagggccgcctgtttgttgacgatgaacagcagcagccgcagcccgttcatgggctgaccagtagcgatgaacatccgcaggcgtgctgcgaactgtgccgccagccggtggcgaaaaagccggatacgctgactcacctgtcggcggaaaaaatggtcgccaaaagcgatccgcgcctgggttttcgcgcggttctcgacagcaccattgcgctggcagtgtggctgcaaattgaactggcggaaccgtggcagccgtggctggcggatatccgttcgcgtcttggcaacattatgcgtgccgatgcgctgggggaaccgctgggcgatcaagcgattgtcgggctttctgacgaagatctgcatcggctttctcatcagccgctgcgctatctcgaccacgatcatctggtgccggaagccagccacgggcgcgatgcggcgttgctcaatctgctacgcaccaaagtgcgggaaaccgaaaccgtagcggcgcaggtctttatcacccgcagctttgaagtattacgcccggacatcttgcaggcgctgaaccgcctttccagcacggtctacgtgatgatgatcctgagcgtaacgaagccgccgctaacggtgaagcagatccaacaacgactgggggaaacgcaatga

SEQ ID NO: 35773 - DNA, 702 bp, Escherichia coli
gtgaaaaaactcatcacagcgaatgatattcgtgaagcacacgcgcgcggcgaacaggcaatgtccgtggttctgcgcgccagcattattaccccggaagcccgtgaagtggcagatctactgggttttaccatcactgaatgtgatgaatcgaccccggtaacggcgtccgttcccgccagcgtgccagccgataaaaccgaaagccagcgcatccgcgaaaccatcattgcccagctgccggaaggccagtttaccgaaagcctggtcgcgcagctgatggaaaaagtgatgaaggaaaaacagtcgctggagcagggcgcaatgcagccgagcttcaaatcggtgaccggcaaaggcggtatcaaagttattgatggcagcagcgtcaagtttggtcgtttcgacggcgcacagccacactgcgtcggattaacggatctggtcaccggagacgacggcagcagcatggccgctggttttatgcagtgggagaacgccttcttcccgtggaccctgaactatgacgaaatcgacatggtactggaaggggaactgcacgttcgccacgaaggcgaaaccatgatcgccaaagcaggcgacgtgatgtttatcccgaaaggctccagcatcgaatttggtacgacatccagcgtgaaattcctgtatgtcgcctggccggctaactggcaatccctatga

SEQ ID NO: 35774 - DNA, 480 bp, Escherichia coli
atgaaacgaattgcgtttgtgggtaccgtcggggcaggaaaaacaacgttatttaatgcgttgcagggagattataccctcgccagaaaaacgcaggccgtagaatttaatgataagggtgatattgatacgccgggtgaatattttagccatccccgctggtatcacgccttaattaccacgctacaggatgtggacatgctgatctatgtccacggcgcgaatgacccggaaagtcggttgcctgccgggttgctggatattggcgtcagcaaacggcaaatcgccgtcatcagtaaaacggacatgccagatgctgacgtcgccgcaacgcgaaaattattgcttgagacgggcttcgaagagccgattttcgagctaaacagccacgacccgcaaagcgtgcagcaactggtggattatctggcatctctcaccaaacaggaggaagcaggtgaaaaaactcatcacagcgaatga

SEQ ID NO: 35775 - DNA, 336 bp, Escherichia coli
atggataaagaacgcatcattcaggaatttgtgcccggcaaacaggtcacgctggcgcatctcatcgcgcatcccggcgaggaactggcgaagaaaatcggcgttccggatgctggcgcaatcggcattatgacgctaactcctggcgaaacggcgatgatcgccggtgatttagcattgaaagccgctgatgtgcatatcggttttctcgaccgcttcagcggtgcattggtgatttatggctcggtgggtgcagtagaagaagcgttatcacaaaccgtcagcggtttagggcgtttattaaattatacgctttgtgaaatgaccaaaagttaa

SEQ ID NO: 35776 - DNA, 2280 bp, Escherichia coli
atggatgaccagttaaaacaaagtgcacttgatttccatgaatttccagttccagggaaaatccaggtttctccaaccaagcctctggcaacgcagcgcgatctggcgctggcctactcaccaggcgttgccgcaccttgtcttgaaatcgaaaaagacccgttaaaagcctacaaatataccgcgcgtggtaacctggtggcggtgatctctaacggtacggcagtgctggggttaggcaacattggcgcgctggcaggcaaaccggtgatggaaggcaagggcgttctgtttaagaaattcgccgggattgatgtatttgacattgaagttgatgaactcgacccggacaaatttattgaagtcgtcgccgcgcttgaaccgaccttcggcggcatcaacctcgaagacattaaagcgccagaatgtttctatattgaacagaaactgcgcgagcggatgaatattccggtattccacgacgatcagcacggcacggcaatcatcagcactgccgccatcctcaacggtttgcgcgtggtggagaaaaacatctccgacgtgcggatggtggtttccggcgcgggtgccgcagcaatcgcctgtatgaacctgctggtagcgctgggtctgcaaaaacataacatcgtggtttgcgactcaaaaggcgttatctatcagggccgtgagccaaacatggcggaaaccaaagccgcatatgcggtggtggatgacggcaaacgtaccctcgatgatgtgattgaaggtgcggatattttcctcggctgttccggcccgaaagtgctgacccaggaaatggtgaagaaaatggcccgtgcgccaatgatcctggcgctggcgaacccggaaccggaaattctgccgccgctggcgaaagaagtgcgtccggatgccatcatctgtaccggccgttccgactacccgaaccaggtgaacaacgttctttgcttcccgttcatcttccgtggcgcgctggacgttggcgcaaccgccatcaacgaagagatgaaactggcggcggtacgcgcgattgcagaactggcccatgcggaacagagtgaagtggtggcttcagcttatggcgatcaggatctgagctttggtccggaatacatcattccaaaaccgtttgatccgcgcttgatcgttaagatcgctcctgcggtcgctaaagcagcgatggagtccggcgtggcgacgcgtccgattgctgatttcgacgtctacatcgacaagctgacggagttcgtttacaaaaccaacctgtttatgaagccgattttttcccaggctcgcaaagcgccgaagcgcgtcgttctgccggaaggtgaagaggcgcgcgttctgcatgccactcaggaactggtaacgctggggctggcgaaaccgatccttatcggtcgtccgaacgtgatcgaaatgcgcattcagaaactgggcttgcagatcaaagcgggtgttgattttgagatcgtcaataacgaatccgatccgcgctttaaagagtactggaccgaatacttccagatcatgaagcgtcgcggtgtcactcaggaacaggcgcagcgtgcattgatcagtaacccgacagtgattggcgcgatcatggttcagcgtggcgaagccgatgcaatgatctgcggtacggtgggcgattatcatgaacattttagcgtggtgaaaaatgtctttggttatcgcgatggcgttcacaccgcaggtgccatgaacgcgctgctgctgccgagtggtaacacctttattgccgatacctacgtcaatgacgaaccagacgcagaagagcttgcggagatcaccttgatggcggcagaaactgttcgtcgttttggtattgagccgcgtgtggctctgttgtctcactccaactttggttcttctgactgcccgtcgtcgagcaaaatgcgtcaggcgctggaactggtcagggaacgtgcaccagaactgatgattgatggtgaaatgcacggcgatgcagcgctggtggaagcgattcgcagcgaccgtatgccggacagccctttgaaaggttccgctaatattctggtgatgccgaacatggaagctgcccgcattagttacaacttactgcgtgtttccagctcggaaggtgtgactgtcggtccggtgctgatgggcgtggcgaaaccggttcacgtgttaacgccgatcgcatcggtacgtcgtatcgtcaacatggtggcgctggccgtggttgaagcgcaaacccaaccgctgtaa

SEQ ID NO: 35777 - DNA, 2004 bp, Escherichia coli
atgtcccgaaaagaccttgccaatgcgattcgcgcactcagtatggatgcggtacaaaaagccaattctggtcatcccggcgcgccgatgggcatggctgatattgctgaagtgctgtggaacgattttcttaaacataaccccaccgacccaacctggtatgatcgcgaccgctttattctttccaacggtcacgcgtcgatgctgctctacagtttgctgcatctgaccggttacgacctgccgctggaagagctgaagaacttccgtcagttgcattcaaaaaccccaggtcacccggagattggttatacgccaggtgttgaaaccaccaccggtccacttggacaaggtttggcgaacgccgtcggactggcgatagcagaacgtacgctggcggcgcagtttaaccagccggatcatgaaattgtcgatcacttcacctatgtgtttatgggcgacggctgcctgatggaaggtatttcccacgaagtctgttcgctggcgggcacgctgggactgggcaagctgattggtttttacgatcacaacggtatttccatcgacggtgaaaccgaaggctggtttaccgacgatacggcaaaacgttttgaagcctatcactggcatgtgatccacgagatcgacggtcacgatccgcaggcggtgaaggaagcgatccttgaagcgcaaagcgtgaaagataagccgtcgctgattatctgccgtacggtgattggctttggatcgccgaataaagcaggtaaggaagaggcgcacggcgcaccactgggggaagaagaagtggcgctggcacggcaaaaactgggctggcaccatccgccatttgaaatccctaaagagatttatcacgcctgggatgcccgcgaaaaaggcgaaaaagcgcagcagagctggaatgagaagtttgccgcctataaaaaggtccatccgcaactggcagaagagtttacccgtcggatgagcggcggtttaccgaaggactgggagaaaacgactcagaaatatatcaatgagttgcaggcgaatccggcgaaaatcgccacccgtaaggcttcgcaaaatacgcttaacgcttatggccccttgctaccggagctgctcggcggttcggcagatctggctcccagcaacctcaccatctggaaaggttctgtgtcgctgaaggaagatccggcgggcaactacattcactacggggtgcgtgaatttggcatgaccgctatcgccaacggcattgcgcaccacggcggctttgtgccgtataccgcgacgttcctgatgtttgttgaatacgcccgtaacgccgcgcggatggcggcactgatgaaagcgcggcagattatggtttatacccacgactcaattggtctgggcgaagatggtcctacgcaccaggctgttgagcaactggccagtctgcgcttaacgccaaatttcagcacctggcgaccgtgcgatcaggtggaagcggcggtgggctggaagctggcggttgagcgccacaacggaccgacggcactgatcctctccaggcagaatctggcccaggtggaacgtacgccggatcaggttaaagagattgctcgtggtggttatgtgttgaaagacagcggcggcaagccggatattattctgattgccaccggttcagagatggaaatcaccctgcaagcggcagagaaattagcaggagaaggtcgcaatgtacgcgtagtttcgctgccctcgaccgatattttcgacgcccaggatgaggaatatcgggagtcggtgttgccttctaacgttgcggctcgcgtggcggtggaagcaggcatcgccgattactggtacaaatatgttggtctgaaaggggcaattgtcgggatgaccggctatggggaatctgctccggcagataagctgttcccgttctttggctttaccgccgagaatattgtggcaaaagcgcataaggtgctgggagtgaaaggtgcctga

SEQ ID NO: 35778 - DNA, 1044 bp, Escherichia coli
atgcgctatcgcattttccttctcttttttttcgctttgttgcagacgtctttggtgtgggcggcaccagcgcaacgggcgttttccgactggcaggtcacctgtaataaccaaaacttctgcgtggcgcgtaatacgggcgatcataacggactggtgatgaccctgagccgcagcgccggggcgcatacggatgccgttttacgtattgagcgcggcgggttgaagtcgccggatgcgtctgaaggggagatagcgccacggctgctgttagatggcgagccgttggcgttaagtggtgacaagtggcggatttcaccatggttattagtaaccgatgatacggcaaccatcaccgcgtttttgcagatgattcaggaagggaaggcaatcaccttacgcgatggcaatcagaccatttctctgaatggcttaaaagcggcgttgttgtttattgatgctcagcaaaagcgcgttggcagtgaaaccgcgtggataaagaaaggggacgaaccgccgctcagcgtaccgcccgcgcctgcgctgaaagaggtcgcggtggttaacccaacgccgacgccactctcactcgaagaacgcaacgatttgctggattatggaaactggcggatgaatggtctgcgctgctcgcttgatccattgcgtcgagaggtaaatgtcactgcgctgaccgatgataaagcgctgatgatgattagctgtgaggcaggggcctataacaccattgatttggcctggattgtgtcgcgtaaaaagccactggcctcgcgcccggttcggttacgtttgccgttcaacagcggtcaggagacgaatgaactggaactgatgaacgcaacattcgatgaaaaatcgcgtgaactggtgaccttagcgaaagggcgcggattaagcgattgtggcattcaggcgcgctggcgctttgacggtcagcgttttcgcctggtgcgttacgccgcagaacccacctgcgataactggcatgggccagacgcctggcccacgttgtggatcacccgttaa

SEQ ID NO: 35779 - DNA, 576 bp, Escherichia coli
atgacgcaacaaatcaccctcattaaagacaaaattctctccgataactatttcaccctgcacaacattacttacgatctcacgcgcaaagatggcgaagttatccgtcataaacgtgaagtttacgatcgcggtaatggtgcaacgatcctcctgtacaacgcgaagaaaaagactgtagttctgattcgtcagttccgcgtcgctacctgggttaatggcaatgaaagcgggcagctgattgaaacctgcgccgggctgctggataacgacgaaccggaagtgtgcattcgcaaagaagcgattgaagagacgggctatgaagtgggcgaagtgcgcaaattatttgaactgtatatgtcgcctggcggtgtgactgagctaatccacttttttatcgccgaatacagtgacagccagcgcgctaacgccggcggtggtgtcgaagatgaagatattgaagtgctcgagctgccgttcaacaaggcgctggagatgatcaaaactggcgagatacgtgacggtaagacggtgttattgcttaactatttgcaaatgtcacatttaatggactga

SEQ ID NO: 35780 - DNA, 1980 bp, Escherichia coli
atgaatcgttttattatggccaacagtcagcaatgtctgggttgtcatgcttgtgaaatcgcctgtgtcatggctcacaatgatgagcaacatgtcctgagccaacaccattttcatccccgaattacggttatcaaacatcagcagcaacgtagtgcagtgacctgtcaccattgcgaagatgcgccctgcgcccgtagctgccctaatggcgcaatcagccacgttgatgacagcattcaggtcaatcagcaaaagtgtattggctgtaaatcctgcgtggtggcctgtccatttggtacgatgcaaatcgtccttacccccgtcgcggcaggaaaagtaaaagccacggcgcataaatgcgacctttgtgcagggcgcgaaaacggtcctgcttgtgtcgagaattgcccagcggacgcactgcaactggtcactgacgccgcactctcaggcatggcgaaatcccgccgcttgcgtaccgcacgtcaggaacatcaaccgtggcatgccagtaccgcggcgcaagaaatgccggtaatgagtaaagtcgagcaaatgcaggcaacgcccgcgcgtggcgagccggacaaactggcgattgaagcgcgtaaaaccggttttgatgaaatttatctgccattccgtgccgatcaggcacaacgggaagcctcgcgctgccttaagtgcggcgagcacagcgtttgtgaatggacctgcccgctgcataaccatattccgcagtggattgaactggtgaaagccggaaacatcgacgccgccgtcgagctttctcaccagaccaacaccctgccggaaattaccggacgcgtttgtccgcaagaccgtttgtgtgaaggagcctgtactattcgcgatgagcacggtgcagtaactatcggcaacattgaacgctacatttcagatcaggcgttggcgaaaggttggcgtcctgacttaagccatgtcaccaaagtggacaagcgggtggcgattatcggtgcaggtccggcagggctggcctgtgcggatgttctgacccgcaatggcgtggcggtgacggtgtacgatcgccatccagaaattggtggcttgctcactttcggcattccttctttcaaactggataaatccctgctggcacgccgtcgggaaatcttcagcgcgatggggattcacttcgaactcaattgtgaagtgggtaaagatgtctctttggattcgcttttggaacaatacgacgcggtcttcgttggcgtaggcacttaccgttccatgaaagcgggtttacccaatgaagatgcgccgggcgtttatgacgccctgccgttcctcatcgccaacactaaacaggtgatgggactcgaagagctaccggaagagccgtttatcaataccgccggactcaacgtcgtggtactgggcggcggcgacaccgcgatggactgtgtgcgtactgcgctgcgccacggcgcgagtaacgttacctgcgcttatcgtcgtgatgaagctaacatgccaggctcgaagaaagaggtgaagaacgcccgcgaagagggggccaacttcgaatttaacgtccagccggtggcgcttgagctgaatgaacaaggtcacgtttgcgggattcgtttcctgcgtacgcgtcttggcgagccggatgcccaggggcgtcggcgtccagtaccggtggaaggcagtgaatttgtcatgccagccgacgcggtgattatggcgtttggcttcaatccgcacgggatgccgtggctggagtcgcacggtgtaacggtagacaaatggggccgcatcatcgcggatgtggaaagccagtaccgttatcagaccacgaatccgaaaatcttcgccggtggtgacgccgtgcgtggtgcggatctggtggttaccgcaatggcagaaggacgtcatgcggcacaggggattattgactggctgggggtaaaatcagtcaaatctcactga

SEQ ID NO: 35781 - DNA, 1701 bp, Escherichia coli
gtgattgttaaacgacccgtctcggccagtctggcccgggcctttttttacattgtcctgctgtcgattctttccacgggtatcgctctgctaactctggcgagcagtttgcgcgacgctgaggctatcaatattgccggatcgctgcgtatgcagagttaccgcctgggctacgatttgcaaagtggcagtccacaactcaatgcacatcgccagttatttcagcaggcactgcattcaccggtattaaccaatctcaacgtctggtatgtgccagaggcagtaaaaacccgctatgcgcatctgaatgccaactggctggagatgaataatcggctcagcaagggcgacttgccatggtatcaggccaatattaataattatgttaatcagatagacctgttcgtactggctttacagcactacgctgaacgcaaaatgctgctggtggtggcgatttccctggctggcggcatcggtattttcacgctggtcttttttactttgcgccgcatacgccatcaggtggttgccccgctgaatcagctggttaccgccagtcagcgtattgaacacgggcagttcgactcgccgccgctggataccagcctgccgaatgagcttggcctgcttgccaaaacctttaaccagatgtcgagcgagctgcataaattgtaccgttcgctggaggcgtcagtagaagaaaagacccgcgacctccacgaggccaagcgtcgcctggaggtgttgtatcagtgttcgcaggcgctgaacaccagccagattgatgtgcattgtttccgccatattttgcagattgttcgcgacaacgaagcggctgaatatctggagttaaatgtcggtgacaactggcggattagcgaagggcagccaaacccggaattgccgatgcagattttaccggtgacaatgcaagagacggtttacggcgaactgcactggcaaaatagtcacgtttcatcatcagaaccgctgcttaacagcgtttcgtcgatgctgggacgcggtttgtactttaatcaggcgcagaagcattttcagcagttattgttgatggaagaacgtgcgaccatcgcccgcgaattgcacgactcgctggctcaggtactttcttacttacgtatccagttgacgttactgaagcgttcgataccggaagataacgccaccgcacaaagtatcatggccgatttttcccaggcgttgaatgatgcttatcggcagttacgcgagctgttaactactttccgcctgacgctgcagcaggcggatctcccctctgcgctacgtgaaatgctggatacgttacaaaatcaaaccagcgccaaactgaccctcgactgccgtctgccaaccctggcgctggatgcgcaaatgcaggtgcatttgttgcaaattattcgcgaagcggtgctgaatgcgatgaagcacgccaacgccagcgaaatcgccgttagctgcgtcaccgcgccggatggcaatcacacagtctatattcgcgacaacgggattggcatcggtgaaccgaaagaacccgaaggtcattatggcctgaatatcatgcgcgagcgcgcggaacggctgggtgggacgctgactttttcacaaccttccggcggcggcacgttagtgagtattagctttcgctccgcggagggtgaggaaagtcagctgatgtaa

SEQ ID NO: 35782 - DNA, 3114 bp, Escherichia coli
atggcgaatttctttattgatcgccccatttttgcctgggtgctggcaatcctgttgtgtctgacagggaccctggcgattttctcattgcccgttgaacaataccccgatctcgcgccaccgaatgtgcgagtgaccgctaactatcccggcgcatcggcccagacgctggaaaacaccgtgacccaggttatcgagcaaaatatgaccggcctcgataatctcatgtatatgtcgtctcagagcagtggcaccggccaggcatctgtcacgttaagttttaaagcaggcaccgatccggacgaagccgtgcagcaagtacaaaaccagctgcaatcagccatgcgaaagttaccgcaggcggtgcaaaatcagggcgtgacggtgcgtaaaaccggcgataccaatattctgaccattgccttcgtctctaccgatggttcgatggataaacaggatattgccgattatgttgccagtaatattcaggacccgttaagccgcgtgaatggcgtcggggatatcgatgcctatggttcgcaatattccatgcgtatctggctggacccggcgaaactcaacagtttccagatgacggctaaagatgtcactgatgccattgagtcacagaacgcgcagattgcggttgggcaacttggtggtacgccttccgtcgataagcaggcgctcaacgccaccattaacgcccagtcactgctgcaaacaccagaacagttccgcgatatcaccttgcgggtgaatcaggacggctcagaggtaaggctgggcgatgtcgccaccgtcgaaatgggggcggagaaatacgattatcttagccgcttcaatggtaaaccagcctccgggttgggggtaaaactggcctccggcgcgaacgaaatggcgacagcggagctggtgctcaatcgtcttgacgagctggcgcagtatttcccgcatggactggaatacaaggtggcgtatgaaaccacctcgtttgttaaagcctccattgaagacgtggtgaaaacgctgctggaagctatcgctctggttttcctcgttatgtatctgttcctgcaaaacttccgcgccacgctgatacccactatcgccgtgccggtggtgttgatgggaaccttctccgtactttatgccttcggttacagcgtcaacaccttaaccatgttcgcgatggtgctggcgattggtctgctggtggatgacgccatcgtggtggtggaaaacgtcgaacgtattatgagtgaggaaggactcactcctcgcgaagccacacgtaaatcgatggggcagatccagggggcactggtcgggattgcgatggtgctttcggcggtatttgtaccaatggccttcttcggcggcaccaccggtgccatctatcgccagttctctattaccattgttgcggcgatggtgctgtcagtattggtagcgatgatcctcactccggctctgtgtgccacgctacttaagccactgaaaaagggtgagtatcacgggcaaaaaggcttttttgcctggtttaaccagatgtttaaccgcaacgccgaacgctacgaaaaaggggtggcgaaaattctccaccgtagcctgcgctggattgtgatttatgtcctgctgcttggcggcatggtgttcctgttcctgcgtttgccgacgtcgttcttgccactggaagaccggggcatgtttactacctcggtacagttgcccagcggttcaacccaacaacagaccctgaaagtcgttgagcaaatcgagaaatattacttcacccatgaaaaagacaacatcatgtcggtgtttgccactgttggttctggccctgggggtaacgggcaaaacgtggcgagaatgtttatccgcctgaaagactggagcgaacgcgacagtaagaccggcacctcgtttgccattatcgagcgtgcaacgaaggcgtttaacaagattaaagaagctcgcgttatcgccagcagcccgccagcaattagcggtcttggtagttctgcgggttttgatatggagttgcaggaccacgctggagcaggtcacgatgcgctgatggcagcacgtaaccagttgctggcgctggcggcggaaaacccggagctaacccgtgtgcgccataacggcctcgacgacagtccgcagttgcagattgatatcgaccagcgtaaagctcaggcgctgggcgttgctatcgacgatattaacgacacactgcaaaccgcctggggttcgagctatgtgaatgactttatggatcgcggtcgcgtgaagaaagtctatgtgcaggcagctgcgccgtatcgcatgctgccagatgatatcaatctctggtatgtccgaaataaagatggcggcatggtgcccttctctgctttcgcgacctcacgctgggagacaggctcgccgcgtctggaacgctataacggttattctgcggttgagattgttggggaagccgcaccgggggtcagtaccggtacggcgatggatattatggaatcgttagtgaagcagttgccaaacggctttggtctggagtggacggcgatgtcgtatcaggagcggctttccggcgcgcaggctccggcgctgtacgccatttccttgctggtggtattcctgtgtctggcggcgctgtatgaaagctggtcggtgccgttctcggtaatgctggtcgtgccgctgggggttatcggcgcgctgctggcaacctggatgcgcgggctggaaaacgacgtttacttccaggtgggcctgttaacggtcattggtttatcggcgaaaaacgccatcctgatcgtcgagtttgctaacgagatgaaccaaaaaggccacgacctgtttgaagcgacgctccacgcctgccgtcagcgtttacgcccgattctgatgacctcgctggcatttatcttcggcgtattgccaatggcaaccagcacgggtgccggttccggtggtcagcatgcggtgggtactggcgtaatgggcgggatgatttcggccactattctggctatttacttcgtgccgctgttctttgtgctggtgcgccgccgcttcccgctgaagccgcgcccggaataa

SEQ ID NO: 35783 - DNA, 357 bp, Escherichia coli
atggttacactttacggcatcaaaaattgtgacaccattaaaaaggctcgccgttggctggaagccaataacatcgactatcgttttcatgattaccgcgtcgatgggctggacagcgaattattgaacggttttatcaacgaattaggctgggaagcgttactcaacacccgtggtacaacctggcgtaaactggacgaaaccacccgcaataaaatcatcgatgcggcctctgcggcggcattaatgactgaaatgcctgcaattatcaaacgtccattgctctgcacgcccggtaagcctatgctgctgggtttcagtgattccagttatcagcaatttttccatgaggtgtag

SEQ ID NO: 35784 - DNA, 1128 bp, Escherichia coli
atgtcgtgcccggttattgagctgacacaacagcttattcgccgcccttccctgagtcctgatgacgcaggatgtcaggctttgttgattgaacgtttgcaggcgatcggttttaccgttgaacgcatggattttgccgatacgcagaatttttgggcatggcgtgggcaaggtgaaacgttggcctttgccgggcataccgacgtggtgccgcctggcgacgccgatcgttggatcaatccgccgtttgaacccaccattcgtgatggcatgttattcgggcgcggtgcggcagatatgaaaggctcgctggcagcgatggtggtagcggcagaacgctttgtcgcacaacatcccaaccatgcaggtcgactggcatttctgatcacttctgatgaggaagccagtgcccataacggtacggtaaaagtcgtcgaagcgttgatggcacgtaatgagcgtctcgattactgcctggttggcgaaccgtcgagtatcgaagtggtaggtgatgtggtgaaaaatggtcgtcgcggatcgttaacctgcaacctcaccattcatggcgtgcaggggcatgttgcctacccacatctggctgacaatccggtacatcgcgcagcacctttccttaatgaattagtggctattgagtgggatcagggcaatgaattcttcccggcgaccagtatgcagattgccaatattcaggcgggaacgggcagtaacaacgttattccgggtgaactgtttgtgcagtttaacttccgcttcagcaccgaactgactgatgagatgatcaaagcgcaggtacttgccctgcttgaaaaacatcaactgcgttatacggtggaatggtggctttccgggcagccatttttgaccgcgcgcggtaaactggtggatgcggtcgttaacgcggttgagcactataatgaaattaaaccgcagctactgaccacaggcggaacgtccgacgggcgctttattgcccgcatgggggcgcaggtggtggaactcgggccggtcaatgccactattcataaaattaatgaatgtgtgaacgctgccgacctgcagctacttgcccgtatgtatcaacgtatcatggaacagctcgtcgcctga

SEQ ID NO: 35785 - DNA, 201 bp, Escherichia coli
atggactggctggctaaatattggtggattctggtgattgtctttttggtaggcgtcctgctgaacgtgattaaagatctcaagcgcgtcgaccataagaaatttctcgccaacaagccggagcttcccccgcatcgtgatttcaacgataagtgggacgatgacgacgactggccgaaaaaggatcaaccgaagaagtaa

SEQ ID NO: 35786 - DNA, 699 bp, Escherichia coli
atgaaacatgaccattttgttgttcaaagcccggataaacctgcgcaacagttgttactgcttttccacggtgtcggggataacccggtggcaatgggggaaataggcagctggtttgcgccgctatttcctgatgcgctggtggtgagtgtcggaggcgcggagccgagcggtaatccggcggggcgtcagtggttttcggtgcagggtattacggaagataatcgccaggcacgtgtggatgccatcatgccgacgtttattgaaacggtgcgctactggcagaaacagagcggagtaggggctaacgccacggcactaatcggtttctctcaaggcgcgattatggcgctggagagcattaaagccgaaccgggccttgcttcgcgcgtcattgcctttaacggacgctatgccagcctgccggaaaccgcgtctacagccacgacaattcacttgattcatggtggtgaagatccggttatcgatctggcgcatgcggttgcggcgcaggaagcgttaatcagtgccggtggtgacgtgacgctggatatcgtggaggatttaggccatgcgatcgacaatcgcagtatgcaatttgccctggatcacttgcgttataccattccgaaacattatttcgacgaagcgctaagtggcggtaagcctggcaatgatgatgtgattgaaatgatgtaa

SEQ ID NO: 35787 - DNA, 2016 bp, Escherichia coli
atggctgaactgactgcgcttcacacattaacagcgcaaatgaaacgtgaagggatccgccgcttgctggtgttgagcggggaagagggttggtgttttgatcatgcgcttaagttgcgtgatgccttacctggcgactggctgtggatttcgccgcagccagtcgctgaaaaccactgttttccctcggcgctacaaactttacttgggcgcgagttccggcatgcggtattcgacgcccgccacggctttgatgccgctgcctttgcggcacttagcggaacgttgaaagcgggaagttggctggttttgttactccctgtatgggaagagtgggaaaaccaacctgatgccgactcgctgcgctggagtgattgccctgaccctattgcgacgccgcattttgtccagcatctcaaacgcgtacttacggcgaataacgacgctatcctctggcggcagaaccagcagttctcgttggcgcattttgctccccgtactgactggcaccccgctaccggcgcaccacaaccagaacaacagcaactcttacagcagttactgaccatgccgccgggcgtggcagcggtaactgctgcgcgtgggcgcggtaaatcggcgttggcagggcaactcatttctcgtattgcgggcagtgcgattgtcaccgcgcccgcaaaagcggcaacggatgtactggcacaatttgcgggcgagaagtttcgctttattgcaccggatgccttgttagccagcgatgagcaagccgactggctggtggtcgatgaagccgcagccatacctgcgccgttgttgcatcaactggtatcgcgttttcctcgaacgttgttaaccactacggtgcagggctacgaaggcaccggacgtggttttttgctgaaattttgcgctcgctttccgcatttacaccgttttgaactgcaacaaccgatccgctgggcgcagggatgcccgctggaaaaaatggttagtgaggcactggtgtttgacgatgaaaacttcacccatacaccacaaggcaatatcgtcattgccgcatttgaacagacgttatggcgaagtgagccagaaacgccgttaaaggtttatcaattattgtctggtgcgcactaccggacttcgccgctggatttacgccgcatgatggatgcaccaggtcaacattttttacaggcggctggcgaaaacgagattgccggagcgctgtggctggtggatgagggcggattatctcaagaactcagtcaggcggtatgggcgggttttcgtcgcccgcggggtaatctggtggcccagtcgctggcggcgcacggcagcaatccactggcggcgacattgcgcggacggcgggttagccggatagcagttcatcctgctcgtcagcgggaaggcacagggcgacagcttattgttggtgctttgcaatatacgcatgacctcgactatctttcggtgagttttggttacaccgaggagttatggcgtttctggcaacgctgcggttttgtgctggtgcgaatgggtaatcatcgtgaagccagcagcggttgctatacggcgatggcgctgttaccgatgagtgatgcgggtaaacagctggctgaacgtgagcattaccgtttacgtcgcgatgcgcaagctctcgcgcagtggaatggcgaaacgcttcctgttgatccactaaacgatgccgtcctttctgacgacgactggcttgaactggccggttttgctttcactcatcgtccgctattaacgtcgttaggttgcttattgcgtctgctacaaaccagcgaactggcattaccggcgctgcgtgggcgtttacagaaaaacgccagtgacgcgcagttatgtaccacacttaaactttcaggccgtaagctgttactggtccgtcaacgcgaagaagccgcgcaggcgctgttcgcacttaatgatgttcgcactgagcgtctgcgcgatcgcataacgcaatggcaattttttcactga

SEQ ID NO: 35788 - DNA, 864 bp, Escherichia coli
atgcgttggcaagggcgacgtgaaagtgacaatgttgaagacaggcgcaacagctctggtggtccgtcaatgggcggtcccggttttcgcctgccaagcggtaaaggcgggctgattttactgatagtcgtgctggttgcaggctactatggcgttgatttaaccgggttgatgaccggacagccggtttcccaacagcaatcaacacggtcaattagtcctaatgaagacgaagccgcaaaattcacttcggtgattctggcaaccacggaagacacctggggacagcaattcgagaagatgggtaaaacctatcagcaaccgaagctggtcatgtaccgtggaatgacgcgcaccggctgcggggcgggccagtccattatgggaccgttctattgcccggcggatggcacggtttatatcgatctctctttctatgatgacatgaaagacaaacttggcgcggatggcgattttgcccaggggtacgttatcgcccatgaagtcggtcatcatgtgcagaaactgttaggcatcgagccgaaagttcgtcaactgcaacaaaacgcgacgcaggcggaagtgaaccgcttatctgtgcgtatggaactccaggccgactgttttgccggtgtctgggggcatagtatgcagcagcaaggtgttctggaaaccggcgatctggaagaggcgctgaacgcggcgcaggccatcggcgatgaccgtttacaacagcaaagtcaggggcgagtagtaccagacagtttcactcatggcacttctcagcaacgctacagctggtttaaacgtggtttcgacagcggtgatccggcacaatgcaatacttttggtaaaagcatttaa

SEQ ID NO: 35789 - DNA, 714 bp, Escherichia coli
atgcaaaagcaagctgagttgtatcgtggtaaagcgaaaaccgtatacagcacggaaaacccggacctgttggtgctcgaattccgcaatgatacgtcagcaggggatggcgcgcgcattgagcagtttgatcgcaaaggtatggtgaacaacaagttcaactacttcattatgagcaaactggctgaagcgggtatcccgactcaaatggagcgtctgctctccgataccgaatgtctggtgaaaaagctggatatggtgccggttgagtgtgtcgtgcgtaaccgtgctgctggctctctggtgaaacgtcttggaatcgaagaaggtattgagctgaacccgccgctgttcgatctgttcctgaaaaacgacgccatgcacgatccgatggtcaacgaatcttactgcgaaacctttggctgggtgagcaaagagaacctggcgcgtatgaaagagctgacctacaaagcgaacgacgtgctgaaaaaactgttcgatgatgctggtctgattttggtcgactttaaactggagtttggcctgtacaaaggtgaagtggtactgggcgatgagttctccccggacggcagccgcctgtgggacaaagaaacgctggagaaaatggacaaagaccgtttccgccagagcctcggtggcctgatcgaagcctatgaagccgtcgcccgccgcctgggtgtacagctggactga

SEQ ID NO: 35790 - DNA, 1035 bp, Escherichia coli
atggcttactctgttcaaaagtcgcgcctggcaaaggttgcgggtgtttcgcttgttttattactcgctgcctgtagttctgactcacgctataagcgtcaggtcagtggtgatgaagcctacctggaagcggcaccgcttgcggagcttcatgccccggctggaatgattttgccggtgacctccggtgattatgcaatcccggtgaccaacggtagtggtgctgtcggtaaggcgctggacattcgtccaccagcccagccgctggcactggtttctggcgcgcgtacccagttcacgggcgataccgcttcattgctggtggaaaatggtcgtggcaatactctgtggccgcaggtggttagcgtgctgcaggcgaaaaactacaccatcacccaacgtgatgatgctggtcagacactgaccaccgattgggtacaatggaaccgtctggacgaagacgagcagtatcgtggtcgttatcaaatctctgttaagccgcagggttatcagcaggcggttacggttaaactgctgaacctggaacaggcgggcaaaccggttgcagacgcggcttccatgcagcgttacagcacggagatgatgaacgttatttccgccggtctggataaatctgccactgacgccgcgaacgctgcgcaaaatcgtgcctccaccactatggacgtacaaagtgcagctgatgacaccggtttaccgatgctggtcgtacgcgggccgttcaatgtggtttggcaacgtctgccagcggcgctggaaaaagtgggcatgaaagtgaccgacagcacccgttcgcagggtaacatggccgtaacttacaagccgctgtctgacagcgactggcaggaactgggcgcgagcgatccaggcctggcatccggtgactataaactgcaggttggcgatttagataaccgcagcagcctacagttcatcgatccgaaaggtcatactctgactcagagtcagaacgacgcgctggtagctgtcttccaggctgcgtttagcaagtaa

SEQ ID NO: 35791 - DNA, 879 bp, Escherichia coli
atgttcacgggaagtattgtcgcgattgttactccgatggatgaaaaaggtaatgtctgtcgggctagcttgaaaaaactgattgattatcatgtcgccagcggtacttcggcgatcgtttctgttggcaccactggcgagtccgctaccttaaatcatgacgaacatgctgatgtggtgatgatgacgctggagctggctgacgggcgcattccggtgattgccgggaccggcgctaacgctactgcggaagccattagcctgacgcagcgcttcaatgacagtggtatcgtcggctgcctgacggtaaccccttactacaatcgtccgtcgcaagaaggtttgtatcagcatttcaaagccatcgctgaacatactgacctgccgcaaattctgtataatgtgccgtcccgtactggctgcgatctgcttccggaaacggtgggccgtctggcgaaagtaaaaaatattatcggaatcaaagaggcaacagggaacttaacgcgtgtaaaccagatcaaagagctggtttcagatgattttgttctgctgagcggcgatgatgcgagcgcgctggacttcatgcaattaggcggtcatggggttatttccgttacggctaacgtcgcagcgcgtgatatggcccagatgtgcaaactggcagcagaagggcattttgccgaggcacgcgttattaatcagcgtctgatgccattacacaacaaactatttgtcgaacccaatccaatcccggtgaaatgggcatgtaaggaactgggtcttgtggcgaccgatacgctgcgcctgccaatgacacctatcaccgacagtggtcgtgagacggtcagagcggcgcttaagcatgccggtttgctgtaa

SEQ ID NO: 35792 - DNA, 573 bp, Escherichia coli
ttgacactgtcatcgcaacattatctggtgatcactgcgttgggtgccgatcgccctggaattgtgaacaccatcacccgtcatgtcagtagttgcggctgtaatattgaagacagtcgcctggcgatgctgggagaagagttcacgtttatcatgctgctttccggttcatggaatgccattactctgattgaatcaacgttaccgttgaaaggtgcagaactggatcttttaatcgtgatgaagcgcacgacggcgcgtccgcgtccgccaatgccagcatctgtctgggttcaggtcgatgtggcagactccccgcatttaattgaacgcttcacagcacttttcgacgcgcatcatatgaacattgcggagctggtgtcgcgcacgcaacctgctgaaaatgaacgggctgcgcagttgcatattcagataaccgcccacagccccgcatctgcggacgcagcaaatattgagcaagcgttcaaagccctatgtacagaactcaatgcacaaggcagtattaacgtcgtcaattattcccaacatgatgaacaggatggagttaagtaa

SEQ ID NO: 35793 - DNA, 471 bp, Escherichia coli; identical to SEQ ID NO: 2665

SEQ ID NO: 35794 - DNA, 618 bp, Escherichia coli; identical to SEQ ID NO: 9477

SEQ ID NO: 35795 - DNA, 2019 bp, Escherichia coli
atggatgccctgcaattattaacctggtcactgatcctctatctgtttgccagtctggcttcgctgtttttactcggtctggacagactggctattaagctttccggcatcacatcgctggtgggtggcgtgattggcatcatcagcggaattacgcaattacatgcaggcgtaactttagtcgcccgttttgccacgccttttgactttgccgatttaacactgcgaatggatagcctctcggcatttatggtgatggttatctccttgctggtggtggtttgttcgctctattcattgacttatatgcgcgaatacgagggtaaaggcgcggcggcgatgggcttctttatgaatcttttcatcgcatcgatggttgccctgctggtgatggacaacgctttttggttcatcgtgctgtttgaaatgatgtcgctgtcttcctggtttctggtcattgccaggcaggataaaacgtcgatcaacgctggcatgctctacttttttatcgcccacgccggatcggtgctgattatgatcgccttcttgctgatggggcgcgaaagcggcagcctcgattttgccagtttccgcacgctttcactttctccggggctggcgtcggcggtgttcctgctggcctttttcggttttggcgcgaaagccgggatgatgccgttgcacagctggttgccacgcgctcaccctgccgcaccatcgcacgcttcggcgttgatgtctggcgtaatggtcaaaatcggtattttcggcatcctgaaagtagcgattgatctgctggcgcaaacgggtttgccgctgtggtggggcattctggtgatggcgatcggcgcaatctccgcgctcctgggcgtgctgtatgcgctggcggaacaggatatcaaacggctgctggcctggagcaccgtcgaaaacgtcggcattattttgctggcggtcggtgtggcgatggtcggtctgtcactgcacgacccgctgctcaccgttgttggactgctcggcgcgctgtttcatctgctcaaccatgcgctgttcaaagggctgctgtttctcggcgcgggtgcgattatttcgcgtttgcatacccacgacatggaaaaaatgggggcactggcgaaacggatgccgtggacagccgcagcatgcctgattggttgcctcgcgatatcagccattcctccgctgaatggttttatcagcgaatggtacacctggcagtcgctgttctcactaagtcgtgtggaagccgtagcgctacaacttgcgggtcctattgctatggtgatgctggcagtcactggtgggctggcagtaatgtgcttcgtcaaaatgtacggtattactttctgtggcgcgccgcgcagtacacacgctgaagaggcacaggaagtgccaaatacgatgatcgtcgccatgctactgctcgcggcactctgcgtattcattgcgcttagtgccagttggctggcaccgaagataatgcacattgcccatgcgtttaccaatacccctcccgtcactgtcaccagcggaatagcacttgtacccggcacgtttcatacacgggtcactccctcattactgttgctgttactactggcgatgcctttgctgcctggcctttactggctgtggtgtcgttcgcgccgcgcagcgtttcgtcgcactggagatgcctgggcatgcggctacggctgggaacatgcgatggccccgtcaggcaatggcgtgatgcagccgctgcgtgtggtcttttgtgcgctatttcgtctacgacaacagctcgaccctacgctgaggctgaacaaaggtcttgcgcacgtcaccgccagggctcagagcacagaacccttctgggatgagcgggtgatccgccccatcgtgagcgccacccaacggctggccaaagaaatacagcatctgcaaagtggcgactttcgtctctattgcctgtatgtggtcgccgcactggttgtgctgctaatcgctattgccgtctaa

SEQ ID NO: 35796 - DNA, 948 bp, Escherichia coli
atgagacaaactctttgcgacggatatctggtcatttttgcgttagcacaggccgtgactctgctggtgctaaccccgctttttacggggatttcccggcagatacgcgcgcgaatgcactcccgtcgcggaccggggttctggcaggattatcgcgatatccacaaactgtttaaacgccaggaagttgcgccgacatcttcaggtctgatgttccgcctgatgccgtgggtattaatcagcagcatgctggtgctggcgatggccctgccactatttattactgtttccccttttgcgggcggcggcgatctgatcacccttatctatcttcttgccctgtttcattttttctttgctctttccgggctggataccggaagcccgtttgcgggagtcggtgccagtcgcgagttgacgctcggcattctggtcgaacccatgctcattctctcactgctggtattggcgctgatagcggattccacgcatatcgagatgatcagcaagacgctggcgacgggctggaactcgccgctaaccaccgtactggcgttactggcctgtggttttgcctgcttcattgagatgggaaaaattccctttgatgttgctgaagcagaacaggaattacaggaaggcccgctgaccgaatattccggtgccgggctggcgctggcgaagttggggctggggctgaaacaggtcgtgatggcatcactgtttgtggccctgtttctgccctttgggcgcgcgcaagagctttctctcgcctgcctgctgacttcacttgtcgttacgctgctcaaggttttgctgatttttgtactggcctcaatcgcagaaaacacgctggcacgcgggcgatttttactcattcaccatgtgacctggcttggcttcagccttgctgcgcttgcatgggtcttctggttaaccggtctgtaa

SEQ ID NO: 35797 - DNA, 1440 bp, Escherichia coli
atggaaaatcttgctctgacgacgttattgctgccttttatcggcgcactggtcgtttcgttttcgccacaacgtcgggccgccgaatggggggttttgttcgccgcgctgaccacgctgtgcatgttgtcactgatctccgcgttttatcaggccgataaagttgccgtcacgttgacgttggtcaacgtggggggtgtggcgttgtttggcctggtcattgatcgcgtgagtacgctgattctgtttgtggtggtgtttctcggtttgctggtcacgatctactccacgggttatctgacggataaaaatcgcgaacacccgcataacggcacgaatcgttattacgcatttttgctggtttttatcggcgcgatggcgggactggtactctcctcgacgctgctcggtcagttgttgttttttgaaattacgggcggctgctcctgggcgttgatcagttattaccagagcgataaagcgcagcgttcagcactaaaagcgttgcttatcactcatatcggttcgttggggttgtatcttgccgccgccacgctgtttttgcagaccggaacgttcgcgctcagcgcgatgagcgagttacacggcgacgcacgctatctggtttatggtggcatcctgtttgccgcgtgggggaaatcggcccagctaccgatgcaagcgtggctaccggatgcaatggaagcgccaacaccgatcagcgcctatctccacgccgcatcgatggtgaaagtgggcgtttacatttttgcccgcgccattatcgacggcggcaatatcccgcatgtgattggcggcgttggcatggttatggcactggtcaccattctttatggcttcctgatgtatttgccacagcaggatatgaagcggttgctggcctggtcgaccatcactcaacttggctggatgtttttcggcttgtcgctctccatcttcggctcgcggctggcgctggagggcagcatcgcctacatcgtcaaccacgcgttcgctaaaagcctatttttccttgtagcaggtgcgctgagttacagctgcggcacgcgcttgttgccgcgtctgcgtggcgtattgcacaccctgccgttgccaggcgtgggtttctgcgtggcagcgctggcgattaccggcgtaccgccgttcaacggcttcttcagtaaattcccgctgtttgccgccggttttgcgttgtcagtggagtactggatcctgctgcccgccatgattctgctgatgattgaatcggtcgccagtttcgcctggtttattcgctggtttggtcgcgtcgtgcctggcaaaccgagcgaggccgtcgccgatgccgcaccgctgccaggatcaatgcgcctggtgttgattgtactgattgtgatgtcgctgatttccagcgtaatcgccgcgacctggttgcagtaa

SEQ ID NO: 35798 - DNA, 651 bp, Escherichia coli
atgaccggttctatgatcgtaaataatctggcgggactgatgatgctgacatcgctgtttgtgattagcgtcaaaagctatcgcctgtcatgcggattttacgcctgccagtcgctggtgctggtgtctattttcgccaccctctcgtgcctgttcgtcgcagagcaactgctgatctggtccgccagcgcctttatcaccaaagtgctgctggtaccgttaatcatgacttacgctgcacgaaatattccccagaacatcccggaaaaagcgttattcggtccggcaatgatgacactgctcgcggcgttaattgtcctgctttgcgcatttgtcgttcagcccgtgaagctaccgatggctaccgggctgaaaccggcgctggcggtggcgttaggtcattttctgcttggcctgctgtgcattgtcagccagcgcaatatcctgcggcaaatttttggttactgcctgatggaaaacggctcccatctggtgctggcgcttcttgcctggcgagcaccggaactggtggaaataggtatcgctaccgacgccatcttcgccgtcattgtgatggtgttactggcaagaaaaatatggcgtacccacggcacgctggacgtgaataacttgaccgcgctgaagggataa

SEQ ID NO: 35799 - DNA, 1581 bp, Escherichia coli
atgagttattctgtgatgttcgctttactcctgctcacgccgctgcttttttcgctgctctgttttgcctgccggaaacgggggcactctgcgactcgcacggtgacagtactacatggcttagggatcacactgctgctgattctggcactgtgggtggtccaaactgccgctgatgcgggagaaatattcgctgcgggactgtggcttcacattgatggtctgggcggtttgttcctcgccattcttggtgtgattggctttctcaccggtgtttactcgattggctacatgcgtcatgaagtggcacacggcgagctttcacccgttacgctgtgcgattactacggtttcttccatctgtttttgttcaccatgctgctggttgttaccagcaataacctgattgtgatgtgggcggcaattgaagccaccaccttaagctcggcgtttctggtaggcatttacggtcagcgttcatcgctggaagctgcatggaagtacatcattatttgtactgttggtgtcgcttttggtctgttcggtaccgtgctggtatacgccaacgccgccagcgttatgccgcaggcagaaatggcgatattctggagcgaggttcttaagcaatcgtccttgcttgacccaacattaatgctgttggcctttgtgtttgtgctaattggctttggcaccaaaaccgggctattccccatgcacgcctggctgccagatgctcacagtgaagcgccgagtccggtcagcgccctgctctccgccgtattgctgaactgcgcgctgttggtgcttattcgctattacatcattatttgccaggccatcggcagcgatttccccaaccggttgttgctcatcttcggcatgttgtcggttgccgtggcggcatttttcattctggtacagcgggacattaagcgtctgctggcgtactccagcgtggagaacatgggactggtcgcggtggcgttaggcattggcgggccgctgggaatttttgccgcgctgctgcacaccttaaaccacagtctggccaaaacgctgttgttctgcggttccggcaatgtactgctcaagtacggcacgcgcgatctcaacgtcgtctgtgggatgctcaaaatcatgccatttaccgccgtgttgtttggcggcggtgcgctggcgctggccgggatgccgcccttcaacatttttcttagcgaatttatgaccgttaccgccggactggcgcgtaatcatctgctgcttatcgtcctgctgttattgctgttaacgctggtgctggcgggcctggtacggatggctgcacgggtattaatggcgaaaccgccgcaggccgttaaccggggtgaacttggctggttgaccacctcgccaatggtgattctgctggtcatgatgctggcgatgggaacgcatattccacaacctgtcatcaggatcctggcgggcgcttccactatagtcctctcagggacgcacaacctgcctgcacaacgtagcacctggcatgattttttgccttcaggcaccgcatctgtttcggagaaacacagtgaacgttaa

SEQ ID NO: 35800 - DNA, 1716 bp, Escherichia coli
gtgaacgttaattcatcgtcaaatcgtggcgaagcgattctcgccgccctgaaaacgcagttccccggcgcggtgctggatgaagagcgacaaacgcctgaacaggtcaccattacggtgaaaatcaatctgctgcctgacgttgtacattatctttattatcaacatgatggctggcttccggtcctgtttggcaacgacgagcggacacttaacggtcattacgcggtttattacgccctttctatggaaggggccgaaaaatgctggatcgtggtgaaggcactggtcgatgccgacagtcgggagtttccgtcagtcacaccgcgcgtccctgccgcggtctggggcgagcgagaaattcgcgatatgtacgggctgattccggttggcctgccggatcagcgtcggctggtgttgcccgatgactggccggaagatatgcatccgctgcgcaaagacgcgatggattatcgactgcgcccagaaccgacgactgataccgaaacgtatccgtttatcaacgagggcaacagcgatgcgcgggtgatccctgtcggcccgctgcatatcacctccgatgaaccaggtcacttccgcttgtttgtggatggcgagcaaattgtcgatgctgattaccgcctgttttatgtccatcgcggcatggagaaactggcagaaacgcggatgggctacaacgaagtgaccttcttatccgaccgcgtgtgtgggatttgtggttttgcccacagtgtggcctataccaactcggttgaaaatgcactggggattgaggtgccgcaacgagcgcatactattcgctcgattctgctggaagtcgaacggctgcacagtcatttgctcaaccttggcctctcctgtcattttgttggttttgataccggctttatgcaatttttccgcgtgcgggaaaagtcgatgacgatggcggaattgctgaccgggtcgcgtaaaacctacggtctgaatctgattggtggtgttcgccgcgatattctcaaagagcaacgtctgcaaacgctgaaactagtgcgcgagatgcgcgccgacgtgtcggagctggtagagatgctgcttgccacgccgaatatggaacaacgcactcagggcattggcattctcgaccgacaaatcgcccgtgattatagccctgtcgggccgctgatccgcggcagtggttttgcccgtgatttgcgctttgatcacccctacgccgactacggcaatattccaaaaacgctgtttacctttaccggcggcgatgtcttctcccgcgtgatggtccgtgtcaaagagacgtttgattcgctggcaatgctggaatttgccctcgacaacatgccagataccccactgctgaccgaaggctttagctataaacctcacgcattcgcgctgggctttgttgaagcgccacgtggtgaagacgtgcactggagcatgctcggtgataaccaaaaattgttccgctggcgctgtcgtgccgccacctacgccaactggccagtgctgcgttacatgctgcgcggcaataccgtttctgacgcaccgctaattatcggtagccttgatccctgctactcctgtaccgaccgtgtgacgctggttgatgtgcgcaagcgccagtcaaaaatcgtgccgtataaagagatcgaacgctacggcattgatcgtaaccgttcgccgctgaagtaa

SEQ ID NO: 35801 - DNA, 546 bp, Escherichia coli
atgctgaagttactgaaaactattatgcgcgccggaaccgcgacggtgaaatatcccttcgcaccactggaggtcagcccaggctttcgcgggaaaccggacctgatgcccagccaatgtattgcctgcggtgcctgcgcctgtgcttgtccggcaaatgcgctgactatccagaccgactaccagcaaaatacgcgcacctggcagctctatctgggacgttgtatttactgcggacgttgtgaagaagtgtgcccgaccagagccattcagcttaccaataactttgaactgaccgtcaccaataaagccgatctctatacccgcgcgacgttccatctacaacgttgcagccgttgcgaacgcccgtttgccccgcaaaaaaccgtcgcactggctgcagaactgttggcacagcaacaaaatgcaccacaaaaccgcgaaatgttgcgggcgcaagcgagcgtctgcccggaatgcaaacaacgcgcgacgctgatcaacgacgacacagatgaaccgctggtggctaaggagcagctatga

SEQ ID NO: 35802 - DNA, 759 bp, Escherichia coli
atgagtccagtgcttacgcaacatgtcagccagcccataacgctggacgagcaaacgcaaaagatgaagcagcatttgctacaggatatccgtcgctcggcctacgtttatcgcgtcgattgcggcggctgtaacgcctgcgaaatcgaaatttttgccgccatcacacccgtattcgacgcagaacgttttggcattaaggttgtttcatcaccgcgtcacgccgatattttgttatttactggcgcagtcacccgggcgatgcgtatgcctgcacttcgggcatatgagtctgcccccgatcataaaatctgtgtttcctacggcgcgtgtggtgtcggcggcggtattttccacgatctctacagcgtctggggcggcagcgacaccattgtccccattgatgtttggatccccggctgcccgccaacaccggccgccaccattcacggtttcgccgtggcgctcggtttgctgcaacagaagattcacgcggtggattatcgcgatcccaccggggtgaccatgcaaccgctgtggccgcagatcccgccatcacagcgtatcgccattgagcgagaagcgaggcggctggcgggctatcgtcaagggcgagaaatttgcgatcgactcctgcgccatttaagcgacgatcccacaggaaatcgggttaacacctggttgcgcgaagccgacgatccgcgtctcaatagtatcgttcagcaactctttcgcgttctccgggggttacatggctga

SEQ ID NO: 35803 - DNA, 414 bp, Escherichia coli
atggctgaggagtgcagggaaattgttttctggatgctgcgaaaaaaatttatcgccagtagcgacgagatgccggaacacagctcccaggtaatgtattactcgttggctatcggccatcacgttggcgtgattgattgtctgaatgtcgccttccgctgcccactgacggaatacgaagattggcttgcactggtcgaagaggagcaagcccgacgtaagatgctgggggtgatgacttttggtgagattgttattgacgccagccacaccgccctgttgacccgggcattcgcgccactggcagatgacgcgacgtcggcgtggcaggcgcgtagcattcaattcattcatctgttggatgaaattgtgcaggaaccggccatctatctgatggccagaaaaattgcgtga

SEQ ID NO: 35804 - DNA, 2013 bp, Escherichia coli
atggctatgtcagacgaggcgatgtttgccccgccgcaaggaataacaattgaagcggtaaacggaatgctcgcggagcggttagcgcagaaacacggcaaggcgtctttattacgcgccttcatcccgctgccgccgccgttcagcccggtacaacttattgaactgcatgttctcaaaagcaacttctattaccgctaccatgatgatggcagcgatgtgacggcaacaacagagtatcagggtgagatggtcgattattcgcgtcacgccgtccttctcggcagtagtggaatggcggagctacgctttattcgcactcacggcagccgttttactccccaggattgcacactgtttaactggctggcacacataatcactccggttctgcaatcatggctcaatgatgaagaacagcaggtggcgctgcgtttgctggagaaagatcgcgatcatcatcgggtactggtggatatcactaatgcagtgttgtcacatcttgatctcgacgttctgatcgctgacgtcgctcgtgagatccatcattttttcggtctggcttcagtcagtatggtactgggcgatcatcgaaagaacgagaagttcagcctgtggtgcagcgatctttctgcctcacattgtgcgtgtctgccacgctgtatgcctggcgaaagtgtattgctgacacaaacgctacaaacccgacaaccgaccttgacgcaccgtgcagacgatctgtttctctggcaacgcgacccgttattacacttacttgcatctaacggctgcgaatctgcgctcctgataccgctcacctttggcaaccatacaccgggcgcattgttgctggcgcatacctcttccactctctttagtgaggaaaactgccagctactacaacatattgccgatcgcatcgctattgccgttggcaatgccgatgcctggcgcagcatgaccgatttgcaggaaagcttgcagcaagaaaaccaccagcttagcgagcagctcctttcgaatctgggcgtcggtgacattatctatcaaagccaggcaatggaagatttgctccagcaggtagatattgtggcgaagagcgtcagtacggtgttgatttgtggtgaaaccggaaccggcaaagaggtgatcgccagagcgatccatcaacttagcccacgacgcgacaagccactggtcaaaatcaactgcgctgccatccccgccagtcttctggaaagtgagttattcggtcatgacaaaggggcatttactggtgcgattaatacccatcgtggtcgttttgaaattgccgatggcggcacgttgtttctcgatgaaattggcgatctgccgttagaacttcagcctaaactgctgcgcgtattgcaggaacgggagattgagcgtctcggcgggagtagaacgatcccggtgaatgtcagagtcattgccgccaccaaccgtgatttgtggcaaatggttgaagatcgccagtttcgcagcgatctcttttatcgcctgaatgtcttcccactggaattgccgccgctgcgcgaccgtccggaagatatccctcttttagcaaaacatttcacgcaaaaaatggcgcgccatatgaatcgcgcaattgacgccatcccgaccgaggcactacgccagttgatgtcgtgggattggccgggcaacgtgcgcgagctggaaaacgtgattgagcgagcggtactactgactcgcggtaacagtctgaatttacatcttaatgtccgacaaagccgtttactgccgacgctaaatgaagattcagcgcttcgcagttcaatggcacagttgctgcacccgacgacgccagagaatgacgaagaagaacgtcagcgcattgttcaggtattgcgagaaaccaatggcattgttgccgggctccgtggcgcggcgacgcgattagggatgaagcgcaccacgctgctgtcacgaatgcagcggctggggatctcggttcgcgaggtgttgtaa

SEQ ID NO: 35805 - DNA, 849 bp, Escherichia coli
atgagaaacaaactctctttcgacttgcagttgagcgccagaaaagcggcaatcgctgaacggattgctgcccataaaattgcccgcagcaaagtatcggtctttttaatggcgatgtccgctggcgtgtttatggcgattggatttactttttacctttccgttatcgccgatgccccgtcttcacaggcattaacccatctggtgggcggcctttgctttacactcggctttattttgctagcggtttgcggcaccagcctgttcacctcgtcggtaatgacggtgatggcaaaaagtcggggcgttattagctggcgaacatggctgattaatgcacttctggtggcctgcggtaatctggcaggtattgcctgtttcagtttgttaatctggttttccgggctggtgatgagtgaaaacgcgatgtggggagtcgcggttttacactgcgccgagggcaaaatgcatcatacatttactgaatcagtcagcctcggcattatgtgcaatgtgatggtttgcctggcgctgtggatgagttattgcggacgttcattatgcgacaaaatcgtcgccatgattttgcccatcaccctgtttgtcgcaagtggctttgagcactgtatcgccaatttgtttgtgattccgttcgccattgccattcgccatttcgcccctccccccttctggcaactggcgcacagtagcgcagacaattttccggcactgacggtcagccattttattaccgccaatctgctcccggtgatgctgggtaatattatcggcggtgcagtgctggtgagtatttgttatcgggctatttatttacgtcaggaaccctaa

SEQ ID NO: 35806 - DNA, 1062 bp, Escherichia coli
atgctcgaaatgttgatgcaatggtatcgccgccgttttagcgacccggaagcgattgccttgctggttattttagttgccggatttggcattatctttttctttagtggcctgcttgctccgttgctggtggctattgtgctggcctatttgctggaatggccaaccgtgcgcctgcaatctattggctgctcccgccgctgggcgacgtcgattgtattggtggttttcgtcggtatattgctactgatggcgttcgtggtattgcctatcgcctggcagcagggcatctacttaattcgcgatatgccggggatgctcaataagctttctgactttgccgccacgttgccgcgccgctatccggcgttgatggatgcgggcattattgatgcaatggccgaaaatatgcgcagtcggatgctgaccatgggcgattcggtggtgaaaatttccctcgcctcgctggtcggtttgctgaccattgccgtctatctggtgctggtaccattgatggtcttcttcctgctgaaagacaaagagcagatgctgaacgccgttcgccgggtgctgccacgtaaccgtggactggcaggacaggtgtggaaggagatgaatcaacaaatcaccaactatatccgcggcaaagtgctggagatgatcgtggtggggatcgccacctggctgggattcttactcttcgggctgaactattcgctgctgctggcggtgctggtcggcttctcggtacttattccgtacattggcgcatttgtggtgaccattccggtggttggcgtggcgctattccagtttggtgctggcacggaattctggagctgcttcgcggtgtatctgatcattcaggcgctggacggcaacctgttagtacctgtgttgttctccgaagcggttaacctgcatccgctggtcattattttatcggtggtgatcttcggtggtttgtggggattctggggcgtattcttcgccattccgttggcgacgctgatcaaagccgtgattcatgcctggcccgatgggcaaatcgcgcaagaataa

SEQ ID NO: 35807 - DNA, 1464 bp, Escherichia coli
atgttcaggcagttgaaaaaaaacctggttgcaaccctcattgctgctatgaccattggtcaggtagccccggcgtttgccgacagcgcagacaccttgccggatatgggaacctccgcaggaagcacgctttccattggccaggaaatgcagatgggcgactattatgtccgccagctacgcggcagcgcgccgttaattaatgacccgctgttaacgcaatatattaattcgctgggtatgcgtctggtttcgcatgccaattcggttaagacaccgtttcatttctttctgatcaacaacgacgaaattaacgcctttgctttctttggcggcaacgtggtgctgcactctgccctgttccgttattccgataacgaaagtcaactggcttcagttatggcgcacgaaatctcccacgtcacccaacgtcacctggcgcgagcgatggaagatcagcagcgcagcgcgccgctgacctgggtcggcgcattaggttctattttactggcgatggccagtccgcaggcggggatggctgcgctgaccggtacactggcgggaacgcgccaggggatgatcagtttcacccagcaaaatgaacaggaagcggaccgcattggtattcaggtgctgcaacgctcgggattcgatccgcaggcgatgccgaccttcctcgaaaaattgctcgatcaggcgcgttactcctcgcgtccgccggaaattttattgactcacccgttgccggaaagtcgtctggcagatgcccgcaaccgtgctaatcagatgcgtccgatggtggtgcagtcgtcggaagatttctatctggcgaaagcgcgcacactggggatgtataattccggacgtaaccagctcaccagtgatttgctggatgaatgggcgaaaggaaacgttcgtcagcaacgagcagcacaatatggtcgtgctttacaggcgatggaagccaataaatacgacgaggcgcgtaaaacgctgcaaccgttactggcggcagaacctggcaacgcatggtatctcgatctggctactgatatcgatcttgggcaaaacaaagccaatgacgctatcaatcgtctgaaaaatgcccgtgatttacgcaccaatccggtgttgcagctcaacctggcgaacgcttatctgcaaggcggtcaaccacaagaagcggccaatattctgaatcgctacacctttaataataaagatgacagcaacggctgggatttgctggcacaggcggaagccgcgctaaataaccgcgatcaggaactggctgcgcgagcagaaggttatgcgctcgccgggcgactcgatcaggctatttccttgttgagtagcgccagttcgcaggtgaaattaggcagcctgcaacaagcacgttacgatgcgcgcatcgaccagttgcgccagctgcaggaacgctttaagccttataccaagatgtaa

SEQ ID NO: 35808 - DNA, 360 bp, Escherichia coli
atgaccaaacaggtaaaaatctaccataacccacgctgttcaaagagccgggaaacgctgaacctgctgaaagaaaacggcgtggagccagaagtggtgctctaccttgagacacccgccgatgcggcaacgctgcgtgatttgctgaaaatgctggggatgaatagcgctcgtgaattgatgcgccagaaagaggatctttataaagaactgaacctggctgacagttcgcttagcgaagaggcgctgattcaggcaatggtggataatccgaagctaatggagcgcccgattgtggtcgcgaatggcaaagcgcgaattggtcgtccaccggagcaggtgctggaaatcgtgggttaa

SEQ ID NO: 35809 - DNA, 747 bp, Escherichia coli
gtggtaaacttctcgcgattttgtgaaatcctggttgaggtatctctgaacacaccggcacagctctctttgccactttatcttcctgacgacgaaacctttgcaagtttctggccgggggataactcctctttactggccgcgctgcaaaacgtgctgcgtcaggaacatagcggttacatctatctctgggcacgcgaaggcgcggggcgcagccatctgctgcacgcggcttgcgcggaattgtcgcagcgtggcgatgcggtgggctatgtcccgctggataaacgcacctggtttgttccggaagtgctcgacggtatggagcatttgtcgctggtctgtatcgacaacattgagtgtattgcaggcgatgagttgtgggagatggcgattttcgatctctacaatcgaattctggaatcgggcaaaacacggttgttaatcaccggcgatcgtccaccgcggcagttgaatctgggattaccggatctcgcgtcgcgtctcgactgggggcagatctacaaattgcagccactttctgatgaagataagttgcaggcgctacagttacgcgcgcgtttgcgtggttttgaactgccggaagatgtggggcgtttcttgttgaagcggctcgacagagagatgcgcacgttatttatgacgttggatcagttggatcgtgcgtcgattaccgcgcaacgtaagctgaccattccgtttgtgaaagaaattctgaaactgtag

SEQ ID NO: 35810 - DNA, 1290 bp, Escherichia coli
atgacgcgccgtgctatcggggtgagtgaaagaccgccacttttacagacaatcccgcttagtttgcaacatttgttcgccatgtttggtgcaaccgtcctggtgcccgtcttatttcatattaacccggcgactgtactgttatttaacggtataggaacactgctgtatctcttcatctgtaaagggaaaattccggcttatcttggttccagctttgcctttatttcaccggtattgttactgttgccgttggggtatgaagtcgcgctgggcggctttattatgtgcggcgtgctgttctgcctggtttcttttatcgtgaagaaagcggggaccggctggctggacgtgctgtttccacctgcggcaatgggcgcaatcgttgccgtcatcggtctggagctggcgggcgtagctgccggtatggcaggtttactcccggctgaagggcaaactccagactccaaaaccatcatcatctccattaccaccctggcggttacggttttaggttccgtgctgtttcgtggtttcctggcaattatcccgattttaattggcgtgctggtgggctacgcgctctctttcgcaatgggaattgtcgataccacgccgattattaatgctcactggtttgcgctgccaactctctatacgccgcgcttcgagtggtttgccattctgactattctgccagcggcgttagtggttattgccgaacacgtagggcacctggtggtaacggctaatatcgtcaaaaaagatctgctgcgcgatccaggtctgcaccgttcgatgtttgctaacggcttgtcgaccgtgatctccggcttctttggctccacgccaaataccacctacggggaaaacattggcgtgatggcgatcacccgtgtttacagtacctgggttatcggcggggcggcgattttcgctatcctgctttcctgcgtcggtaaactggctgctgctatccagatgatcccattgccggtgatgggcggcgtttcgctgctgctttatggtgtcatcggtgcttccggtattcgtgttttgatcgaatcgaaagtggattacaacaaagcacagaacctgatcctgacttccgtgattttgatcatcggtgtcagtggcgcgaaggtaaacatcggcgcggcggagctgaaaggtatggcgctggcgaccatcgtcggtatcggcttaagtttgatcttcaaactgattagtgtgctgcgccctgaagaagtggtgctggacgcagaagacgcggatataacagacaaataa

SEQ ID NO: 35811 - DNA, 627 bp, Escherichia coli
atgaagatcgtggaagtcaaacacccactcgtcaaacacaagctgggactgatgcgtgagcaagatatcagcaccaagcgctttcgcgaactcgcttccgaagtgggtagcctgctgacttacgaagcgaccgccgacctcgaaacggaaaaagtaactatcgaaggctggaacggcccggtagaaatcgaccagatcaaaggtaagaaaattaccgttgtgccaattctgcgtgcgggtctggggatgatggacggtgtgctggaaaacgttccgagcgcgcgcatcagcgtcgtcggtatgtaccgtaatgaagaaacgctggagccggtaccgtacttccagaaactggtttctaacatcgatgagcgtatggcgctgatcgttgacccaatgctggcaaccggtggttccgttatcgcgaccatcgacctgctgaaaaaagcgggctgcagcagcatcaaagttctggtgctggtagctgcgccagaaggtatcgcagcgctggaaaaagcgcacccggacgtcgaactgtatactgcatcaattgaccagggactgaacgagcacggatacattattccgggcctcggcgatgccggtgacaaaatctttggtacgaaataa

SEQ ID NO: 35812 - DNA, 1038 bp, Escherichia coli
gtgaccgataaaacctctcttagctacaaagatgccggtgttgatattgacgcgggtaatgctctggttggaagaatcaaaggcgtagtgaagaaaacgcgtcgtccggaagtgatgggcggtctgggcggcttcggtgcgctgtgtgcattgccgcaaaaatatcgtgaacccgtgctggtttccggcactgacggcgtaggtaccaagctgcgtctggcgatggacttaaaacgtcacgacaccattggtattgatctggtcgccatgtgcgttaatgacctggtggtgcaaggtgcagaaccgctgtttttcctcgactattacgcaaccggaaaactggatgttgataccgcttcagcggtgatcagcggcatcgcggaaggttgtctgcaatcgggctgttcactggtgggtggcgaaacggcagaaatgccggggatgtatcacggtgaagattacgatgtcgctggtttctgcgttggcgtggtagaaaaatcagaaatcatcgacggctctaaagtcagcgatggcgatgtgctgattgcactcggctccagcggtccgcactcgaacggctattcgctggtgcgcaaaattcttgaagtcagcggttgtgatccgcaaaccaccgaacttgatggtaagccattagccgatcatctgctggcaccgacccgcatttacgtgaagtccgtgctggagttgattgaaaaggtcgatgtgcatgctattgcgcacctgaccggcggcggcttctgggaaaacattccgcgcgtattgccagataatactcaggcagtgattgatgaatcatcctggcagtggccggaagtgttcaactggctgcaaacggcaggtaacgttgagcgccatgaaatgtatcgcaccttcaactgcggcgtcgggatgattattgccctgcctgctccggaagtggacaaagccctcgccctgctcaatgccaacggtgaaaacgcgtggaaaatcggtatcatcaaagcctctgattccgaacaacgcgtggttatcgaataa

SEQ ID NO: 35813 - DNA, 639 bp, Escherichia coli
atgaatattgtggtgcttatttccggcaacggaagtaatttgcaggcaattattgacgcctgcaaaaccaataaaattaaaggcaccgtacgggcagttttcagcaataaggccgacgcgttcggccttgaacgcgcccgccaggcgggtattgcaacgcatacgctcatcgccagcgcgtttgacagtcgtgaagcctatgaccgggagttgattcatgaaatcgacatgtacgcacccgatgtggtcgtactggctggttttatgcgcattctcagcccggcgattgtctcccactatgccgggcgtttgctgaacattcacccttctctgctgccgaaatatcccggattacacacccatcgtcaggcgctggaaaatggcgatgaagagcacggtacatcggtgcatttcgtcaccgatgaactggacggtggcccggttattttacaggcgaaagtcccggtatttgctggtgatacggaggatgacatcaccgcccgcgtgcaaacccaggaacacgctatttatccactggtgattagctggtttgccgatggtcgtctgaaaatgcacgaaaacgccgcgtggctggatggtcaacgtctgccgccgcagggctacgctgccgacgagtaa

SEQ ID NO: 35814 - DNA, 2067 bp, Escherichia coli
atgggtcaggaaaagctatacatcgaaaaagagctcagttggttatcgttcaatgaacgcgtgcttcaggaagcggcggacaaatctaacccgctgattgaaaggatgcgtttcctggggatctattccaataaccttgatgagttctataaagtccgcttcgctgaactgaagcgacgcatcattattagcgaagaacaaggctccaactctcattcccgccatttactgggcaaaattcagtcccgggtgctgaaagccgatcaggaattcgacggcctctacaacgagttactgctggagatggcgcgcaaccagatcttcctgattaatgaacgccagctctccgtcaatcaacaaaactggctgcgtcattattttaagcagtatctgcgtcagcacattacgccgattttaatcaatcctgacactgacttagtgcagttcctgaaagatgattacacctatctggcggtggaaattatccgtggcgataccatccgttacgcgctgctggagatcccatcagataaagtgccgcgctttgtgaatttaccgccagaagcgccgcgtcgacgcaagccgatgattcttctggataacattctgcgttactgccttgatgatattttcaaaggcttctttgattatgacgcactgaatgcctattcaatgaagatgacccgcgatgccgaatacgatttagtgcatgagatggaagccagcctgatggagttgatgtcttccagtctcaagcagcgtttaactgctgagccggtgcgttttgtttatcagcgcgatatgcccaatgcgctggttgaagtgttacgcgaaaaactgactatttcccgctacgactccatcgtccccggcggtcgttatcataattttaaagactttattaatttccccaatgtcggcaaagccaatctggtgaacaaaccactgccgcgtttacgccacatttggtttgataaagcccagttccgcaatggttttgatgccattcgcgaacgcgatgtgttgctctattatccttatcatacctttgagcatgtgctggaactgctgcgtcaggcttcgttcgacccgagcgtactggcgattaaaattaacatttaccgcgtggcgaaagattcacgcatcatcgactcgatgatccacgccgcacacaacggtaagaaagtcaccgtggtggttgagttacaggcgcgtttcgacgaagaagccaacattcactgggcgaagcgcctgaccgaagcaggcgtgcacgttatcttctctgcgccggggctgaaaattcacgccaaactgttcctgatttcacgtaaagaaaacggtgaagtggtgcgttacgcacacatcgggaccgggaactttaacgaaaaaaccgcgcgtctttatactgactattcgttgctgaccgccgatgcgcgcatcaccaacgaagtacggcgggtgttcaactttattgaaaacccataccgtccggtgacatttgattatttaatggtgtcgccgcaaaactcccgccgcctgttgtatgaaatggtggaccgcgagatcgccaacgcgcagcaagggctgcccagtggtatcaccctgaagctaaataaccttgtcgataaaggcctggttgatcgtctgtatgcggcctccagctccggcgtaccggttaatctgctggttcgcggcatgtgttcgctgatccccaatctggaaggcattagcgacaacattcgtgccatcagtattgttgaccgttaccttgaacatgaccgggtttatatttttgaaaatggcggcgataaaaaggtctacctttcttccgccgactggatgacgcgcaatattgattatcgtattgaagtggcgacgccactgctcgatccgcgcctgaagcagcgggtgctggacatcatcgacatattgttcagcgatacagtcaaagcacgttatatcgataaagaactcagtaatcgctacgttccccgcggcaatcgccgcaaagtacgggcgcagttggcgatttacgactacatcaaatcactcgaacaacctgaataa

SEQ ID NO: 35815 - DNA, 1542 bp, Escherichia coli
atgccaatacacgataaatcccctcgtccgcaggagtttgctgcggtcgatcttggttcaaacagttttcacatggtcatagcccgtgtggtagatggtgccatgcagattattggccgcctgaaacagcgggtgcatctggcggacggcctggggccagataatatgttgagtgaagaggcaatgacgcgcggtttgaactgtctgtcgctgtttgccgaacggctgcaagggttttctcctgccagcgtctgtatagttggcacccatacactgcgtcaggcgctgaacgccactgactttctgaaacgcgcggaaaaggtcattccctacccgattgaaattatttccggtaatgaagaagcccgtctgatttttatgggcgtggaacatacccaaccggagaaaggtcgcaaactggttattgatattggcggcggatctacggaactggtgattggtgaaaatttcgaaccgattctcgttgaaagccgccggatgggttgtgtcagctttgcccagctttacttccctggcggggtcatcaataaagagaattttcagcgcgctcgcatggcggcagcacaaaaactggaaactttaacctggcaattccgtattcagggctggaacgtggcaatgggcgcttccggtaccataaaagccgcccatgaagtgttaatggaaatgggcgagaaagacgggataattaccccggaacgtctggaaaaactggtaaaagaagttttacgtcaccgtaatttcgcatcgctgagtttaccgggtctttccgaagagcggaaaacagtcttcgttccgggactggcgattttatgcggtgtgtttgatgctttagccatccgtgaactgcgcctttctgacggggcgttacgcgaaggcgtactgtatgaaatggaaggacgtttccgtcatcaggatgtgcgtagtcgcaccgccagcagcctcgccaaccagtatcacatcgacagcgaacaggcccgacgggtactggataccactatgcaaatgtacgaacagtggcgggaacagcaaccgaagctggcgcatccgcaactggaggcgctactgcgatgggccgccatgctgcatgaggtcgggttgaatatcaaccacagcggtttgcatcgccactcagcttatattctgcaaaacagcgacttgccgggttttaatcaggaacagcagttgatgatggcgacgctggtgcgctatcaccgtaaagcgattaagctcgacgatctgccgcgctttaccttgtttaagaagaaacagttcctgccactgattcagctattgcgccttggcgtattactcaataatcaacgtcaggcaaccactacaccgccaacattgacgctgattaccgatgacagtcactggacactgcgtttcccgcatgactggtttagtcagaatgcgctggtactgcttgatctggaaaaggagcaagaatactgggaaggcgtggctggctggcggttgaaaattgaagaagaaagtaccccagaaatcgccgcttaa

SEQ ID NO: 35816 - DNA, 2244 bp, Escherichia coli
atgaaactgaatgcaacttatataaaaatacgtgataaatggtgggggcttccgctgttcctgccttctttaatcttgcccattttcgcccacattaatactttcgcgcatatttcttccggtgaggtttttctcttttatctgcctctggctctgatgatcagcatgatgatgtttttcagctgggcggcattgccagggatcgccttagggatttttgtccgcaaatatgcagagctgggtttttacgaaacgctctcattaacggctaattttattatcattatcattctctgttggggcggttacagggtctttactccccggcgtaacaacgtttcacatggtgatacccgtttaatttcccagcgtatattctggcagattgtgtttcctgcaacgctgtttctgatacttttccagtttgctgcgtttgtaggattactggcgagcagagaaaatctggtcggcgtcatgccttttaacctcgggaccttaatcaattatcaggccttactggtgggcaatctgattggtgtcccgctgtgctacttcatcattcgtgtagtgcgaaatccgttttatttacgtagttattattcgcaattaaaacagcaggttgatgtcaaagtcaccaaaaaagagttcgcactctggctactggcattaggtgcgttgttgttgctgttatgcatgccgttaaatgaaaaaagcacaatttttagcaccaattataccttgtcattattgctgcccctgatgatgtggggagccatgcgctatggttataagctgatttcgctgctctgggcggtcgtgttgatgatcagcatccacagctatcaaaattacattcccatttatcctggctataccacgcagctgaccataacctcctccagttatctggtattctcttttattgtcaattatatggctgtactggcaacccgtcagagagcggtagtcagacgcattcagcggcttgcgtatgtggacccggtggttcatctgccaaatgttcgcgccctgaatcgcgcgttgcgtgatgccccctggtctgcgctttgttatttacgcatccctggcatggaaatgctggttaaaaactatggcatcatgctacggattcaatacaagcaaaaactttctcactggctgtcaccattgctggaaccgggtgaagatgtttatcagctatcgggtaacgatctcgcgctgcgactgaatacagaatcgcaccaggagcgcattaccgcactggatagccatctcaagcaatttcgtttcttttgggatggaatgccgatgcaaccgcagattggcgtcagttactgctatgtgcgctcgccagtgaatcatatctacttactgctgggagagctaaatacggtcgccgaactttccatcgtgaccaacgccccagaaaatatgcagcgtcgcggggcaatgtatttgcaacgcgaattgaaagataaagtcgcgatgatgaatcggctacagcaggcgctggaacacaaccattttttcctgatggcccagccgattaccggtatgcgtggcgatgtctaccatgaaattcttctgcgtatgaaaggtgagaatgatgaactgatcagccccgacagcttcttgccggtcgcgcacgaatttggtttatcgtcgagtatcgacatgtgggtcattgagcatacgctgcaatttatggctgaaaacagagcgaagatgcccgctcaccgttttgcgattaatctgtcgccaacctcggtatgtcaggctcgttttcccgttgaagtcagtcagctgctggctaaatatcaaattgaagcgtggcaacttatttttgaagtcaccgaaagtaatgctctgacaaatgttaagcaggcgcaaatcaccttgcagcatcttcaggaattaggctgccagattgcgattgatgatttcggcaccggctatgccagctatgcgcggcttaaaaatgtgaatgccgatttgcttaaaattgacggcagttttatccgcaatattgtgtcaaatagtctggattatcagatagtggcgtcgatttgccacctggcgcgaatgaagaaaatgcgggtagtggcagagtacgttgaaaacgaagagatccgcgaggcggtgctctctttggggatcgattatatgcagggttatcttattggtaagccgcaaccgttaattgatacgctgaatgaaatcgaacccattcgcgaaagtgcctga

SEQ ID NO: 35817 - DNA, 153 bp, Escherichia coli; identical to SEQ ID NO: 28671

SEQ ID NO: 35818 - DNA, 174 bp, Escherichia coli; identical to SEQ ID NO: 28672

SEQ ID NO: 35819 - DNA, 516 bp, Escherichia coli; identical to SEQ ID NO: 29567

SEQ ID NO: 35820 - DNA, 540 bp, Escherichia coli
atgaagaaagtttttctttgcgccatcttaacctccttaagctatccggctatcgcctcatcattgcaggatcaactctctgctgtcgcagaagcggaacagcaaggtaaaaatgaagagcaaaggcagcatgacgaatgggtcgcggagcgcaacagggaaatccagcaagagaagcaacgtcgcgcaaacgcccaggccgccgctaacaaaagagcggcaacggcagcggcaaataagaaagctcgtcaggataaactggacgccgaagccactgcggacaaaaaacgcgatcaaagttatgaagatgagctacgcagcttagagattcagaaacaaaaactggcgctggcgaaagaagaagcccgcgttaagcgagaaaacgaatttatcgatcaggaactgaagcacaaagctgcgcaaaccgatgtggtgcaatctgaagctgacgcaaacaggaatatgactgagggcggtcgcgatctgatgaaaagcgtgggcaaagcagaagagaacaaatcggacagctggtttaattaa

SEQ ID NO: 35821 - DNA, 1578 bp, Escherichia coli
atgacggaaaacattcataagcatcgcatcctcattctggacttcggttctcagtatactcaactggttgcgcgccgcgtgcgtgagctgggcgtttactgcgaactgtgggcgtgggatgtgacagaagcacaaattcgtgacttcaatccaagcggcattattctttccggcggcccggaaagcaccaccgaagaaaacagcccgcgtgcgccgcagtatgtctttgaagcaggcgtaccggtattcggcgtttgctatggcatgcagaccatggcaatgcagttgggcggtcacgttgaagcctctaacgaacgtgaatttggctacgcgcaggttgaagtcgtaaacgacagcgcactggttcgcggtattgaagatgctctgaccgcagacggtaaacctctgctcgatgtctggatgagccacggcgataaagttaccgctatcccgtccgacttcgtcaccgtagccagcaccgaaagctgcccgtttgccattatggctaacgaagaaaaacgcttctatggcgtacagttccacccggaagtgactcacacccgccagggtatgcgcatgctggagcgttttgtgcgtgatatctgccagtgtgaagccctgtggacgccagcgaaaattatcgacgatgctgtaactcgcatccgcgagcaggtaggcgacgataaagtcatcctcggcctctctggtggtgtggattcctccgtaaccgcaatgctgctgcaccgcgctatcggtaaaaacctgacttgcgtattcgtcgacaacggcctgctgcgtctcaacgaagcagagcaggttctggatatgtttggcgatcactttggtctcaatattgttcacgttccggcagaagatcgcttcctgtcagcgctggctggcgaaaacgatccggaagcaaaacgtaaaatcatcgggcgcgttttcgttgaagtattcgatgaagaagcgctgaaactggaagacgtgaagtggctggcgcagggtactatctaccctgacgttatcgaatctgcggcgtctgcaaccggtaaagcacacgtcatcaaatctcaccacaacgtgggcggcctgccgaaagagatgaagatgggcctggttgaaccgctgaaagagctgttcaaagacgaagtgcgtaagattggtctggagctgggcctgccgtacgacatgctgtaccgtcacccgttcccgggaccaggccttggcgttcgtgttctgggtgaagtgaagaaagagtattgtgacctgctgcgccgtgctgacgccatcttcattgaagaactgcgtaaagcggacctgtacgacaaagtcagccaggcattcaccgtcttcctgccggtacgttccgttggcgtaatgggcgatggtcgtaagtatgactgggttgtttctctgcgtgctgtcgaaaccatcgactttatgaccgcacactgggcgcatctgccgtacgatttcctcggtcgcgtttccaaccgcattatcaatgaagtgaacggtatttcccgcgtggtgtatgacatcagcggcaagccaccagctaccattgagtgggaatga

SEQ ID NO: 35822 - DNA, 1467 bp, Escherichia coli
atgctacgtatcgctaaagaagctctgacgtttgacgacgttctcctcgttcctgctcattctaccgttctgccgaatactgctgacctcagcacccagctgacgaaaactattcgtctgaatatccctatgctttccgcagcaatggataccgtaacggaagcgcgcctggctattgctctggctcaggaaggcggtatcggctttatccacaaaaacatgtccattgaacgccaggcagaagaagttcgccgtgtgaaaaaacacgaatctggcgtggtaactgatccgcagaccgtgctgccgacaaccaccctgcgtgaagtgaaagaactgaccgagcgtaacggctttgcgggctacccggtggttaccgaagaaaacgaactggtcggcatcatcaccggtcgtgacgtgcgttttgtgaccgatctgaatcaaccggttagcgtttacatgacgccgaaagagcgtctggtaaccgtgcgtgaaggcgaagcccgtgaagtggtgctggcaaaaatgcacgaaaaacgcgttgaaaaggcgctggtggttgatgacgaattccacctgatcggcatgatcaccgtgaaagacttccagaaagcggaacgtaaaccgaacgcctgtaaagacgagcaaggccgtctgcgtgttggtgcagcggttggcgcgggtgcgggtaacgaagagcgtgttgacgcgctggttgccgcaggcgttgacgttctgctgatcgactcctctcacggtcactcagaaggcgttctgcaacgtatccgtgaaacccgtgctaaatatcctgatctgcaaatcatcggcggcaacgtggcaacagctgcaggtgcacgcgctctggcagaagctggttgcagcgcggttaaagtcggtatcggcccaggctctatctgtacgactcgtatcgtgactggcgtcggtgttccacagatcaccgccgttgctgatgcagtagaagccctggaaggcaccggtattccggttatcgctgacggcggtatccgtttctcaggcgatatcgccaaagctatcgccgctggcgcaagcgcggtaatggtgggttccatgctggcgggtactgaagaatctccgggtgaaatcgaactctaccagggccgttcttacaaatcttaccgtgggatgggttccctgggcgcgatgtccaaaggttcttctgaccgttacttccagagcgacaacgctgccgacaaactggtgccggaaggtatcgaaggtcgcgtagcctataaaggtcgcctgaaagagatcattcaccagcagatgggcggcctgcgctcctgtatggggctgaccggctgtggtactatcgacgaactgcgtactaaagcggagtttgtacgtatcagcggtgcgggcattcaggaaagccacgttcacgacgtgaccattactaaagagtccccgaactaccgtctgggctcctga

SEQ ID NO: 35823 - DNA, 1371 bp, Escherichia coli
atgttaccttctcaatcccctgcaatttttaccgttagtcgcctgaatcaaacggttcgtctgctgcttgagcatgagatgggacaggtttggatcagcggcgaaatctctaatttcacacaaccggcttccggtcactggtactttacactcaaagacgacaccgcccaggtacgctgcgcgatgttccgcaacagcaaccgccgggtgaccttccgcccacagcatgggcaacaggttttagttcgcgccaatattacgctctacgagccgcgcggtgactaccagattatcgtcgaaagtatgcagcctgccggtgaagggttgctgcaacaaaaatacgaacagcttaaagcgaaattgcaggctgaaggtctgttcgatcagcaatacaaaaaatcactcccctctcctgcgcattgcgttggtgtgatcacctcaaaaaccggtgctgcgctacatgatattttgcatgtattaaaacgtcgcgatccttctctgccggtgatcatctaccccaccgccgttcagggcgatgacgcgccagggcaaattgttcgcgccattgaactggcgaatcagcgcaacgagtgcgacgtgttgatcgttgggcgcggcggcggttcgctggaagatttatggagttttaacgacgaacgtgtagcgcgggcgatttttgccagccgcattccggtcgtcagcgccgtcgggcatgagacggatgtgacgattgccgactttgtcgctgatctgcgtgcgccaacgccgtctgccgccgctgaagtagtgagccgcaatcaacaggagttactgcgtcaggtgcagtctgcgcagcagcgcctcgaaatggcaatggattattatctcgccaaccgcacgcgtcgttttacgcagatccatcatcgcttacagcagcagcatccacagctccggctggcacgccagcaaaccatgcttgagcgcctgcaaaagcggatgagctttgcgctggaaaatcagcttaagcgtgccgggcaacagcagcagcggttaacacagcggctaaaccagcaaaatccgcagccgcgtattcaccgcgcacagacgcgaattcaacaactggaatatcgcctggcagaaacgttgcgcgcgcaactgagcgcaacgcgagaacggtttggtaatgcagtaacgcacctggaagcagttagcccgctttcgacgctggcgcgtggatacagcgttactactgctactgacggcaatgtactgaaaaaagtgaagcaagttaaagcgggtgaaatgctaaccacacgtctggaagacggctggatagaaagtgaagtaaaaaacatccagccggtaaaaaaatcgcgtaaaaaggttcattaa

SEQ ID NO: 35824 - DNA, 216 bp, Escherichia coli; identical to SEQ ID NO: 9461

SEQ ID NO: 35825 - DNA, 1473 bp, Escherichia coli
atggtacctgtggtcgcgcttgtcgggcgccctaacgtaggaaaatccacgttatttaaccgtctaactcgcacccgagatgcgctggttgcggatttcccgggtctgactcgtgaccgtaagtacggtcgtgcagaaattgaaggccgcgagtttatttgtattgatactggtgggattgatggcaccgaagacggtgtagagacacgtatggcggaacagtcgctgctggcgattgaagaagcggacgtcgtactgtttatggtggatgcgcgcgcgggcctgatgccggcggatgaagcgattgccaaacatctgcgctcccgtgaaaaaccgaccttcctggtggcaaacaaaactgacggtctggatcccgatcaggcggtggttgatttctactcgcttggtttaggggaaatctacccgatcgccgcgtctcacggtcgtggcgtattaagtctgctggagcacgtgctgctgccgtggatggaagatctcgcaccgcaagaagaagtcgacgaagacgccgaatactgggcgcaatttgaagcggaagagaacggcgaagaagaagaggaagacgacttcgacccgcaaagtctgccgatcaaactggcgattgtgggtcgtccgaacgtaggtaagtctacactcactaaccgtattcttggtgaagagcgcgttgttgtttatgatatgcctggtacgacgcgtgacagtatctacattccaatggaacgcgatggacgtgagtatgtgctcattgacaccgctggcgtacgtaaacgcggcaaaatcaccgatgctgtagagaaattctcggtaatcaaaacgttgcaggccattgaagatgccaacgtggtgatgttagtgattgatgcgcgcgaaggtatttccgatcaggatctctccctgctgggctttattctcaatagtgggcgctcacttgtcattgtggtgaataagtgggatggcctgagccaggaagtgaaagagcaggtgaaagaaacgctggacttccgtctgggctttatcgattttgctcgtgtgcattttatctcagccttgcacggcagtggtgttggtaatctgtttgaatcagtacgtgaagcgtatgacagctccacccgtcgtgtggggacctctatgctgacgcgcatcatgacgatggctgttgaagatcaccaaccgccgttggtacgcggtcgtcgtgtgaagctgaaatatgcccacgccggtggttataacccgccgattgtggtgattcacggtaatcaggtgaaagacctgcctgattcctacaagcgttacttgatgaactacttccgcaaatcgctggacgtaatgggatcgccgattcgtattcagttcaaagaaggggaaaacccgtatgcgaacaagcgtaacaccctgacgccaacccagatgcgtaaacgtaagcgtctgatgaagcacatcaagaaaaataaataa

SEQ ID NO: 35826 - DNA, 1179 bp, Escherichia coli
atgcaattgcgtaaattactgctgccaggactgctttccgttacccttttaagcggctgttcgctgtttaacagcgaagaagatgtggtaaagatgtccccattgccgaccgttgaaaaccagtttacgccgaccacggcgtggagcacttccgttggtagcggcattggcaacttctattccaatcttcatccggcactggcggacaacgttgtctatgcagcggaccgcgctggtttagtaaaagcgctgaatgcggatgatggcaaagaaatctggtctgtcagcctggccgagaaagatggctggttctctaaagagcctgcattactttctggcggtgtgaccgtgtctggtgggcatgtctacattggcagcgaaaaggcgcaggtttacgcgctgaataccagcgatggtactgtggcatggcaaactaaagtcgcgggtgaagcactttcgcgtccggtggtcagcgacggtctggtgttaatccacaccagtaacggtcagttacaagcgctgaacgaagctgacggcgctgtcaaatggacagttaacctcgatatgccttcgctctctttgcgtggcgagtctgcgccggcaacggcttttggtgcggccgtcgtgggtggcgataatggtcgcgtcagcgcagtgctgatggaacagggccagatgatttggcagcagcgtatttcccaggcgaccggttctaccgaaattgaccgtctgagcgatgttgacacgactcccgtcgttgttaacggcgttgttttcgcgctggcctataatggtaacctgacggcgcttgatctgcgcagtggtcagattatgtggaaacgcgaactgggttcggtgaatgatttcatcgtcgacggcaatcgcatctatctggtcgatcaaaatgaccgggtgatggcgttgaccattgatggcggcgttacgctgtggacacaaagcgatctgttgcatcgcctgctgacttctccggtgctgtataatggcaacctggtggtaggtgacagcgaaggttatctgcactggattaacgtcgaagatggtcgtttcgttgcccagcaaaaagttgatagttccggtttccagactgaaccggttgccgctgatggcaaactgctgatccaggcaaaagacggaaccgtgtactctattacacgttaa

SEQ ID NO: 35827 - DNA, 621 bp, Escherichia coli
gtggaaatttacgagaacgaaaacgaccaggtagaagcggttaaacgcttttttgctgaaaatggcaaagcactggctgttggggtgattttgggcgttggcgcactaattggctggcgctactggaacagccatcaggttgattctgcacgctccgcttctcttgcctatcaaaatgcggttaccgcagtgagcgaaggcaaaccggatagcattccggcggcggaaaaatttgctgctgaaaataaaaatacttatggtgcgctggcttctttggaacttgcgcagcaatttgttgacaaaaatgaactagagaaagctgccgcccagttacaacaggggctggcagacacgagcgatgaaaatctcaaagccgtgataaatctgcgtcttgctcgcgttcaggttcagctcaagcaggctgatgccgcgctgaaaacccttgataccatcaaaggtgaagggtgggctgccattgttgccgacctgcgtggtgaagcattgctgagcaaaggtgataagcaaggtgcgcgtagtgcatgggaagcaggcgtgaaaagcgatgttaccccggcactgagcgaaatgatgcagatgaaaattaataatttgtccatctga

SEQ ID NO: 35828 - DNA, 1275 bp, Escherichia coli
gtggcaaaaaacattcaagccattcgcggcatgaacgattacctgcctggcgaaacggccatctggcagcgcattgaaggcacactgaaaaacgtgctcggcagctacggttacagtgaaatccgcttgccgattgtagagcagaccccgctattcaaacgtgcgattggtgaagtcaccgacgtggttgaaaaagagatgtacacctttgaggatcgcaatggcgacagcctgactctgcgccctgaagggacggcgggctgtgtacgcgccggcatcgagcatggtcttctgtacaatcaggaacagcgtctgtggtatatcgggccgatgttccgtcacgagcgtccgcagaaagggcgttatcgtcagttccatcagttgggctgcgaagttttcggtctgcaaggtccggatatcgacgctgaactgattatgctcactgcccgctggtggcgcgcgctgggtatttccgagcacgtaacacttgagctgaactctatcggttcgctggaagctcgtgcgaattaccgcgatgcgctggtggcattccttgagcagcataaagaaaagctggacgaagactgcaaacgccgcatgtacactaacccgctgcgcgtgctggattcaaaaaatccggaagtgcaggcgcttctcaacgacgctccggcattaggcgattatctggacgaggaatctcgtgagcattttgccggtctgtgcaaactgcttgagagcgcggggatcgcttacaccgtcaaccagcgtctggtgcgtggcctggattactataactgtaccgttttcgagtgggtgactaacagcctcggttcccagggcaccgtgtgtgcaggcggtcgttatgacggtctggtggaacaactgggtggtcgtgctacaccggctgtcggttttgcgatgggcctcgaacgtcttgtattgttagttcaggccgttaatccggaatttaaggccgatcctgttgtcgatatatacctggtggcttcaggtgctgatacacaatctgcggctatggcattagcagagcgtctgcgtgatgaattaccgggcgtgaaattgatgaccaaccacggcggcggcaactttaagaaacagtttgcccgtgctgataaatggggtgcccgcgttgctgtggtgctgggtgagtctgaagtggctaacggcacagcagtagtgaaggatttgcgctctggtgagcaaacggcagttgcgcaggatagcgtagccgcgcatttgcgcacgttactgggttaa

SEQ ID NO: 35829 - DNA, 1119 bp, Escherichia coli
atgcataaccaggctccaattcaacgtagaaaatcaacacgtatttacgttgggaatgtgccgattggcgatggtgctcccatcgccgtacagtccatgaccaatacgcgtacgacagacgtcgaagcaacggtcaatcaaatcaaggcgttggaacgtgttggcgctgatatcgtccgtgtctcagtaccgacgatggacgcggcagaagcgttcaaactcatcaaacagcaggttaacgtgccgctggtggctgacatccacttcgactatcgcattgcgctgaaagtagcggaatacggcgtcgattgtctgcgtattaaccctggcaatatcggtaatgaagagcgtattcgcatggtggttgactgtgcgcgcgataaaaacattccgatccgtattggcgttaacgccggatcgctggaaaaagatctgcaagaaaagtatggcgaaccgacgccgcaggcgttgctggaatccgccatgcgtcatgttgatcatctcgatcgcttgaacttcgaacagttcaaagtcagcgtgaaagcgtcagacgtcttcctcgctgttgagtcttatcgtttgctggcaaaacagatcgatcagccgctgcatctggggatcaccgaagcgggtggtgcgcgcagcggggcggttaaatccgccattggtttaggtctgctgctgtctgaaggcattggcgacacgctgcgcgtatcgctggcggccgatccggttgaagagatcaaagtcggtttcgatattttgaaatcgctgcgtatccgttcgcgcgggatcaacttcatcgcctgtccaacctgttcgcgtcaggagtttgatgttatcggtacggttaacgcgctggagcaacgcctggaagatatcatcactccgatggacgtttcgattatcggctgtgtggtgaatggcccaggtgaggcgctggtttctacactcggcgtcaccggcggtaacaagaaaagcggcctctatgaagatggcgtgcgcaaagaccgtctggacaacaacgatatgatcgaccagctggaagcgcgcattcgtgcgaaagccagtcagctggacgaagcgcgtcgaattgacgttcagcaggttgaaaaataa

SEQ ID NO: 35830 - DNA, 1014 bp, Escherichia coli
atgaatactgaagccacgcacgaccaaaatgaagcacttactaccggcgctcgcctgcgtaatgctcgcgaacaactaggacttagtcagcaggccgttgccgagcgactttgcctgaaggtttccacggtacgcgacattgaagaagataaggcacccgccgatcttgcttcaacattcctgcgcggatatatccgctcttatgcgcgtctggtacatattccagaagaagaactgctgccagggctggaaaagcaggctccacttcgggctgcaaaagttgcgccgatgcagagtttttccctcggtaaacgccgcaaaaaacgcgacggctggctgatgaccttcacctggctggtgttgtttgtggttatcggcctgagcggtgcctggtggtggcaagaccacaaagctcagcaggaagagatcaccactatggccgatcaatcttcggcggaattgagcagtaatagcgagcaggggcagagtgttccgttaaatacgtcgacaactacagacccggctacaacgtccacgccgccagcgtctgtggatactaccgcaaccaacacgcaaacacctgccgtaactgcgccagcaccagctgttgatccgcaacagaatgcggttgtttcgccttcgcaggcaaatgttgataccgccgcgaccccggcaccaacggcaacaacaacgccagatggtgctgcgccgttgccaaccgatcaggctggcgtgaccacgccggcggctgatccgaatgcgctggtgatgaactttactgccgattgctggctggaggtcactgatgctaccggtaaaaaactgtttagcgggatgcagcgtaaagacggtaatttgaatttaaccggccaggcaccgtataaactgaaaattggtgcgccagccgcagtacagatccagtatcaagggaaacctgtcgatctgagtcgttttatcagaactaaccaggttgcgcgtctgaccctcaatgccgaacaatcaccggcgcagtaa

SEQ ID NO: 35831 - DNA, 1155 bp, Escherichia coli
atgtctgaacaattagtcacacctgaaaacgtcaccacgaaagatggaaaaatcaacctgctggatctcaaccgtcagcagatgcgggagttttttaaagatttaggtgaaaaacccttccgcgccgatcaggtgatgaagtggatgtatcactattgctgcgacaactttgatgagatgaccgacatcaacaaagtgttgcgcggcaaactgaaagaggtggcggagatccgcgcaccggaagtggttgaagaacagcgttcatctgacggcaccattaaatgggcaattgccgttggcgatcagcgcgtcgaaacggtgtatatcccggaagacgaccgtgccacgctctgcgtctcttcgcaggtggggtgtgcgctggagtgtaaattctgttccaccgcccagcagggctttaaccgcaacctgcgggtatcggaaattatcggccaggtgtggcgtgcagcgaaaatcgtcggcgcagcaaaagtcaccggtcagcgtccaatcactaacgtagtgatgatgggcatgggcgagccgctgctcaacctgaacaatgtcgttccggcgatggaaatcatgcttgatgatttcggttttggcctgtctaaacgtcgcgtgacgctttccacttccggtgtagttccggcgctggataaactgggcgatatgatcgacgttgcactggcaatttccctgcacgcgccgaacgacgaaattcgtgacgaaattgtgccgatcaacaaaaagtacaatatcgaaacgttccttgctgcggtacgccgttatctggagaaatccaacgccaatcagggccgagtcactattgaatacgtgatgcttgaccacgttaacgacggcactgaacacgcgcaccaactggcggagctactgaaagatacgccgtgtaagatcaacctgatcccgtggaacccgttccctggcgcgccgtatggacgcagttcgaacagccgtatcgaccgtttctcaaaagtgctgatgagctacggtttcaccactattgtgcgtaaaactcgtggtgatgatatcgatgctgcctgtggtcagttggcgggcgatgttatcgaccgtacgaaacgtaccctgcgtaaacggatgcagggtgaagccatcgatattaaagcggtctga

SEQ ID NO: 35832 - DNA, 432 bp, Escherichia coli
atggctattgaacgtactttttccatcatcaaaccgaacgcggtagcaaaaaacgtcataggtaatatctttgcgcgctttgaagctgcagggttcaaaattgtcggcaccaaaatgctgcacctgaccgttgaacaggctcgtggcttttatgctgaacacgatggaaaaccgttctttgatggtctggttgaattcatgacctctggcccgatcgtggtttccgtgctggagggtgaaaacgccgttcagcgtcaccgcgatctgctgggcgcgaccaatccggcaaacgcactggccggtactctgcgtgctgattacgctgacagcctgaccgaaaatggtacccacggttctgattccgtcgaatctgccgctcgcgaaatcgcttatttcttcggcgaaggcgaagtgtgcccgcgcacccgttaa
